(19) United States
(12) Patent Application Publication
(10) Pub. No.: US 2025/0057892 A1
(43) Pub. Date: Feb. 20, 2025

(54) ENGINEERED PARASITES FOR DELIVERING PROTEIN TO THE CENTRAL NERVOUS SYSTEM (CNS)

(71) Applicants: Ramot at Tel-Aviv University Ltd., Tel-Aviv (IL); The University Court of the University of Glasgow, Glasgow (GB)

(72) Inventors: Oded RECHAVI, Tel-Aviv (IL); Shahar BRACHA, Tel-Aviv (IL); Lilach SHEINER, Glasgow (GB)

(73) Assignees: Ramot at Tel-Aviv University Ltd., Tel-Aviv (IL); The University Court of the University of Glasgow, Glasgow (GB)

(21) Appl. No.: 18/814,678

(22) Filed: Aug. 26, 2024

Related U.S. Application Data
(62) Division of application No. 17/584,508, filed on Jan. 26, 2022, now Pat. No. 12,070,476.
Application No. 17/584,508 is a division of application No. 16/313,060, filed on Dec. 24, 2018, now Pat. No. 11,260,081.
(60) Provisional application No. 62/355,898, filed on Jun. 29, 2016.

(51) Int. Cl. A61K 35/68; C07K 14/45; C12N 9/00; C12N 15/65; C12N 15/79

(52) U.S. Cl. CPC A61K 35/68; C07K 14/45; C12N 9/93; C12N 15/65; C12N 15/79; C07K 2319/10; C12Y 603/05005

(57) ABSTRACT

Provided are nucleic acid constructs, Toxoplasma comprising same, pharmaceutical compositions comprising same and methods using same for delivering a protein-of-interest to a tissue-of-interest of a subject, such as the CNS and further treating a pathology which is treatable by administration of a therapeutic polypeptide in a central nervous system of the subject.

### RELATED APPLICATIONS

[0001] This application is a divisional of U.S. patent application Ser. No. 17/584,508 filed on Jan. 26, 2022, now U.S. Pat. No. 12,070,476, which is a divisional of U.S. patent application Ser. No. 16/313,060 filed on Dec. 24, 2018, now U.S. Pat. No. 11,260,081, which is a National Phase of PCT Patent Application No. PCT/IL2017/050731 having International Filing Date of Jun. 29, 2017, which claims the benefit of priority under 35 USC § 119(e) of U.S. Provisional Patent Application No. 62/355,898 filed on Jun. 29, 2016. The contents of the above applications are all incorporated by reference as if fully set forth herein in their entirety.

### SEQUENCE LISTING STATEMENT

[0002] The XML file, entitled 101336ReplacementSequenceListing.xml, created on Nov. 6, 2024, comprising 15,260,695 bytes, submitted concurrently with the filing of this application is incorporated herein by reference.

### FIELD AND BACKGROUND OF THE INVENTION

[0003] The present invention, in some embodiments thereof, relates to a nucleic acid construct for the secretion of a pharmaceutical polypeptide fused to a Toxoplasma gondii secreted polypeptide, and Toxoplasma comprising same, and, more particularly, but not exclusively, to a pharmaceutical compositions and methods of using same for treating a subject.

[0004] The lack of robust methods for the delivery of protein therapeutics is to a great degree the current bottleneck in their translation into clinical treatment. Proteins often serve a highly specific and complex set of functions that cannot be mimicked by simple chemical compounds (Nat Rev Drug Discov. 2008; 7(1):21-39. Protein therapeutics: a summary and pharmacological classification. Leader B, Baca Q J, and Golan D E); however, owing to their macromolecular nature, the delivery of therapeutic protein to target sites in the body is extremely challenging. Low functional stability and rapid loss of activity following administration or during storage, along with low permeability through biological barriers, limit the delivery of active proteins. The ongoing development of chemical modifications, conjugates and carrier systems aided the delivery of some therapeutic proteins, but these are mostly still limited to targets within the “accessible target space”—in the vascular compartment or on the surface of cells (Mitragotri 2014, Nat. Rev. Drug. Discov. 13(9):655-72). Efficient delivery is particularly challenging in the field of neurological diseases due to the blood-brain barrier (BBB), which tightly regulates the transport of molecules to the brain, while further complexity is added when the target is intracellular.

[0005] In order to deliver supplementary proteins to cells within the CNS, it is necessary to develop mechanisms that penetrate the BBB and may target specific cells within the CNS.

[0006] Currently, the major approaches for treating conditions caused by a deficiency of a specific protein are gene therapy, stem cell therapy and enzyme replacement therapy.

[0007] Gene therapy is the insertion of a functional copy of a gene that encodes a therapeutic protein (Cox, D. B. T., et al., 2015) which aims to increase the expression of a functional copy of the protein. While gene therapy provides the correct sequence of the gene, it does not address loss of protein function that is caused by or accompanied by defects in translational mechanisms or post-translational modifications. In addition, it can bear the risk of cancer development due to insertional mutagenesis (Persons, D. A. & Baum, C. 2011), mobilization, germline transmission, immunogenicity and limited transgene capacity (Schambach, A., et al., 2013; Al-Dosari et al., 2009). To target the CNS, gene therapy is most commonly mediated by the use of viral vectors, including those derived from herpes simplex virus type 1 (HSV-1), adenovirus, AAV, lentiviruses such as HIV-1, feline immunodeficiency virus or equine infectious anemia virus, and more recently SV40—AAV and lentivirus which are currently the most common of those. While some viral vectors are safer than the others, they do not address protein processing defects, and clinical efficiency remains limited.

[0008] Stem cell therapy relies on the protein synthesis mechanisms of implanted cells which can supplement the defective endogenous synthesis of the protein. Despite numerous efforts to implement this approach clinically, the efficiency of such treatments is reduced by rejection of implanted cells, and the low cost-efficiency of using patient-specific stem cells. In addition, the risks involved in stem cell treatments include complications associated with immunosuppression required to reduce rejection of grafted cells, and the development of cancer (Dimmeler, S., et al., 2014).

[0009] Protein- or Enzyme replacement therapy (ERT), in which the supplementary protein is synthesized externally and then delivered into the CNS, must overcome the impermeability of the BBB, and develop precise targeting in order to be clinically relevant. One such approach to protein delivery is injection directly into the brain or into adjacent organs from which the protein may diffuse at a low efficiency. Thus, in addition to the risk of such approaches, the ability to target specific regions within the CNS with the necessary amount is limited. Another problem of such approaches is the requirement of repeated dosing, which is often clinically impractical (Abbott, N. J. 2013).

[0010] ERT can be combined with an increase in BBB permeability to allow the therapeutic protein to diffuse into the CNS with greater efficiency (Malhotra, M. & Prakash, S. 2011). This is achieved through the shrinking of the cells that compose the BBB, or manipulation of the transport mechanisms through the BBB. However, this approach is not efficient due to opsonization, and bears the risk of unwanted substances diffusing into the CNS along with the supplemented protein of interest (Bradbury, M. W. B. 2012).

[0011] An alternative approach is the attachment of the therapeutic protein to elements that enter the CNS to utilize their inherent ability to cross the BBB. Agents that may mediate trafficking across the BBB include fusion proteins, dendrimers, solid lipid nanoparticles, liposomes and nanoparticles (Solaro, R., 2010). However, these approaches require further development and have not reached clinical trials.

[0012] Toxoplasma gondii is a single-cell intracellular protozoan parasite of the phylum apicomplexa. Its primary hosts are felines, and only in them it can go through the sexual stages of its life cycle. However, as secondary hosts it can infect many warm-blooded organisms, including humans. In humans as in rodents, after the host contracts the parasite (typically after ingestion of infectious tissue cysts or oocysts), the parasite differentiates into the fast-replicating tachyzoite stage. Toxoplasma gondii tachyzoites invade nucleated host cells by active penetration and establish a vacuole within which they replicate by endodyogeny. The tachyzoites travel through the intestinal epithelium, and by both “hitch-hiking” on immune cells and by mobilizing itself autonomously, they reach distal tissues, breach the blood brain barrier and spread in the brain [Harker 2015, Parasite Immunol. 37(3):141-9]. Thus, the tachyzoites enter the circulation and disseminate to secondary tissues. Replication is critical for dissemination and for reaching distal tissues during the acute stage of infection. Once inside the unique environment of the brain, T. gondii penetrates cells in the brain (primarily neurons, but also glial cells in lower proportions) and following immune pressure, it differentiates to the latent bradyzoite stage, and resides in cytoplasmic intercellular cysts. This characterizes a chronic infection (Cabral et al. 2016, PLoS Pathog. 12(2):e1005447). Tissue cysts harbouring bradyzoites persist for the lifetime of the host, while multiplying very slowly and having a quiescent metabolic program (Parasite Immunol. 2015, 37(3):141-9. “Toxoplasma gondii dissemination: a parasite's journey through the infected host”).

[0013] Although T. gondii infects an estimated one third of the world population, infection remains asymptomatic in healthy humans (Montoya, J. G. & Liesenfeld, O. 2004) and is primarily a risk only for individuals with irregularly compromised immune systems. Most importantly, during infection T. gondii secretes proteins into the host's cells, both during cell invasion and while intracellular. T. gondii has three types of electrodense secretory organelles: micronemes, rhoptries, and dense granules. Host cell invasion is mediated by the sequential secretion of the contents of all three organelles, which are exocytosed from the apical region when the parasite invades the host cell and when it resides inside it (Dlugonska, H. 2008). Micronemes are involved in the attachment and penetration of T. gondii, while rhoptries are required for creating a transient structure, moving junction and then the establishment of the PV. Rhoptry proteins are secreted upon initial contact with the host in a process termed “kiss and spit” (Boothroyd, J. C. et al., 2008). Dense granules secrete proteins throughout most of the parasite stages. The secretion process coincides with the formation of intravacuolar network and continues during the intracellular residence of T. gondii (Dlugonska, H. 2008; Carruthers, V. B. & Sibley, L. D. 1997).

[0014] Additional background art includes Koshy, A. A. et al. 2010; U.S. Pat. No. 8,673,289; US20120045477 A1; Lodoen M. B., et al. 2010. Cellular Microbiology, 12: 55-66.

### SUMMARY OF THE INVENTION

[0015] According to an aspect of some embodiments of the present invention there is provided a nucleic acid construct comprising a heterologous polynucleotide comprising a first nucleic acid sequence encoding a Toxoplasma secreted protein in frame fused upstream to a second nucleic acid sequence encoding a pharmaceutical polypeptide, wherein the heterologous polynucleotide is operably linked to a promoter for directing transcription of the heterologous polynucleotide in a Toxoplasma, wherein the promoter is selected from the group consisting of: a constitutive promoter, an inducible promoter, a latent period-specific promoter, and a Toxoplasma endogenous promoter with the proviso that the promoter is not a Toxofilin promoter.

[0016] According to an aspect of some embodiments of the present invention there is provided a nucleic acid construct system comprising at least two nucleic acid constructs, wherein a first nucleic acid construct of the at least two nucleic acid constructs is the nucleic acid construct of some embodiments of the invention, and a second nucleic construct of the at least two nucleic acid constructs comprises a polynucleotide encoding a selectable marker.

[0017] According to an aspect of some embodiments of the present invention there is provided a Toxoplasma transformed with the nucleic acid construct of some embodiments of the invention or with the nucleic acid construct system of some embodiments of the invention.

[0018] According to an aspect of some embodiments of the present invention there is provided a pharmaceutical composition comprising the Toxoplasma of some embodiments of the invention, and a pharmaceutically acceptable carrier.

[0019] According to an aspect of some embodiments of the present invention there is provided a method of administering a protein-of-interest into a central nervous system of a subject, the method comprising: administering to the subject the Toxoplasma of some embodiments of the invention or the pharmaceutical composition of some embodiments of the invention, thereby administering the protein-of-interest to the central nervous system of the subject.

[0020] According to an aspect of some embodiments of the present invention there is provided a method of treating a subject in need thereof, comprising administering to the subject the Toxoplasma of some embodiments of the invention or the pharmaceutical composition of some embodiments of the invention, wherein the subject is diagnosed with a pathology treatable by administration of the pharmaceutical polypeptide in a central nervous system of the subject, thereby treating the subject in need thereof.

[0021] According to an aspect of some embodiments of the present invention there is provided a method of treating a subject in need thereof, comprising administering to the subject a Toxoplasma comprising a nucleic acid construct which comprises a heterologous polynucleotide comprising a first nucleic acid sequence encoding a Toxoplasma secreted protein in frame fused upstream to a second nucleic acid sequence encoding a pharmaceutical polypeptide, wherein the heterologous polynucleotide is operably linked to a promoter for directing transcription of the heterologous polynucleotide in a Toxoplasma, wherein the subject is diagnosed with a pathology treatable by administration of the pharmaceutical polypeptide in a central nervous system of the subject, thereby treating the subject in need thereof.

[0022] According to some embodiments of the invention, the promoter is selected from the group consisting of: a constitutive promoter, an inducible promoter, a latent period-specific promoter, and a Toxoplasma endogenous promoter with the proviso that the promoter is not a Toxofilin promoter.

[0023] According to some embodiments of the invention, the endogenous promoter is not of a rhoptry protein.

[0024] According to some embodiments of the invention, the Toxoplasma being not attenuated.

[0025] According to some embodiments of the invention, the Toxoplasma secreted protein is secreted from a rhoptry of the Toxoplasma.

[0026] According to some embodiments of the invention, the Toxoplasma secreted protein which is secreted from the rhoptry comprises Toxofilin and/or ROP1.

[0027] According to some embodiments of the invention, the Toxoplasma secreted protein which is secreted from the rhoptry comprises the amino acid sequence selected from the group consisting of SEQ ID NOs:344-465.

[0028] According to some embodiments of the invention, the Toxoplasma secreted protein is a non-rhoptry protein.

[0029] According to some embodiments of the invention, the Toxoplasma secreted protein is selected from the group consisting of a microneme protein and a dense granule protein.

[0030] According to some embodiments of the invention, the Toxoplasma secreted protein is secreted from a dense granule of the Toxoplasma.

[0031] According to some embodiments of the invention, the Toxoplasma secreted protein which is secreted from the dense granule comprises a GRA16, and/or GRA24.

[0032] According to some embodiments of the invention, the Toxoplasma secreted protein is secreted from a microneme of the Toxoplasma.

[0033] According to some embodiments of the invention, the protein secreted from the microneme comprises the amino acid sequence selected from the group consisting of SEQ ID NOs:280-322.

[0034] According to some embodiments of the invention, the protein secreted from the dense granule comprises the amino acid sequence selected from the group consisting of SEQ ID NOs:234-279.

[0035] According to some embodiments of the invention, the Toxoplasma secreted protein comprises Toxoplasma gondii macrophage migration inhibitory factor (TgMIF).

[0036] According to some embodiments of the invention, the heterologous polynucleotide further comprises a Toxoplasma untranslated region (UTR) nucleic acid sequence upstream and/or downstream of the Toxoplasma secreted protein open reading frame.

[0037] According to some embodiments of the invention, the Toxoplasma 5′-untranslated region (5′-UTR) is placed upstream of the Toxoplasma secreted protein open reading frame.

[0038] According to some embodiments of the invention, the Toxoplasma 3′-untranslated region (3′-UTR) is placed downstream of the Toxoplasma secreted protein open reading frame.

[0039] According to some embodiments of the invention, the Toxoplasma 3′ untranslated region (3′-UTR) nucleic acid sequence is the GRA2 3′-UTR, GRA16 3′-UTR, GRA24 3′-UTR, SAG1 3′-UTR, or the DHFR 3′-UTR.

[0040] According to some embodiments of the invention, the Toxoplasma 5′ untranslated region (5′-UTR) nucleic acid sequence is the GRA2 5′-UTR, GRA16 5′-UTR, GRA24 5′-UTR, SAG1 5′-UTR, or the DHFR 5′-UTR.

[0041] According to some embodiments of the invention, the Toxoplasma endogenous promoter is the GRA2 promoter, GRA16 promoter, GRA24 promoter, SAG1 promoter, or the DHFR promoter.

[0042] According to some embodiments of the invention, the Toxoplasma untranslated region (UTR) nucleic acid sequence is the Toxofilin 3′-UTR.

[0043] According to some embodiments of the invention, the nucleic acid construct further comprises a third nucleic acid sequence encoding an inducible self-destruction element.

[0044] According to some embodiments of the invention, the third nucleic acid sequence encoding the inducible self-destruction element is comprised in the same nucleic acid construct which comprises the heterologous polynucleotide comprising the first nucleic acid sequence encoding the Toxoplasma secreted protein in frame fused upstream to the second nucleic acid sequence encoding the pharmaceutical polypeptide.

[0045] According to some embodiments of the invention, the third nucleic acid sequence encoding the inducible self-destruction element is comprised in a separate nucleic acid construct with respect to the nucleic acid construct which comprises the heterologous polynucleotide comprising the first nucleic acid sequence encoding the Toxoplasma secreted protein in frame fused upstream to the second nucleic acid sequence encoding the pharmaceutical polypeptide.

[0046] According to some embodiments of the invention, the nucleic acid construct does not comprise a Cre-recombinase coding sequence.

[0047] According to some embodiments of the invention, the nucleic acid construct does not comprise a beta (β)-lactamase (BLA) coding sequence.

[0048] According to some embodiments of the invention, the nucleic acid construct is suitable for integration into a genome of Toxoplasma.

[0049] According to some embodiments of the invention, the inducible self-destruction element is active in response to a drug.

[0050] According to some embodiments of the invention, the drug comprises an antibiotic.

[0051] According to some embodiments of the invention, the nucleic acid construct further comprises at least one in frame cleavage site which allows detachment of the pharmaceutical polypeptide from the Toxoplasma secreted protein.

[0052] According to some embodiments of the invention, the Toxoplasma is devoid of elements which facilitate propagation of the Toxoplasma in a host cell.

[0053] According to some embodiments of the invention, the Toxoplasma is devoid of virulence genes which are not necessary for delivery of the protein-of-interest into a CNS of a subject.

[0054] According to some embodiments of the invention, the heterologous polynucleotide further comprises a nucleic acid sequence encoding a selectable marker.

[0055] According to some embodiments of the invention, the selectable marker comprises chloramphenicol acetyltransferase (CAT), DHFR-TS, BLE, HXGPRT, UPRT, TK, CD, a fluorescent protein (such as GFP, YFP, RFP, mCherry or other) or an epitope tag (such as HA, Myc, Ty-1, FLAG or other).

[0056] According to some embodiments of the invention, the pharmaceutical composition is for treating a subject diagnosed with a pathology characterized by a deficient endogenous protein in a central nervous system of a subject.

[0057] According to some embodiments of the invention, the pharmaceutical composition is for treating a subject diagnosed with a pathology which is treatable by administration of the pharmaceutical polypeptide in a central nervous system of a subject.

[0058] According to some embodiments of the invention, the pharmaceutical composition further comprises an immunosuppression agent.

[0059] According to some embodiments of the invention, the method further comprises administering to the subject an immunosuppression drug prior to administration of the Toxoplasma and/or subsequent to administration of the Toxoplasma and/or concomitantly with administration of the Toxoplasma to the subject.

[0060] According to some embodiments of the invention, the method further comprises administering to the subject an immunosuppression drug prior to administration of the Toxoplasma to the subject.

[0061] According to some embodiments of the invention, the method further comprises administering to the subject an immunosuppression drug subsequent to administration of the Toxoplasma to the subject.

[0062] According to some embodiments of the invention, the method further comprises administering to the subject an immunosuppression drug concomitantly with administration of the Toxoplasma to the subject.

[0063] According to some embodiments of the invention, the pharmaceutical polypeptide comprises a wild type amino acid sequence corresponding to the endogenous protein capable of treating the pathology.

[0064] According to some embodiments of the invention, the pharmaceutical polypeptide comprises an antibody capable of treating the pathology.

[0065] According to some embodiments of the invention, the pharmaceutical polypeptide comprises an antigen capable of treating the pathology.

[0066] According to some embodiments of the invention, the pharmaceutical polypeptide comprises a toxin capable of treating the pathology.

[0067] According to some embodiments of the invention, the pharmaceutical polypeptide comprises an enzyme, a structural polypeptide, a motility polypeptide, a regulatory polypeptide, a storage polypeptide, a signaling/ligand polypeptide, a receptor polypeptide, a sensory polypeptide, an antibody, a protein channel and/or a transport polypeptide.

[0068] According to some embodiments of the invention, administering is performed by peripheral administration.

[0069] According to some embodiments of the invention, the peripheral administration comprises intravenous administration.

[0070] According to some embodiments of the invention, the peripheral administration comprises oral administration.

[0071] According to some embodiments of the invention, administering is performed by direct administration to the central nervous system.

[0072] According to some embodiments of the invention, the deficient endogenous protein comprises a deletion, insertion, and/or substitution of at least one amino acid of the endogenous protein as compared to a wild type amino acid sequence of the endogenous protein.

[0073] According to some embodiments of the invention, the deficient endogenous protein comprises a reduced level of the endogenous protein as compared to a level of the endogenous protein in a healthy subject devoid of the pathology.

[0074] According to some embodiments of the invention, the deficient endogenous protein is absence of the endogenous protein in the subject diagnosed with the pathology.

[0075] According to some embodiments of the invention, the pharmaceutical polypeptide is Galactocerebrosidase (GALC).

[0076] According to some embodiments of the invention, the pharmaceutical polypeptide is Galactocerebrosidase (GALC) isoform 1, isoform 2, isoform 3, isoform 4 or isoform 5.

[0077] According to some embodiments of the invention, the pharmaceutical polypeptide is Methyl-CpG Binding Protein 2 (MECP2) isoform 1 or MECP2 isoform 2.

[0078] According to some embodiments of the invention, the pharmaceutical polypeptide is Glial Cell Derived Neurotrophic Factor (GDNF).

[0079] According to some embodiments of the invention, the pharmaceutical polypeptide is Glial Cell Derived Neurotrophic Factor (GDNF) isoform 1, isoform 2, isoform 3, isoform 4 or isoform 5.

[0080] According to some embodiments of the invention, the pharmaceutical polypeptide is Aspartoacylase (ASPA).

[0081] According to some embodiments of the invention, the pharmaceutical polypeptide is Survival Motor Neuron Protein (SMN1).

[0082] According to some embodiments of the invention, the pharmaceutical polypeptide is Survival Motor Neuron Protein isoform SMN, isoform SMN-delta5, isoform SMN-delta7, or isoform SMN-delta57.

[0083] According to some embodiments of the invention, the pharmaceutical polypeptide is Parkin (PARK2).

[0084] According to some embodiments of the invention, the pharmaceutical polypeptide is Parkin (PARK2) isoform 1, isoform 2, isoform 3, isoform 4, isoform 5, isoform 6, isoform 7, or isoform 8.

[0085] According to some embodiments of the invention, the pharmaceutical polypeptide is Transcription Factor EB (TFEB).

[0086] According to some embodiments of the invention, the pharmaceutical polypeptide is Transcription Factor EB (TFEB) isoform 1 or isoform 2.

[0087] According to some embodiments of the invention, the pharmaceutical polypeptide is a TALEN (TALE nuclease).

[0088] According to some embodiments of the invention, the pharmaceutical polypeptide is a TALE TF (TALE transcription factor).

[0089] According to some embodiments of the invention, the subject is diagnosed with Krabbe disease.

[0090] According to some embodiments of the invention, the subject is diagnosed with Rett syndrome.

[0091] According to some embodiments of the invention, the subject is diagnosed with Canavan disease.

[0092] According to some embodiments of the invention, the subject is diagnosed with Spinal Muscular Atrophy.

[0093] According to some embodiments of the invention, the subject is diagnosed with Parkinson's disease.

[0094] According to some embodiments of the invention, the subject is diagnosed with hypoxic/ischemic or neuroinflammatory CNS disorder.

[0095] According to some embodiments of the invention, the subject is diagnosed with Alzheimer's disease.

[0096] According to some embodiments of the invention, the subject is diagnosed with Amyotrophic Lateral Sclerosis.

[0097] According to some embodiments of the invention, the subject is diagnosed with Huntington's disease.

[0098] According to some embodiments of the invention, the subject is diagnosed with a lysosomal storage disease.

[0099] According to some embodiments of the invention, the subject is diagnosed with MECP2-duplication syndrome.

[0100] According to some embodiments of the invention, the method further comprising administering to the subject a drug capable of inducing the self-destruction element.

[0101] According to some embodiments of the invention, the method further comprising administering to the subject a molecule necessary for sustaining the Toxoplasma inside the host cell and/or body.

[0102] According to some embodiments of the invention, the molecule necessary for sustaining the Toxoplasma is an antibiotic.

[0103] According to some embodiments of the invention, the molecule necessary for sustaining the Toxoplasma is a small-molecule.

[0104] According to some embodiments of the invention, the molecule necessary for sustaining the Toxoplasma is a metabolite.

[0105] Unless otherwise defined, all technical and/or scientific terms used herein have the same meaning as commonly understood by one of ordinary skill in the art to which the invention pertains. Although methods and materials similar or equivalent to those described herein can be used in the practice or testing of embodiments of the invention, exemplary methods and/or materials are described below. In case of conflict, the patent specification, including definitions, will control. In addition, the materials, methods, and examples are illustrative only and are not intended to be necessarily limiting.

### BRIEF DESCRIPTION OF THE SEVERAL VIEWS OF THE DRAWINGS

[0106] The patent or application file contains at least one drawing executed in color. Copies of this patent or patent application publication with color drawing(s) will be provided by the Office upon request and payment of the necessary fee.

[0107] Some embodiments of the invention are herein described, by way of example only, with reference to the accompanying drawings. With specific reference now to the drawings in detail, it is stressed that the particulars shown are by way of example and for purposes of illustrative discussion of embodiments of the invention. In this regard, the description taken with the drawings makes apparent to those skilled in the art how embodiments of the invention may be practiced.

[0108] In the drawings:

[0109] FIG. 1 is a schematic representation of the clinical concept of some embodiments of the invention. (1) The pharmaceutical polypeptide coding sequence of choice is fused to a Toxoplasma gondii secretable polypeptide coding sequence; (2) The nucleic acid construct is introduced into the Toxoplasma; (3) The fusion protein is expressed inside the parasite and localizes to the parasite's secretory organelle (here shown as an example, the rhoptries); (4) The parasite enters the CNS of the subject and reaches the site of pathology; (5) The protein is secreted into the subject's cells and rescues the pathological phenotype.

[0110] FIG. 2 depicts a schematic map of the construct used for the generation of therapeutic transgenic T. gondii lines based on the pGRA backbone. The nucleic acid construct comprises an open reading frame (ORF) consisting of a fusion of a therapeutic polypeptide coding sequence in frame with the T. gondii Toxofilin coding sequence and an “HA” tag. Upstream of the ORF is the endogenous 5′ UTR (untranslated region) of the Toxofilin gene (Toxofilin 5′-UTR which acts as a promoter), and downstream of the ORF is the 3′ UTR of the abundant dense granule protein GRA2 (GRA2 3′-UTR). The construct also contains a selectable marker cassette consisting of the HXGPRT gene, nested between the endogenous 5′ UTR and the 3′ UTR of DHFR-TS. Also included in the construct is a bacterial expression cassette including selectable antibiotic resistance.

[0111] FIG. 3 depicts a schematic map of the construct used for the generation of therapeutic transgenic T. gondii lines based on the pGRA backbone. The nucleic acid construct comprises an ORF consisting of a fusion of a therapeutic polypeptide coding sequence in frame with the T. gondii GRA16 coding sequence and an HA tag. Upstream of the ORF is the endogenous 5′ UTR of the GRA16 gene (GRA16 5′-UTR which acts as a promoter), and downstream of the ORF is the 3′ UTR of the abundant dense granule protein GRA2 (GRA2 3′-UTR). The construct also contains a selectable marker cassette consisted of the HXGPRT gene, nested between the endogenous 5′-UTR and the 3′-UTR of DHFR-TS. Also included in the construct is a bacterial expression cassette including selectable antibiotic resistance.

[0112] FIGS. 4A-4I depict novel parasite strains within mammalian cells (HFF), wherein the parasite strains expressing the Toxofilin-fused therapeutic proteins Aspartoacylase (ASPA), Survival motor neuron protein (SMN1), Methyl-CpG Binding Protein 2 (MECP2) and Galactocerebrosidase-TAT A43 (also referred to as “mutated GALC-TAT” in the GENERAL MATERIALS AND EXPERIMENTAL METHODS section), presenting specific localization to the parasites' secretory rhoptry organelles. FIG. 4A—Schematic structure of an intracellular T. gondii, highlighting the rhoptries. Red: inner membrane complex (IMC), Blue: DNA (host cell nucleus and T. gondii nucleus), Green: rhoptry proteins; FIGS. 4B-4I—Fluorescence microscopy analysis of parasites grown on HFF cells, expressing endogenously HA-tagged Toxofilin-ASPA (FIGS. 4B and 4C), HA-tagged Toxofilin-SMN1 (FIGS. 4D and 4E), HA-tagged Toxofilin-MECP2 (FIGS. 4F and 4G) and HA-tagged Toxofilin-GALC-TAT mutated (FIGS. 4H and 4I) using anti-HA antibody (green in all panels), co-stained with the inner membrane complex IMC1 using anti-IMC1 antibody (red) and DAPI (blue), or shown on top of a polarized light image of the cells (grayscale). Parasites are shown in a mixed population, whereas only parasites showing green staining express the transgenic proteins. Scale bar=5 μM in all of the images shown in FIGS. 4B-4I.

[0113] FIGS. 5A-5I depict novel parasite strains within mammalian cells (HFF), wherein the parasite strains expressing the GRA16-fused therapeutic proteins Aspartoacylase (ASPA), Survival motor neuron protein (SMN1) and Methyl-CpG Binding Protein 2 (MECP2), presenting specific localization to the parasitophorous vacuole (PV) space, as well as to the host cell nucleus. FIG. 5A—Schematic representation of intracellular T. gondii parasites in a parasitophorous vacuole inside a host cell (fibroblast), highlighting the distribution of secreted dense granule effector proteins. Red: inner membrane complex (IMC), blue: DNA (host cell nucleus and T. gondii nuclei), yellow: dense granule secreted effector proteins, orange: parasitophorous vacuole. FIGS. 5B-5I—Fluorescence microscopy analysis of parasites grown on HFF cells, expressing endogenously HA-tagged GRA16-ASPA (FIGS. 5B and 5C), HA-tagged GRA16-SMN1 (FIGS. 5D and 5E) and HA-tagged GRA16-MECP2 (FIGS. 5B-5G in 100× magnification and FIGS. 5H-5I in 40× magnification) using anti-HA antibody (green in all panels), co-stained with the inner membrane complex IMC1 using anti-IMC1 antibody (red) and DAPI (blue), or shown on top of a polarized light image of the cells. Parasites are shown in a mixed population, whereas only parasites showing green staining express the transgenic proteins. Scale bar=5 μM (for FIGS. 5B-5G). Scale bar=20 μM (for FIGS. 5H-5I).

[0114] FIGS. 6A-6B are schematic illustrations of a TALE Nuclease (FIG. 6A) and TALE transcription factor (FIG. 6B) which are designed, as example, to the “TACGTACG” (SEQ ID NO: 4505) target sequence. The TALE repeats are presented according to the order of the nucleotides in the target sequence. It is noted that because of the nature of TALEs, the first nucleotide always has to be T (so it is integrated in the TAL N-Terminus and is not annotated), and the last nucleotide (in this case G) is represented in a half-monomer (so it is annotated as “Half repeat”). In order to be expressed and secreted by the Toxoplasma of some embodiments of the invention, the open reading frame (ORF) of these constructs is inserted to the nucleic acid construct of some embodiments of the invention. For the TALE_Nuc (TALE nuclease) the ORF is from the NLS until after the FokI (e.g., nucleotides 2113-4104 of the polynucleotide set forth by SEQ ID NO: 4506). For the TALE-TF (TALE Transcription Factor) the ORF is from the TALE N terminus (N-term) after the EGFP (e.g., nucleotides 2120-5005 of the polynucleotide set forth by SEQ ID NO: 4507). “TALE-TF”=TALE transcription factor; “TALEN”=TALE nuclease. “NI”, “NG”, “NN” and “HD”=monomers as described in Example 5 hereinbelow.

[0115] FIG. 7 depicts a schematic map of the constructs used for the generation of the therapeutic transgenic T. gondii lines. The nucleic acid construct comprises an open reading frame (ORF) consisting of a fusion of a therapeutic polypeptide coding sequence in frame with the T. gondii Toxofilin coding sequence and an “HA” tag. Upstream of the ORF is the endogenous 5′ UTR (untranslated region) of the Toxofilin gene (the “Toxofilin 5′-UTR”), and downstream of the ORF is the 3′ UTR of the abundant dense granule protein GRA2 (“GRA2 3′-UTR”). The construct also contains a selectable marker cassette consisting of the HXGPRT gene, DHFR-TS gene or mCherry gene, nested between the endogenous 5′ UTR and the 3′ UTR of DHFR-TS. Also included in the construct is a bacterial expression cassette including selectable antibiotic resistance, used for molecular cloning.

[0116] FIG. 8 depicts a schematic map of the construct used for the generation of the therapeutic transgenic T. gondii lines. The nucleic acid construct comprises an ORF consisting of a fusion of a therapeutic polypeptide coding sequence in frame with the T. gondii GRA16 coding sequence and an HA tag. Upstream of the ORF is the endogenous 5′ UTR of the GRA16 gene (the “GRA16 5′-UTR”), and downstream of the ORF is the 3′ UTR of the abundant dense granule protein GRA2 (“GRA2 3′-UTR”). The construct also contains a selectable marker cassette consisted of the HXGPRT gene, DHFR-TS gene or mCherry gene, nested between the endogenous 5′ UTR and the 3′ UTR of DHFR-TS. Also included in the construct is a bacterial expression cassette including selectable antibiotic resistance, used for molecular cloning.

[0117] FIGS. 9A-9N depict images of transgenic parasites within mammalian cells (HFF), wherein the parasite strains expressing 12 novel Toxofilin-fused therapeutic proteins. FIG. 9A—Schematic structure of an intracellular T. gondii, highlighting the rhoptries. Magenta: inner membrane complex (IMC), cyan: DNA (host cell nucleus and T. gondii nucleus), yellow: rhoptry proteins; FIG. 9B—Representative fluorescence microscopy image of T. gondii grown in HFF cells, immunostained for the rhoptry marker ROP2/4 (yellow). Left: co-stained with DAPI (cyan), right: overlaid on a polarized-light image (grayscale). FIGS. 9C-9N—images of transgenic parasites expressing the HA-tagged Toxofilin-fused therapeutic proteins: FIG. 9C—Aspartoacylase (ASPA), FIG. 9D—Aspartoacylase codon-optimized (ASPAopt), FIG. 9E—Galactocerebrosidase (GALC), FIG. 9F—Galactocerebrosidase codon-optimized (GALCopt), FIG. 9G—Galactocerebrosidase-TAT (GALC-TAT), FIG. 9H—Galactocerebrosidase-TAT A43 (GALC-TAT A43—also referred to as “mutated GALC-TAT” in the GENERAL MATERIALS AND EXPERIMENTAL METHODS section), FIG. 9I—Glial Cell Derived Neurotrophic Factor (GDNF), FIG. 9J—Methyl-CpG Binding Protein 2 (MECP2), FIG. 9K—Methyl-CpG Binding Protein 2 codon-optimized (MECP2opt), FIG. 9L—Parkin (PARK2), FIG. 9M—Survival motor neuron protein (SMN1) and FIG. 9N—Transcription Factor EB codon-optimized (TFEBopt). Example images of the parasites expressing Toxofilin-ASPAopt, Toxofilin-GALC-TAT A43, Toxofilin-GDNF, Toxofilin-MeCP2opt, Toxofilin-PARK2, Toxofilin-SMN1 and Toxofilin-TFEB show localization to the parasites' secretory rhoptry organelles. Toxofilin fusion protein are immunostained using anti-HA antibody (yellow). Left: co-stained with DAPI (cyan) and the parasite marker anti-IMC-1 (magenta), right: overlaid on a polarized-light image (grayscale). Parasites are shown in a mixed population, whereas only parasites showing yellow staining express the transgenic proteins. Scale bars=5 μM.

[0118] FIGS. 10A-10J depict images of transgenic parasites within mammalian cells (HFF), wherein the parasite strains expressing 8 novel GRA16-fused therapeutic proteins. FIG. 10A—Schematic representation of intracellular T. gondii parasites in a parasitophorous vacuole inside a host cell, highlighting the distribution of secreted dense granule effector proteins. Magenta: inner membrane complex (IMC), cyan: DNA (host cell nucleus and T. gondii nuclei), yellow: dense granule secreted effector proteins, orange: parasitophorous vacuole; FIG. 10B—Representative fluorescence microscopy image of T. gondii grown in HFF cells, expressing an HA-tagged GRA16 protein and immunostained with anti-HA (yellow). Left: co-stained with DAPI (cyan), right: overlaid on a polarized-light image (grayscale). FIGS. 10C-10J—Example images of transgenic parasites expressing the HA-tagged GRA16-fused therapeutic proteins: FIG. 10C-Aspartoacylase (ASPA), FIG. 10D—Survival motor neuron protein (SMN1), FIG. 10E—Galactocerebrosidase (GALC), FIG. 10F—Galactocerebrosidase-TAT (GALC-TAT), FIG. 10G—Aspartoacylase codon-optimized (ASPAopt). FIG. 10H-Galactocerebrosidase codon-optimized (GALCopt), FIG. 10I—Methyl-CpG Binding Protein 2 codon-optimized (MECP2opt) and FIG. 10J—Transcription Factor EB codon-optimized (TFEBopt). GRA16-ASPA, GRA16-SMN1, GRA16-ASPAopt, GRA16-MECP2opt and GRA16-TFEBopt show localization to the parasitophorous vacuole. GRA16-MECP2opt and GRA16-TFEBopt show also localization to the host cell nucleus. GRA16 fusion protein are immunostained using anti-HA antibody (yellow). Left: co-stained with DAPI (cyan) and the parasite marker anti-IMC-1 (magenta), right: overlaid on a polarized-light image (grayscale). Parasites are shown in a mixed population, whereas only parasites showing yellow staining express the transgenic proteins. Scale bars=5 μM.

[0119] FIGS. 11A-11C—Dynamics of protein delivery to the nuclei of HFF cells by tachyzoites of the strains RH GRA16-HAstop, GRA16-MECP2opt and GRA16-TFEBopt, over time and multiplicity of infection (MOI). Infected cells and nuclei delivery were counted by automated image analysis using GE IN Cell Investigator software (GE healthcare, Chicago, IL, USA). Graphs represent aggregated results from the 3 strains together.

[0120] FIGS. 12A-12C—Representative images of in vitro-differentiated LUHMES human neuronal cells 16-22 hours after infection with tachyzoites of the T. gondii strains RH GRA16-HAstop (FIG. 12A), GRA16-MECP2opt (FIG. 12B) and GRA16-TFEBopt (FIG. 12C). GRA16 fusion protein are immunostained using an anti-HA antibody (yellow) and co-stained with DAPI (cyan) and the marker for mature neurons anti-NeuN (magenta). Insets on the left of each figure show the infected cells visualized with anti-HA only (top, yellow), anti-HA and DAPI (middle, yellow and cyan) and anti-HA and NeuN (bottom, yellow and magenta). All strains show clear secretion and targeting of the fusion proteins to the nuclei of the human neurons.

[0121] FIGS. 13A-13D—Representative images of immunohistochemically stained neuron-enriched primary cultures from the cortices and hippocampi of P1 mice pups, 12 hours after infection with tachyzoites of the transgenic line RH GRA16-MECP2opt. The GRA16-MeCP2 fusion protein is immunostained using an anti-HA antibody (yellow). FIG. 13A—GRA16-MeCP2 alone (yellow). FIG. 13B—DAPI alone (cyan). FIG. 13C—merge of GRA16-MeCP2 and DAPI staining. FIG. 13D—merge of GRA16-MeCP2 (yellow), DAPI (cyan) and NeuN (magenta) overlaid on a polarized-light image (grayscale). The delivered GRA16-MeCP2opt demonstrates a characteristic pattern of co-localization with areas of condensed, heterochromatic DNA in the nuclei of the neuron, suggesting effective binding of the delivered MeCP2 to heterochromatin.

[0122] FIG. 14 is a Western blot of nuclear extracts of R306C MeCP2-mutant human LUHMES neurons infected with an MOI=1 of the RH GRA16-MECP2opt transgenic T. gondii strain, immunoprecipitated and blotted with a MeCP2-specific antibody. The blot shows two bands corresponding to the endogenous mutated MeCP2 and the T. gondii-delivered MeCP2. The T. gondii-delivered MeCP2 has higher molecular weight due to the fusion to GRA16.

[0123] FIGS. 15A-15C show example images of in vitro differentiated bradyzoites of the transgenic T. gondii strain Pru GRA16-MECP2opt in HFF cells. The GRA16-MeCP2 fusion protein is immunostained using an anti-HA antibody (red). FIG. 15A—GRA16-MeCP2 alone. FIG. 15B—co-stained with the bradyzoite cyst-wall marker Dolichos Biflorus Agglutinin (DBA) (green) and DAPI (blue) showing in green the parasite cyst and blue the nuclei of the host fibroblast cells (HFF) with the HA-stained (red) GRA16-MeCP2 fusion protein within the nucleus of the host fibroblast cell containing the cyst. FIG. 15C—co-stained with DBA and overlaid on a polarized-light image (grayscale). The presented cyst shows continuous expression of GRA16-MeCP2, secretion and targeting of the fusion protein to the nucleus of the host cell at the bradyzoites stage. White arrowheads point on the nucleus of the cell containing the bradyzoite cyst, which contains the delivered protein GRA16-MeCP2.

### DESCRIPTION OF SPECIFIC EMBODIMENTS OF THE INVENTION

[0124] The present invention, in some embodiments thereof, relates to a nucleic acid construct for secretion of Toxoplasma secreted protein fused to a pharmaceutical polypeptide, and Toxoplasma comprising same, and, more particularly, but not exclusively, to a pharmaceutical compositions and methods of using same for treating a subject.

[0125] Before explaining at least one embodiment of the invention in detail, it is to be understood that the invention is not necessarily limited in its application to the details set forth in the following description or exemplified by the Examples. The invention is capable of other embodiments or of being practiced or carried out in various ways.

[0126] The present inventors have uncovered that Toxoplasma parasites transformed with genetic constructs encoding for a heterologous polypeptide synthesize and deliver the heterologous polypeptide to mammalian cells (FIGS. 4B-4I, 5B-5I, 9B-9N, 10B-10J, 11A-11C, 12A-12C, 13A-13D, 14 and 15A-15C andthe Examples section which follows). Inside the mammalian cells, the heterologous polypeptide shuttles to its region of activity in the cell where it is able to augment cellular processes related to the known functions of the endogenous pharmaceutical protein. For example, the present inventors generated Type I and Type II Toxoplasma strains which express and deliver the mammalian proteins MeCP2 and TFEB into mice and human cells, translationally fused to the Toxoplasma secreted protein GRA16, and secreting the fused therapeutic protein into the desired cellular localization (nuclei) within mammalian cells treated ex-vivo with the Toxoplasma (FIGS. 13A-13D), thus proving the feasibility of the constructs, Toxoplasma and methods for specific delivery of therapeutic polypeptides into a subject and treating the subject.

[0127] According to an aspect to some embodiments of the invention, there is provided a nucleic acid construct comprising a heterologous polynucleotide comprising a first nucleic acid sequence encoding a Toxoplasma secreted protein in frame fused upstream to a second nucleic acid sequence encoding a pharmaceutical polypeptide, wherein the heterologous polynucleotide is operably linked to a promoter for directing transcription of the heterologous polynucleotide in a Toxoplasma, wherein the promoter is selected from the group consisting of: a constitutive promoter, an inducible promoter, a latent period-specific promoter, and a Toxoplasma endogenous promoter with the proviso that the promoter is not a Toxofilin promoter.

[0128] According to some embodiments of the invention, the nucleic acid construct is suitable for expression in a Toxoplasma.

[0129] According to some embodiments of the invention, the nucleic acid construct does not comprise a Cre-recombinase coding sequence.

[0130] According to some embodiments of the invention, the nucleic acid construct does not comprise a beta (β)-lactamase (BLA) coding sequence.

[0131] According to some embodiments of the invention, the nucleic acid construct is suitable for integration into a genome of Toxoplasma.

[0132] According to some embodiments of the invention, the Toxoplasma is devoid of elements which facilitate propagation of the Toxoplasma in a host cell (e.g., elements important for evading the immune system of the host, elements essential for the production or utilization of certain metabolites, elements important for counteracting certain toxins or antibiotics), yet including an endogenous functional CPSII.

[0133] According to some embodiments of the invention, the Toxoplasma is devoid of virulence genes which are not necessary for delivery of the protein-of-interest into a CNS of a subject.

[0134] The nucleic acid construct includes a promoter sequence for directing transcription of the polynucleotide sequence in the Toxoplasma cell in a constitutive, transient, regulated or inducible manner.

[0135] As mentioned, the heterologous polynucleotide is operably linked to a promoter for directing transcription of the heterologous polynucleotide in a Toxoplasma.

[0136] A coding nucleic acid sequence is “operably linked” to a regulatory sequence (e.g., promoter) if the regulatory sequence is capable of exerting a regulatory effect on the coding sequence linked thereto.

[0137] As used herein, the term “promoter” refers to a region of DNA which lies upstream of the transcriptional initiation site of a gene to which RNA polymerase binds to initiate transcription of RNA. The promoter controls the timing and the intensity of expression of the gene, e.g., at which stage or condition in the lifetime of a parasite and/or of a host cell the gene is expressed.

[0138] According to some embodiments of the invention, the promoter is heterologous to the Toxoplasma used for expression of the nucleic acid construct.

[0139] According to some embodiments of the invention, the promoter is a constitutive promoter.

[0140] According to some embodiments of the invention, the promoter is an inducible promoter.

[0141] According to some embodiments of the invention, the promoter is a latent period-specific promoter.

[0142] According to some embodiments of the invention, the promoter is a Toxoplasma endogenous promoter with the proviso that the promoter is not a Toxofilin promoter.

[0143] According to some embodiments of the invention the promoter is not a Toxofillin endogenous promoter. It is noted that the predicted promoter of Toxofillin (predicted promoter of gene ID=TGME49_214080; SEQ ID NO:3689) contains the Toxofilin promoter used in some of the experiments of the Examples section (SEQ ID NO: 4482) and additional nucleotides upstream.

[0144] According to some embodiments the promoter does not comprise the nucleic acid sequence set forth by SEQ ID NO: 3689 and/or SEQ ID NO: 4482.

[0145] According to some embodiments of the invention, the endogenous promoter is not of a rhoptry protein.

[0146] According to some embodiments of the invention, the Toxoplasma endogenous promoter is the GRA2 promoter, GRA16 promoter, GRA24 promoter, SAG1 promoter, or the DHFR promoter.

[0147] According to some embodiments of the invention, the Toxoplasma endogenous promoter is the GRA2 promoter.

[0148] According to some embodiments of the invention, the Toxoplasma endogenous promoter is the GRA16 promoter.

[0149] According to some embodiments of the invention, the Toxoplasma endogenous promoter is the GRA24 promoter.

[0150] According to some embodiments of the invention, the Toxoplasma endogenous promoter is the SAG1 promoter.

[0151] According to some embodiments of the invention, the Toxoplasma endogenous promoter is the DHFR promoter.

[0152] Table 1 herein below lists suitable endogenous promoters which can be cloned into the nucleic acid construct of some embodiments of the invention in order to drive expression of the heterologous polynucleotide in the Toxoplasma.

TABLE 1
Suitable endogenous promoters

| | | | | Endogenous promoter | |
|---|---|---|---|---|---|
| | starting | end | | of gene name (ID), | SEQ |
| | position on | position on | | and length of | ID |
| Chromosome | chromosome | chromosome | strand | promoter sequence | NO: |
| TGME49_chrXII | 6018714 | 6021975 | − | ID = TGME49_278580; | 467 |
| | | | | length = 3261 | |
| TGME49_chrXI | 4645816 | 4647664 | + | ID = TGME49_315320; | 468 |
| | | | | length = 1848 | |
| TGME49_chrXI | 5975725 | 5979863 | − | ID = TGME49_216670; | 469 |
| | | | | length = 4138 | |
| TGME49_chrIa | 602877 | 607895 | + | ID = TGME49_293850; | 470 |
| | | | | length = 5018 | |
| TGME49_chrVIIa | 1551626 | 1554994 | + | ID = TGME49_205190; | 471 |
| | | | | length = 3368 | |
| TGME49_chrVIIb | 561320 | 563366 | + | ID = TGME49_263420; | 472 |
| | | | | length = 2046 | |
| TGME49_chrXII | 2795162 | 2799102 | + | ID = TGME49_246485; | 473 |
| | | | | length = 3940 | |
| TGME49_chrIb | 904562 | 908487 | + | ID = TGME49_208850; | 474 |
| | | | | length = 3925 | |
| TGME49_chrVIII | 4449329 | 4451277 | − | ID = TGME49_271610; | 475 |
| | | | | length = 1948 | |
| TGME49_chrVIII | 3044788 | 3047633 | + | ID = TGME49_274060; | 476 |
| | | | | length = 2845 | |
| TGME49_chrVIIb | 3612195 | 3614194 | + | ID = TGME49_258060; | 477 |
| | | | | length = 1999 | |
| TGME49_chrXII | 6549613 | 6551657 | + | ID = TGME49_277730; | 478 |
| | | | | length = 2044 | |
| TGME49_chrVIII | 197364 | 199295 | − | ID = TGME49_229350; | 479 |
| | | | | length = 1931 | |
| TGME49_chrXI | 5143319 | 5145850 | + | ID = TGME49_316130; | 480 |
| | | | | length = 2531 | |
| TGME49_chrVIIa | 2471302 | 2472989 | + | ID = TGME49_203490; | 481 |
| | | | | length = 1687 | |
| TGME49_chrV | 1117761 | 1121481 | + | ID = TGME49_213530; | 482 |
| | | | | length = 3720 | |
| TGME49_chrXII | 5640983 | 5642416 | − | ID = TGME49_251880; | 483 |
| | | | | length = 1433 | |
| TGME49_chrIb | 1120926 | 1123894 | + | ID = TGME49_209210; | 484 |
| | | | | length = 2968 | |
| TGME49_chrVIII | 4996018 | 4997934 | − | ID = TGME49_270790; | 485 |
| | | | | length = 1916 | |
| TGME49_chrVIII | 4266477 | 4270885 | − | ID = TGME49_271960; | 486 |
| | | | | length = 4408 | |
| TGME49_chrX | 7250986 | 7254222 | + | ID = TGME49_275430; | 487 |
| | | | | length = 3236 | |
| TGME49_chrVIIb | 3933132 | 3934570 | + | ID = TGME49_257640; | 488 |
| | | | | length = 1438 | |
| TGME49_chrIb | 1207044 | 1211342 | − | ID = TGME49_209410; | 489 |
| | | | | length = 4298 | |
| TGME49_chrVIIb | 3849337 | 3853482 | + | ID = TGME49_257750; | 490 |
| | | | | length = 4145 | |
| TGME49_chrVIII | 706425 | 708192 | + | ID = TGME49_230230; | 491 |
| | | | | length = 1767 | |
| TGME49_chrII | 2108697 | 2112820 | + | ID = TGME49_297920; | 492 |
| | | | | length = 4123 | |
| TGME49_chrIX | 3678105 | 3679325 | − | ID = TGME49_290270; | 493 |
| | | | | length = 1220 | |
| TGME49_chrV | 2469549 | 2471470 | − | ID = TGME49_285272; | 494 |
| | | | | length = 1921 | |
| TGME49_chrVIIb | 2197522 | 2200500 | + | ID = TGME49_260500; | 495 |
| | | | | length = 2978 | |
| TGME49_chrXII | 4500766 | 4502482 | − | ID = TGME49_249370; | 496 |
| | | | | length = 1716 | |
| TGME49_chrVIIa | 2313521 | 2315991 | − | ID = TGME49_203705; | 497 |
| | | | | length = 2470 | |
| TGME49_chrVIIb | 4993618 | 4998625 | + | ID = TGME49_255215; | 498 |
| | | | | length = 5007 | |
| TGME49_chrII | 2100257 | 2103772 | + | ID = TGME49_297900; | 499 |
| | | | | length = 3515 | |
| TGME49_chrVIIa | 2799113 | 2803405 | − | ID = TGME49_203135; | 500 |
| | | | | length = 4292 | |
| TGME49_chrIX | 1389644 | 1391469 | − | ID = TGME49_265990; | 501 |
| | | | | length = 1825 | |
| TGME49_chrIX | 5182974 | 5185461 | − | ID = TGME49_305030; | 502 |
| | | | | length = 2487 | |
| TGME49_chrVIII | 50367 | 52586 | − | ID = TGME49_229140; | 503 |
| | | | | length = 2219 | |
| TGME49_chrX | 3072006 | 3074113 | − | ID = TGME49_224350; | 504 |
| | | | | length = 2107 | |
| TGME49_chrXII | 3203140 | 3205868 | − | ID = TGME49_247260; | 505 |
| | | | | length = 2728 | |
| TGME49_chrVI | 1316502 | 1318224 | + | ID = TGME49_240550; | 506 |
| | | | | length = 1722 | |
| TGME49_chrVIIb | 4903838 | 4908769 | + | ID = TGME49_255310; | 507 |
| | | | | length = 4931 | |
| TGME49_chrVIIa | 689060 | 693095 | + | ID = TGME49_304760; | 508 |
| | | | | length = 4035 | |
| TGME49_chrVIII | 1508960 | 1513678 | − | ID = TGME49_231625; | 509 |
| | | | | length = 4718 | |
| TGME49_chrXII | 1903216 | 1907934 | + | ID = TGME49_217555; | 510 |
| | | | | length = 4718 | |
| TGME49_chrXI | 6096576 | 6098700 | − | ID = TGME49_216530; | 511 |
| | | | | length = 2124 | |
| TGME49_chrXII | 4300753 | 4303035 | − | ID = TGME49_249010; | 512 |
| | | | | length = 2282 | |
| TGME49_chrVIII | 5298854 | 5300947 | + | ID = TGME49_270270; | 513 |
| | | | | length = 2093 | |
| TGME49_chrVIII | 2184023 | 2186702 | + | ID = TGME49_232600; | 514 |
| | | | | length = 2679 | |
| TGME49_chrIV | 1432984 | 1435042 | − | ID = TGME49_318300; | 515 |
| | | | | length = 2058 | |
| TGME49_chrIX | 5708243 | 5710982 | + | ID = TGME49_305990; | 516 |
| | | | | length = 2739 | |
| TGME49_chrX | 2689262 | 2692060 | + | ID = TGME49_224910; | 517 |
| | | | | length = 2798 | |
| TGME49_chrIX | 871380 | 874729 | − | ID = TGME49_266960; | 518 |
| | | | | length = 3349 | |
| TGME49_chrIX | 1580498 | 1583961 | + | ID = TGME49_265390; | 519 |
| | | | | length = 3463 | |
| TGME49_chrVI | 1107433 | 1112442 | + | ID = TGME49_240250; | 520 |
| | | | | length = 5009 | |
| TGME49_chrXI | 4618602 | 4621016 | − | ID = TGME49_315270; | 521 |
| | | | | length = 2414 | |
| TGME49_chrIX | 1238941 | 1239596 | − | ID = TGME49_266290; | 522 |
| | | | | length = 655 | |
| TGME49_chrIb | 65733 | 70002 | − | ID = TGME49_207440; | 523 |
| | | | | length = 4269 | |
| TGME49_chrVIIa | 1078389 | 1081603 | − | ID = TGME49_206300; | 524 |
| | | | | length = 3214 | |
| TGME49_chrVIII | 1628848 | 1630628 | + | ID = TGME49_231910; | 525 |
| | | | | length = 1780 | |
| TGME49_chrIa | 556012 | 557885 | + | ID = TGME49_293780; | 526 |
| | | | | length = 1873 | |
| TGME49_chrIa | 1286481 | 1288807 | + | ID = TGME49_294960; | 527 |
| | | | | length = 2326 | |
| TGME49_chrXII | 2098720 | 2101108 | − | ID = TGME49_217760; | 528 |
| | | | | length = 2388 | |
| TGME49_chrIX | 3356580 | 3358813 | − | ID = TGME49_289620; | 529 |
| | | | | length = 2233 | |
| TGME49_chrXII | 6432210 | 6433693 | − | ID = TGME49_277920; | 530 |
| | | | | length = 1483 | |
| TGME49_chrIX | 1440831 | 1443406 | + | ID = TGME49_265810; | 531 |
| | | | | length = 2575 | |
| TGME49_chrVIIb | 2505068 | 2506652 | − | ID = TGME49_260150; | 532 |
| | | | | length = 1584 | |
| TGME49_chrVIIa | 2513490 | 2515244 | + | ID = TGME49_203400; | 533 |
| | | | | length = 1754 | |
| TGME49_chrIX | 4338786 | 4341883 | − | ID = TGME49_291680; | 534 |
| | | | | length = 3097 | |
| TGME49_chrVIII | 1844203 | 1845704 | + | ID = TGME49_232085; | 535 |
| | | | | length = 1501 | |
| TGME49_chrXI | 4303293 | 4303677 | + | ID = TGME49_314800; | 536 |
| | | | | length = 384 | |
| TGME49_chrVIIa | 3949957 | 3952927 | − | ID = TGME49_201240; | 537 |
| | | | | length = 2970 | |
| TGME49_chrIa | 1061383 | 1062031 | − | ID = TGME49_294680; | 538 |
| | | | | length = 648 | |
| TGME49_chrXI | 5090593 | 5094613 | + | ID = TGME49_315950; | 539 |
| | | | | length = 4020 | |
| TGME49_chrVIIa | 2441166 | 2446197 | − | ID = TGME49_203540; | 540 |
| | | | | length = 5031 | |
| TGME49_chrIX | 5012648 | 5015438 | − | ID = TGME49_307605; | 541 |
| | | | | length = 2790 | |
| TGME49_chrVIIb | 3906304 | 3910432 | − | ID = TGME49_257690; | 542 |
| | | | | length = 4128 | |
| TGME49_chrXII | 3652730 | 3655440 | − | ID = TGME49_247980; | 543 |
| | | | | length = 2710 | |
| TGME49_chrVIII | 6732568 | 6737516 | + | ID = TGME49_267990; | 544 |
| | | | | length = 4948 | |
| TGME49_chrIX | 362887 | 364364 | − | ID = TGME49_267790; | 545 |
| | | | | length = 1477 | |
| TGME49_chrV | 2197440 | 2202168 | + | ID = TGME49_285810; | 546 |
| | | | | length = 4728 | |
| TGME49_chrX | 7360015 | 7363002 | − | ID = TGME49_207050; | 547 |
| | | | | length = 2987 | |
| TGME49_chrIb | 1073856 | 1076422 | + | ID = TGME49_209150; | 548 |
| | | | | length = 2566 | |
| TGME49_chrVIIb | 2747094 | 2748845 | + | ID = TGME49_259630; | 549 |
| | | | | length = 1751 | |
| TGME49_chrb | 4351 | 6355 | − | ID = TGME49_207350; | 550 |
| | | | | length = 2004 | |
| TGME49_chrX | 2899092 | 2901603 | + | ID = TGME49_224660; | 551 |
| | | | | length = 2511 | |
| TGME49_chrX | 697594 | 700161 | + | ID = TGME49_227970; | 552 |
| | | | | length = 2567 | |
| TGME49_chrXI | 2069622 | 2070833 | − | ID = TGME49_311430; | 553 |
| | | | | length = 1211 | |
| TGME49_chrVIII | 2975808 | 2977909 | + | ID = TGME49_274150; | 554 |
| | | | | length = 2101 | |
| TGME49_chrVIIb | 1633764 | 1635885 | + | ID = TGME49_261600; | 555 |
| | | | | length = 2121 | |
| TGME49_chrIX | 4778923 | 4783666 | − | ID = TGME49_210450; | 556 |
| | | | | length = 4743 | |
| TGME49_chrXII | 170916 | 172799 | − | ID = TGME49_300180; | 557 |
| | | | | length = 1883 | |
| TGME49_chrVI | 903242 | 908079 | − | ID = TGME49_239760; | 558 |
| | | | | length = 4837 | |
| TGME49_chrXII | 5256913 | 5260639 | + | ID = TGME49_250840; | 559 |
| | | | | length = 3726 | |
| TGME49_chrX | 2609467 | 2612329 | + | ID = TGME49_224980; | 560 |
| | | | | length = 2862 | |
| TGME49_chrX | 5806295 | 5808296 | + | ID = TGME49_237250; | 561 |
| | | | | length = 2001 | |
| TGME49_chrVI | 548569 | 552854 | − | ID = TGME49_239320; | 562 |
| | | | | length = 4285 | |
| TGME49_chrVIIb | 1456014 | 1458169 | + | ID = TGME49_261960; | 563 |
| | | | | length = 2155 | |
| TGME49_chrXII | 838987 | 840604 | + | ID = TGME49_219590; | 564 |
| | | | | length = 1617 | |
| TGME49_chrIX | 600361 | 602779 | − | ID = TGME49_267530; | 565 |
| | | | | length = 2418 | |
| TGME49_chrV | 3072356 | 3074734 | + | ID = TGME49_283550; | 566 |
| | | | | length = 2378 | |
| TGME49_chrIV | 1653702 | 1657375 | + | ID = TGME49_211630; | 567 |
| | | | | length = 3673 | |
| TGME49_chrXI | 6343575 | 6348246 | + | ID = TGME49_216190; | 568 |
| | | | | length = 4671 | |
| TGME49_chrXII | 3835647 | 3837281 | − | ID = TGME49_248400; | 569 |
| | | | | length = 1634 | |
| TGME49_chrVI | 613254 | 616583 | + | ID = TGME49_239400; | 570 |
| | | | | length = 3329 | |
| TGME49_chrX | 2864192 | 2865912 | − | ID = TGME49_224710; | 571 |
| | | | | length = 1720 | |
| TGME49_chrII | 404894 | 406860 | − | ID = TGME49_221500; | 572 |
| | | | | length = 1966 | |
| TGME49_chrVIII | 6364079 | 6366025 | + | ID = TGME49_268685; | 573 |
| | | | | length = 1946 | |
| TGME49_chrIX | 3413082 | 3417820 | − | ID = TGME49_289730; | 574 |
| | | | | length = 4738 | |
| TGME49_chrIX | 4411548 | 4413465 | + | ID = TGME49_291940; | 575 |
| | | | | length = 1917 | |
| TGME49_chrX | 7395157 | 7398234 | − | ID = TGME49_207100; | 576 |
| | | | | length = 3077 | |
| TGME49_chrIX | 4245187 | 4246860 | + | ID = TGME49_291330; | 577 |
| | | | | length = 1673 | |
| TGME49_chrV | 1422070 | 1425388 | + | ID = TGME49_213910; | 578 |
| | | | | length = 3318 | |
| TGME49_chrIX | 3766794 | 3768071 | − | ID = TGME49_290605; | 579 |
| | | | | length = 1277 | |
| TGME49_chrX | 4283352 | 4285324 | − | ID = TGME49_234280; | 580 |
| | | | | length = 1972 | |
| TGME49_chrX | 6956462 | 6958294 | − | ID = TGME49_215430; | 581 |
| | | | | length = 1832 | |
| TGME49_chrV | 186946 | 188803 | + | ID = TGME49_220175; | 582 |
| | | | | length = 1857 | |
| TGME49_chrXII | 2719770 | 2724408 | − | ID = TGME49_246182; | 583 |
| | | | | length = 4638 | |
| TGME49_chrX | 7273127 | 7275437 | − | ID = TGME49_275440; | 584 |
| | | | | length = 2310 | |
| TGME49_chrVIII | 2250133 | 2251577 | + | ID = TGME49_232760; | 585 |
| | | | | length = 1444 | |
| TGME49_chrIX | 2113235 | 2114688 | − | ID = TGME49_264680; | 586 |
| | | | | length = 1453 | |
| TGME49_chrIb | 1503624 | 1507993 | + | ID = TGME49_209880; | 587 |
| | | | | length = 4369 | |
| TGME49_chrVIIa | 1653920 | 1656907 | − | ID = TGME49_205050; | 588 |
| | | | | length = 2987 | |
| TGME49_chrVIII | 1614122 | 1617638 | − | ID = TGME49_231880; | 589 |
| | | | | length = 3516 | |
| TGME49_chrVIII | 6823035 | 6824629 | + | ID = TGME49_200360; | 590 |
| | | | | length = 1594 | |
| TGME49_chrIV | 392225 | 396143 | + | ID = TGME49_320290; | 591 |
| | | | | length = 3918 | |
| TGME49_chrXI | 1725051 | 1727020 | − | ID = TGME49_311010; | 592 |
| | | | | length = 1969 | |
| TGME49_chrIX | 1570813 | 1573290 | + | ID = TGME49_265410; | 593 |
| | | | | length = 2477 | |
| TGME49_chrIV | 258575 | 263510 | + | ID = TGME49_320550; | 594 |
| | | | | length = 4935 | |
| TGME49_chrVIIb | 3432626 | 3435118 | + | ID = TGME49_258410; | 595 |
| | | | | length = 2492 | |
| TGME49_chrX | 4433471 | 4435962 | − | ID = TGME49_234510; | 596 |
| | | | | length = 2491 | |
| TGME49_chrXI | 4695687 | 4699361 | − | ID = TGME49_315410; | 597 |
| | | | | length = 3674 | |
| TGME49_chrX | 1944153 | 1947194 | + | ID = TGME49_225905; | 598 |
| | | | | length = 3041 | |
| TGME49_chrVIIb | 2072870 | 2074965 | − | ID = TGME49_260670; | 599 |
| | | | | length = 2095 | |
| TGME49_chrXII | 2651958 | 2655687 | + | ID = TGME49_246090; | 600 |
| | | | | length = 3729 | |
| TGME49_chrVIIa | 1225490 | 1226911 | + | ID = TGME49_205662; | 601 |
| | | | | length = 1421 | |
| TGME49_chrVIIa | 524618 | 528076 | + | ID = TGME49_304500; | 602 |
| | | | | length = 3458 | |
| TGME49_chrVIII | 2901671 | 2903828 | − | ID = TGME49_233925; | 603 |
| | | | | length = 2157 | |
| TGME49_chrVIII | 4715373 | 4717272 | + | ID = TGME49_271100; | 604 |
| | | | | length = 1899 | |
| TGME49_chrXI | 4750836 | 4752746 | − | ID = TGME49_315480; | 605 |
| | | | | length = 1910 | |
| TGME49_chrX | 3428954 | 3431481 | − | ID = TGME49_223960; | 606 |
| | | | | length = 2527 | |
| TGME49_chrIX | 1195352 | 1197540 | − | ID = TGME49_266368; | 607 |
| | | | | length = 2188 | |
| TGME49_chrII | 1798742 | 1800245 | + | ID = TGME49_297465; | 608 |
| | | | | length = 1503 | |
| TGME49_chrIX | 6077602 | 6080932 | − | ID = TGME49_306430; | 609 |
| | | | | length = 3330 | |
| TGME49_chrVIIa | 740498 | 744501 | + | ID = TGME49_206660; | 610 |
| | | | | length = 4003 | |
| TGME49_chrX | 3135671 | 3138592 | − | ID = TGME49_224280; | 611 |
| | | | | length = 2921 | |
| TGME49_chrVIIb | 3553741 | 3554846 | − | ID = TGME49_258140; | 612 |
| | | | | length = 1105 | |
| TGME49_chrIX | 5352748 | 5353735 | − | ID = TGME49_305315; | 613 |
| | | | | length = 987 | |
| TGME49_chrVIII | 4698087 | 4702028 | − | ID = TGME49_271115; | 614 |
| | | | | length = 3941 | |
| TGME49_chrIX | 793986 | 798309 | + | ID = TGME49_267060; | 615 |
| | | | | length = 4323 | |
| TGME49_chrVIIb | 3202590 | 3203934 | + | ID = TGME49_258760; | 616 |
| | | | | length = 1344 | |
| TGME49_chrX | 379796 | 381741 | + | ID = TGME49_228350; | 617 |
| | | | | length = 1945 | |
| TGME49_chrX | 4639580 | 4641831 | + | ID = TGME49_235150; | 618 |
| | | | | length = 2251 | |
| TGME49_chrIX | 3458713 | 3461263 | + | ID = TGME49_289800; | 619 |
| | | | | length = 2550 | |
| TGME49_chrVIIa | 2500255 | 2501767 | − | ID = TGME49_203450; | 620 |
| | | | | length = 1512 | |
| TGME49_chrXII | 4692112 | 4694534 | + | ID = TGME49_249620; | 621 |
| | | | | length = 2422 | |
| TGME49_chrVIII | 4351126 | 4354140 | − | ID = TGME49_271810; | 622 |
| | | | | length = 3014 | |
| TGME49_chrVIIa | 1305173 | 1307774 | − | ID = TGME49_205570; | 623 |
| | | | | length = 2601 | |
| TGME49_chrXI | 5710062 | 5711311 | + | ID = TGME49_217040; | 624 |
| | | | | length = 1249 | |
| TGME49_chrIa | 876889 | 879930 | − | ID = TGME49_294390; | 625 |
| | | | | length = 3041 | |
| TGME49_chrVIIa | 3975182 | 3977201 | + | ID = TGME49_201200; | 626 |
| | | | | length = 2019 | |
| TGME49_chrVIIb | 2870084 | 2871524 | − | ID = TGME49_259220; | 627 |
| | | | | length = 1440 | |
| TGME49_chrVI | 1084348 | 1088618 | + | ID = TGME49_240230; | 628 |
| | | | | length = 4270 | |
| TGME49_chrVIIb | 3385721 | 3387496 | + | ID = TGME49_258490; | 629 |
| | | | | length = 1775 | |
| TGME49_chrVIIb | 528457 | 531919 | + | ID = TGME49_263480; | 630 |
| | | | | length = 3462 | |
| TGME49_chrII | 757384 | 761699 | + | ID = TGME49_222020; | 631 |
| | | | | length = 4315 | |
| TGME49_chrVIII | 1358289 | 1362306 | − | ID = TGME49_231350; | 632 |
| | | | | length = 4017 | |
| TGME49_chrIX | 2802162 | 2802980 | − | ID = TGME49_288900; | 633 |
| | | | | length = 818 | |
| TGME49_chrX | 2467589 | 2469875 | − | ID = TGME49_225130; | 634 |
| | | | | length = 2286 | |
| TGME49_chrVIIb | 2251666 | 2252571 | − | ID = TGME49_260460; | 635 |
| | | | | length = 905 | |
| TGME49_chrVIIa | 2091486 | 2095749 | + | ID = TGME49_203950; | 636 |
| | | | | length = 4263 | |
| TGME49_chrIX | 6058657 | 6060999 | + | ID = TGME49_306410; | 637 |
| | | | | length = 2342 | |
| TGME49_chrV | 198241 | 200161 | + | ID = TGME49_220200; | 638 |
| | | | | length = 1920 | |
| TGME49_chrII | 1356741 | 1359871 | − | ID = TGME49_222980; | 639 |
| | | | | length = 3130 | |
| TGME49_chrX | 2206505 | 2209526 | + | ID = TGME49_225490; | 640 |
| | | | | length = 3021 | |
| TGME49_chrXII | 2096828 | 2099495 | + | ID = TGME49_217770; | 641 |
| | | | | length = 2667 | |
| TGME49_chrVIIa | 2970014 | 2971521 | + | ID = TGME49_202870; | 642 |
| | | | | length = 1507 | |
| TGME49_chrVIIb | 322918 | 324659 | − | ID = TGME49_263800; | 643 |
| | | | | length = 1741 | |
| TGME49_chrVIIb | 2953991 | 2955320 | − | ID = TGME49_259140; | 644 |
| | | | | length = 1329 | |
| TGME49_chrVIIa | 1469449 | 1473570 | + | ID = TGME49_205320; | 645 |
| | | | | length = 4121 | |
| TGME49_chrXI | 461912 | 464423 | + | ID = TGME49_309060; | 646 |
| | | | | length = 2511 | |
| TGME49_chrIX | 1224097 | 1225515 | − | ID = TGME49_266320; | 647 |
| | | | | length = 1418 | |
| TGME49_chrII | 2142037 | 2146242 | + | ID = TGME49_297970; | 648 |
| | | | | length = 4205 | |
| TGME49_chrVI | 1042594 | 1045138 | − | ID = TGME49_240070; | 649 |
| | | | | length = 2544 | |
| TGME49_chrV | 1309086 | 1311333 | − | ID = TGME49_213770; | 650 |
| | | | | length = 2247 | |
| TGME49_chrII | 1023447 | 1025166 | − | ID = TGME49_222305; | 651 |
| | | | | length = 1719 | |
| TGME49_chrXI | 1500417 | 1504291 | − | ID = TGME49_310640; | 652 |
| | | | | length = 3874 | |
| TGME49_chrXI | 4378378 | 4379028 | + | ID = TGME49_314890; | 653 |
| | | | | length = 650 | |
| TGME49_chrX | 738524 | 740600 | + | ID = TGME49_227910; | 654 |
| | | | | length = 2076 | |
| TGME49_chrIX | 6045512 | 6047246 | + | ID = TGME49_306390; | 655 |
| | | | | length = 1734 | |
| TGME49_chrX | 1935232 | 1938008 | − | ID = TGME49_225920; | 656 |
| | | | | length = 2776 | |
| TGME49_chrVI | 1441267 | 1443761 | − | ID = TGME49_240770; | 657 |
| | | | | length = 2494 | |
| TGME49_chrVIIa | 2001508 | 2005367 | − | ID = TGME49_204090; | 658 |
| | | | | length = 3859 | |
| TGME49_chrIa | 654666 | 657455 | − | ID = TGME49_294025; | 659 |
| | | | | length = 2789 | |
| TGME49_chrVIIb | 2174692 | 2176915 | + | ID = TGME49_260530; | 660 |
| | | | | length = 2223 | |
| TGME49_chrXII | 711702 | 713805 | + | ID = TGME49_219700; | 661 |
| | | | | length = 2103 | |
| TGME49_chrIa | 1304701 | 1306918 | + | ID = TGME49_295000; | 662 |
| | | | | length = 2217 | |
| TGME49_chrIX | 568139 | 569234 | + | ID = TGME49_267560; | 663 |
| | | | | length = 1095 | |
| TGME49_chrVIII | 5397829 | 5399254 | − | ID = TGME49_270110; | 664 |
| | | | | length = 1425 | |
| TGME49_chrXII | 2844102 | 2846241 | + | ID = TGME49_246550; | 665 |
| | | | | length = 2139 | |
| TGME49_chrXII | 4934926 | 4937491 | + | ID = TGME49_249900; | 666 |
| | | | | length = 2565 | |
| TGME49_chrX | 4880053 | 4884161 | + | ID = TGME49_235470; | 667 |
| | | | | length = 4108 | |
| TGME49_chrXI | 5868595 | 5871618 | − | ID = TGME49_216820; | 668 |
| | | | | length = 3023 | |
| TGME49_chrXII | 6404251 | 6407186 | − | ID = TGME49_277940; | 669 |
| | | | | length = 2935 | |
| TGME49_chrIX | 957423 | 959519 | + | ID = TGME49_266800; | 670 |
| | | | | length = 2096 | |
| TGME49_chrXII | 5774989 | 5777401 | − | ID = TGME49_278900; | 671 |
| | | | | length = 2412 | |
| TGME49_chrVIII | 3959751 | 3962176 | + | ID = TGME49_272450; | 672 |
| | | | | length = 2425 | |
| TGME49_chrVIII | 3700675 | 3704469 | − | ID = TGME49_273030; | 673 |
| | | | | length = 3794 | |
| TGME49_chrVIIb | 3532555 | 3534514 | + | ID = TGME49_258170; | 674 |
| | | | | length = 1959 | |
| TGME49_chrIX | 5338645 | 5340540 | − | ID = TGME49_305290; | 675 |
| | | | | length = 1895 | |
| TGME49_chrIX | 3807351 | 3810696 | + | ID = TGME49_290645; | 676 |
| | | | | length = 3345 | |
| TGME49_chrXII | 5625786 | 5628283 | + | ID = TGME49_251855; | 677 |
| | | | | length = 2497 | |
| TGME49_chrVI | 3004204 | 3006660 | + | ID = TGME49_244070; | 678 |
| | | | | length = 2456 | |
| TGME49_chrVIIa | 3948602 | 3952191 | + | ID = TGME49_201230; | 679 |
| | | | | length = 3589 | |
| TGME49_chrVIII | 15020 | 16940 | + | ID = TGME49_229005; | 680 |
| | | | | length = 1920 | |
| TGME49_chrIa | 429247 | 432726 | − | ID = TGME49_293570; | 681 |
| | | | | length = 3479 | |
| TGME49_chrII | 1927281 | 1932126 | + | ID = TGME49_297710; | 682 |
| | | | | length = 4845 | |
| TGME49_chrXI | 2637010 | 2638757 | + | ID = TGME49_312370; | 683 |
| | | | | length = 1747 | |
| TGME49_chrXII | 3469020 | 3473396 | − | ID = TGME49_247660; | 684 |
| | | | | length = 4376 | |
| TGME49_chrXI | 4916157 | 4920214 | − | ID = TGME49_315700; | 685 |
| | | | | length = 4057 | |
| TGME49_chrIb | 629071 | 630918 | + | ID = TGME49_208360; | 686 |
| | | | | length = 1847 | |
| TGME49_chrXII | 6755827 | 6757330 | + | ID = TGME49_277050; | 687 |
| | | | | length = 1503 | |
| TGME49_chrVIIb | 4411300 | 4413757 | − | ID = TGME49_256840; | 688 |
| | | | | length = 2457 | |
| TGME49_chrX | 7049221 | 7051104 | − | ID = TGME49_215610; | 689 |
| | | | | length = 1883 | |
| TGME49_chrXII | 6528538 | 6533549 | + | ID = TGME49_277760; | 690 |
| | | | | length = 5011 | |
| TGME49_chrVIIa | 3427921 | 3430094 | + | ID = TGME49_202310; | 691 |
| | | | | length = 2173 | |
| TGME49_chrX | 6689399 | 6691360 | + | ID = TGME49_215030; | 692 |
| | | | | length = 1961 | |
| TGME49_chrVI | 2874483 | 2876334 | + | ID = TGME49_243900; | 693 |
| | | | | length = 1851 | |
| TGME49_chrVIII | 83739 | 85719 | − | ID = TGME49_229180; | 694 |
| | | | | length = 1980 | |
| TGME49_chrIV | 2119015 | 2122018 | − | ID = TGME49_210715; | 695 |
| | | | | length = 3003 | |
| TGME49_chrVIIb | 3259075 | 3262189 | + | ID = TGME49_258680; | 696 |
| | | | | length = 3114 | |
| TGME49_chrV | 125975 | 128008 | + | ID = TGME49_220100; | 697 |
| | | | | length = 2033 | |
| TGME49_chrVI | 3354392 | 3358777 | − | ID = TGME49_244550; | 698 |
| | | | | length = 4385 | |
| TGME49_chrV | 1810497 | 1813699 | + | ID = TGME49_286490; | 699 |
| | | | | length = 3202 | |
| TGME49_chrIb | 1306317 | 1308410 | + | ID = TGME49_209530; | 700 |
| | | | | length = 2093 | |
| TGME49_chrV | 2062700 | 2065738 | + | ID = TGME49_286000; | 701 |
| | | | | length = 3038 | |
| TGME49_chrIX | 2762545 | 2764943 | + | ID = TGME49_288840; | 702 |
| | | | | length = 2398 | |
| TGME49_chrX | 995784 | 1000191 | + | ID = TGME49_227350; | 703 |
| | | | | length = 4407 | |
| TGME49_chrIb | 1537215 | 1542214 | − | ID = TGME49_209890; | 704 |
| | | | | length = 4999 | |
| TGME49_chrVI | 2985954 | 2988613 | + | ID = TGME49_244050; | 705 |
| | | | | length = 2659 | |
| TGME49_chrXI | 5187085 | 5189714 | − | ID = TGME49_316200; | 706 |
| | | | | length = 2629 | |
| TGME49_chrVIIa | 2561670 | 2565986 | + | ID = TGME49_203340; | 707 |
| | | | | length = 4316 | |
| TGME49_chrV | 2226315 | 2231159 | + | ID = TGME49_285790; | 708 |
| | | | | length = 4844 | |
| TGME49_chrIX | 404524 | 405991 | + | ID = TGME49_267725; | 709 |
| | | | | length = 1467 | |
| TGME49_chrIX | 694704 | 696929 | + | ID = TGME49_267360; | 710 |
| | | | | length = 2225 | |
| TGME49_chrXII | 3777345 | 3780569 | + | ID = TGME49_248290; | 711 |
| | | | | length = 3224 | |
| TGME49_chrVIIa | 3092406 | 3094459 | − | ID = TGME49_202720; | 712 |
| | | | | length = 2053 | |
| TGME49_chrXI | 2455600 | 2459938 | + | ID = TGME49_312150; | 713 |
| | | | | length = 4338 | |
| TGME49_chrII | 220920 | 223578 | + | ID = TGME49_221295; | 714 |
| | | | | length = 2658 | |
| TGME49_chrXII | 2084169 | 2087144 | − | ID = TGME49_217730; | 715 |
| | | | | length = 2975 | |
| TGME49_chrIb | 1007791 | 1010351 | − | ID = TGME49_209045; | 716 |
| | | | | length = 2560 | |
| TGME49_chrX | 5265702 | 5266555 | − | ID = TGME49_236070; | 717 |
| | | | | length = 853 | |
| TGME49_chrVIIb | 3457465 | 3460841 | − | ID = TGME49_258360; | 718 |
| | | | | length = 3376 | |
| TGME49_chrVIII | 2192903 | 2195917 | − | ID = TGME49_232610; | 719 |
| | | | | length = 3014 | |
| TGME49_chrVIIb | 1109483 | 1111172 | + | ID = TGME49_262640; | 720 |
| | | | | length = 1689 | |
| TGME49_chrX | 3853657 | 3855793 | − | ID = TGME49_223430; | 721 |
| | | | | length = 2136 | |
| TGME49_chrXI | 4239198 | 4243862 | + | ID = TGME49_314720; | 722 |
| | | | | length = 4664 | |
| TGME49_chrVIIb | 2697869 | 2700279 | + | ID = TGME49_259710; | 723 |
| | | | | length = 2410 | |
| TGME49_chrVIIa | 1471730 | 1473919 | − | ID = TGME49_205330; | 724 |
| | | | | length = 2189 | |
| TGME49_chrV | 2711878 | 2714132 | − | ID = TGME49_284570; | 725 |
| | | | | length = 2254 | |
| TGME49_chrVIII | 388717 | 391218 | − | ID = TGME49_229700; | 726 |
| | | | | length = 2501 | |
| TGME49_chrIX | 1538973 | 1542213 | + | ID = TGME49_265455; | 727 |
| | | | | length = 3240 | |
| TGME49_chrXI | 763730 | 767625 | − | ID = TGME49_309610; | 728 |
| | | | | length = 3895 | |
| TGME49_chrXI | 2544365 | 2546425 | + | ID = TGME49_312250; | 729 |
| | | | | length = 2060 | |
| TGME49_chrVIII | 5643590 | 5647253 | − | ID = TGME49_269730; | 730 |
| | | | | length = 3663 | |
| TGME49_chrIX | 3584012 | 3585263 | − | ID = TGME49_290005; | 731 |
| | | | | length = 1251 | |
| TGME49_chrVIIa | 3971108 | 3972217 | − | ID = TGME49_201215; | 732 |
| | | | | length = 1109 | |
| TGME49_chrIX | 5666852 | 5669401 | − | ID = TGME49_305910; | 733 |
| | | | | length = 2549 | |
| TGME49_chrVIIa | 1726778 | 1728368 | + | ID = TGME49_204540; | 734 |
| | | | | length = 1590 | |
| TGME49_chrIX | 5763619 | 5766671 | − | ID = TGME49_306030; | 735 |
| | | | | length = 3052 | |
| TGME49_chrIX | 5211532 | 5213996 | − | ID = TGME49_305080; | 736 |
| | | | | length = 2464 | |
| TGME49_chrII | 1002441 | 1005482 | + | ID = TGME49_222270; | 737 |
| | | | | length = 3041 | |
| TGME49_chrXII | 82314 | 83922 | + | ID = TGME49_300320; | 738 |
| | | | | length = 1608 | |
| TGME49_chrXI | 4112813 | 4117560 | + | ID = TGME49_314470; | 739 |
| | | | | length = 4747 | |
| TGME49_chrVIII | 6338649 | 6340670 | − | ID = TGME49_268740; | 740 |
| | | | | length = 2021 | |
| TGME49_chrIX | 4955341 | 4957346 | − | ID = TGME49_210220; | 741 |
| | | | | length = 2005 | |
| TGME49_chrX | 1176693 | 1177745 | − | ID = TGME49_226980; | 742 |
| | | | | length = 1052 | |
| TGME49_chrXII | 1656412 | 1659890 | − | ID = TGME49_218240; | 743 |
| | | | | length = 3478 | |
| TGME49_chrXII | 6033919 | 6035646 | − | ID = TGME49_278550; | 744 |
| | | | | length = 1727 | |
| TGME49_chrVIIa | 2960978 | 2963669 | − | ID = TGME49_202890; | 745 |
| | | | | length = 2691 | |
| TGME49_chrXII | 6087585 | 6092290 | + | ID = TGME49_278450; | 746 |
| | | | | length = 4705 | |
| TGME49_chrVIII | 101229 | 104465 | + | ID = TGME49_229230; | 747 |
| | | | | length = 3236 | |
| TGME49_chrIV | 1027176 | 1029320 | − | ID = TGME49_319330; | 748 |
| | | | | length = 2144 | |
| TGME49_chrV | 927001 | 929683 | + | ID = TGME49_213325; | 749 |
| | | | | length = 2682 | |
| TGME49_chrVIIa | 1979278 | 1981377 | − | ID = TGME49_204120; | 750 |
| | | | | length = 2099 | |
| TGME49_chrVIIa | 2168400 | 2170024 | − | ID = TGME49_203875; | 751 |
| | | | | length = 1624 | |
| TGME49_chrV | 805784 | 808589 | + | ID = TGME49_213040; | 752 |
| | | | | length = 2805 | |
| TGME49_chrXI | 3257664 | 3259999 | + | ID = TGME49_313310; | 753 |
| | | | | length = 2335 | |
| TGME49_chrXI | 4225921 | 4227690 | − | ID = TGME49_314690; | 754 |
| | | | | length = 1769 | |
| TGME49_chrXI | 2469249 | 2471186 | − | ID = TGME49_312160; | 755 |
| | | | | length = 1937 | |
| TGME49_chrVIIa | 3069396 | 3071264 | − | ID = TGME49_202740; | 756 |
| | | | | length = 1868 | |
| TGME49_chrVIIb | 3982505 | 3984582 | − | ID = TGME49_257550; | 757 |
| | | | | length = 2077 | |
| TGME49_chrVI | 2352405 | 2356464 | − | ID = TGME49_242850; | 758 |
| | | | | length = 4059 | |
| TGME49_chrVIIa | 1364682 | 1367044 | − | ID = TGME49_205510; | 759 |
| | | | | length = 2362 | |
| TGME49_chrIX | 3290280 | 3294112 | − | ID = TGME49_289530; | 760 |
| | | | | length = 3832 | |
| TGME49_chrX | 6509764 | 6512159 | + | ID = TGME49_214820; | 761 |
| | | | | length = 2395 | |
| TGME49_chrX | 581261 | 582904 | − | ID = TGME49_228110; | 762 |
| | | | | length = 1643 | |
| TGME49_chrVIIb | 2990065 | 2994627 | + | ID = TGME49_259040; | 763 |
| | | | | length = 4562 | |
| TGME49_chrXI | 2072060 | 2077000 | + | ID = TGME49_311450; | 764 |
| | | | | length = 4940 | |
| TGME49_chrVIII | 2876231 | 2878765 | − | ID = TGME49_233880; | 765 |
| | | | | length = 2534 | |
| TGME49_chrV | 1940852 | 1943237 | + | ID = TGME49_286160; | 766 |
| | | | | length = 2385 | |
| TGME49_chrIb | 737486 | 739366 | + | ID = TGME49_208510; | 767 |
| | | | | length = 1880 | |
| TGME49_chrX | 7427442 | 7429460 | + | ID = TGME49_207180; | 768 |
| | | | | length = 2018 | |
| TGME49_chrXI | 4517672 | 4520283 | + | ID = TGME49_315150; | 769 |
| | | | | length = 2611 | |
| TGME49_chrVI | 2075613 | 2077679 | − | ID = TGME49_242570; | 770 |
| | | | | length = 2066 | |
| TGME49_chrXII | 5792779 | 5795081 | − | ID = TGME49_278878; | 771 |
| | | | | length = 2302 | |
| TGME49_chrXI | 6607068 | 6609847 | + | ID = TGME49_298630; | 772 |
| | | | | length = 2779 | |
| TGME49_chrII | 1309836 | 1311957 | + | ID = TGME49_222920; | 773 |
| | | | | length = 2121 | |
| TGME49_chrVI | 3254059 | 3255822 | − | ID = TGME49_244420; | 774 |
| | | | | length = 1763 | |
| TGME49_chrVI | 1733335 | 1738338 | + | ID = TGME49_241840; | 775 |
| | | | | length = 5003 | |
| TGME49_chrXII | 51579 | 55519 | + | ID = TGME49_300350; | 776 |
| | | | | length = 3940 | |
| TGME49_chrIX | 4278507 | 4279338 | − | ID = TGME49_291580; | 777 |
| | | | | length = 831 | |
| TGME49_chrX | 537261 | 540449 | − | ID = TGME49_228160; | 778 |
| | | | | length = 3188 | |
| TGME49_chrVIII | 2637897 | 2639548 | + | ID = TGME49_233430; | 779 |
| | | | | length = 1651 | |
| TGME49_chrX | 6320461 | 6322071 | − | ID = TGME49_214490; | 780 |
| | | | | length = 1610 | |
| TGME49_chrVIIa | 1438969 | 1442993 | + | ID = TGME49_205360; | 781 |
| | | | | length = 4024 | |
| TGME49_chrIX | 423314 | 427457 | + | ID = TGME49_267710; | 782 |
| | | | | length = 4143 | |
| TGME49_chrXII | 3305338 | 3310175 | − | ID = TGME49_247380; | 783 |
| | | | | length = 4837 | |
| TGME49_chrV | 1107121 | 1109784 | + | ID = TGME49_213510; | 784 |
| | | | | length = 2663 | |
| TGME49_chrIX | 3928247 | 3930598 | − | ID = TGME49_290900; | 785 |
| | | | | length = 2351 | |
| TGME49_chrXII | 1737254 | 1738814 | − | ID = TGME49_218070; | 786 |
| | | | | length = 1560 | |
| TGME49_chrX | 1297593 | 1300223 | + | ID = TGME49_226840; | 787 |
| | | | | length = 2630 | |
| TGME49_chrVI | 3298917 | 3303680 | + | ID = TGME49_244480; | 788 |
| | | | | length = 4763 | |
| TGME49_chrXII | 681432 | 686187 | + | ID = TGME49_219730; | 789 |
| | | | | length = 4755 | |
| TGME49_chrVIIb | 1154398 | 1159261 | + | ID = TGME49_262564; | 790 |
| | | | | length = 4863 | |
| TGME49_chrVIIb | 2520918 | 2523507 | + | ID = TGME49_260020; | 791 |
| | | | | length = 2589 | |
| TGME49_chrVIIa | 4383439 | 4388493 | + | ID = TGME49_282130; | 792 |
| | | | | length = 5054 | |
| TGME49_chrVIII | 6357878 | 6362199 | − | ID = TGME49_268710; | 793 |
| | | | | length = 4321 | |
| TGME49_chrV | 3062858 | 3064646 | − | ID = TGME49_283698; | 794 |
| | | | | length = 1788 | |
| TGME49_chrIb | 185665 | 190405 | + | ID = TGME49_207650; | 795 |
| | | | | length = 4740 | |
| TGME49_chrXII | 3113953 | 3117617 | − | ID = TGME49_247025; | 796 |
| | | | | length = 3664 | |
| TGME49_chrIV | 2662136 | 2664273 | + | ID = TGME49_317705; | 797 |
| | | | | length = 2137 | |
| TGME49_chrXI | 6204102 | 6206390 | − | ID = TGME49_216375; | 798 |
| | | | | length = 2288 | |
| TGME49_chrVIIa | 1971451 | 1974609 | − | ID = TGME49_204130; | 799 |
| | | | | length = 3158 | |
| TGME49_chrII | 1378645 | 1380471 | − | ID = TGME49_223030; | 800 |
| | | | | length = 1826 | |
| TGME49_chrX | 294956 | 296317 | − | ID = TGME49_228480; | 801 |
| | | | | length = 1361 | |
| TGME49_chrVIIa | 3325912 | 3327698 | − | ID = TGME49_202445; | 802 |
| | | | | length = 1786 | |
| TGME49_chrVIIa | 530623 | 533507 | + | ID = TGME49_304520; | 803 |
| | | | | length = 2884 | |
| TGME49_chrV | 1878530 | 1880133 | − | ID = TGME49_286265; | 804 |
| | | | | length = 1603 | |
| TGME49_chrXI | 5955570 | 5956873 | − | ID = TGME49_216700; | 805 |
| | | | | length = 1303 | |
| TGME49_chrII | 2094542 | 2097582 | − | ID = TGME49_297880; | 806 |
| | | | | length = 3040 | |
| TGME49_chrX | 6821949 | 6825368 | + | ID = TGME49_215220; | 807 |
| | | | | length = 3419 | |
| TGME49_chrVIII | 6586174 | 6591203 | − | ID = TGME49_268280; | 808 |
| | | | | length = 5029 | |
| TGME49_chrV | 2346870 | 2349052 | + | ID = TGME49_285520; | 809 |
| | | | | length = 2182 | |
| TGME49_chrVIIa | 3182956 | 3184488 | − | ID = TGME49_202600; | 810 |
| | | | | length = 1532 | |
| TGME49_chrII | 1959873 | 1961931 | − | ID = TGME49_297730; | 811 |
| | | | | length = 2058 | |
| TGME49_chrVIII | 2213367 | 2216028 | − | ID = TGME49_232660; | 812 |
| | | | | length = 2661 | |
| TGME49_chrVIII | 1472593 | 1474572 | + | ID = TGME49_231590; | 813 |
| | | | | length = 1979 | |
| TGME49_chrVIIb | 407034 | 411993 | + | ID = TGME49_263650; | 814 |
| | | | | length = 4959 | |
| TGME49_chrXII | 6040410 | 6041868 | + | ID = TGME49_278522; | 815 |
| | | | | length = 1458 | |
| TGME49_chrVI | 128832 | 133066 | + | ID = TGME49_238210; | 816 |
| | | | | length = 4234 | |
| TGME49_chrVIII | 2351312 | 2353449 | − | ID = TGME49_233020; | 817 |
| | | | | length = 2137 | |
| TGME49_chrXII | 3675670 | 3678134 | + | ID = TGME49_248130; | 818 |
| | | | | length = 2464 | |
| TGME49_chrXI | 1751305 | 1754114 | + | ID = TGME49_311060; | 819 |
| | | | | length = 2809 | |
| TGME49_chrVIII | 3820920 | 3824021 | − | ID = TGME49_272650; | 820 |
| | | | | length = 3101 | |
| TGME49_chrIX | 3958197 | 3961023 | − | ID = TGME49_290940; | 821 |
| | | | | length = 2826 | |
| TGME49_chrVIII | 3927306 | 3931495 | + | ID = TGME49_272500; | 822 |
| | | | | length = 4189 | |
| TGME49_chrVIIb | 4557365 | 4559435 | − | ID = TGME49_256030; | 823 |
| | | | | length = 2070 | |
| TGME49_chrVIIa | 3276204 | 3279186 | − | ID = TGME49_202500; | 824 |
| | | | | length = 2982 | |
| TGME49_chrVIII | 6318896 | 6321304 | − | ID = TGME49_268780; | 825 |
| | | | | length = 2408 | |
| TGME49_chrVIIb | 479812 | 483399 | + | ID = TGME49_263550; | 826 |
| | | | | length = 3587 | |
| TGME49_chrIX | 4290283 | 4293221 | + | ID = TGME49_291620; | 827 |
| | | | | length = 2938 | |
| TGME49_chrVI | 28927 | 31927 | + | ID = TGME49_238050; | 828 |
| | | | | length = 3000 | |
| TGME49_chrIV | 478540 | 480420 | − | ID = TGME49_320140; | 829 |
| | | | | length = 1880 | |
| TGME49_chrVIIa | 625928 | 629635 | − | ID = TGME49_304690; | 830 |
| | | | | length = 3707 | |
| TGME49_chrXI | 5485338 | 5489618 | − | ID = TGME49_316670; | 831 |
| | | | | length = 4280 | |
| TGME49_chrVIIa | 1539841 | 1542075 | + | ID = TGME49_205210; | 832 |
| | | | | length = 2234 | |
| TGME49_chrXII | 634097 | 638220 | + | ID = TGME49_219800; | 833 |
| | | | | length = 4123 | |
| TGME49_chrV | 1822851 | 1827597 | − | ID = TGME49_286465; | 834 |
| | | | | length = 4746 | |
| TGME49_chrVIII | 5573023 | 5577518 | + | ID = TGME49_269850; | 835 |
| | | | | length = 4495 | |
| TGME49_chrV | 688702 | 691280 | − | ID = TGME49_212880; | 836 |
| | | | | length = 2578 | |
| TGME49_chrVIIa | 718101 | 722948 | − | ID = TGME49_206700; | 837 |
| | | | | length = 4847 | |
| TGME49_chrVIIb | 1078623 | 1080134 | + | ID = TGME49_262690; | 838 |
| | | | | length = 1511 | |
| TGME49_chrVIII | 122484 | 127476 | + | ID = TGME49_229270; | 839 |
| | | | | length = 4992 | |
| TGME49_chrVIII | 1984455 | 1988743 | + | ID = TGME49_232270; | 840 |
| | | | | length = 4288 | |
| TGME49_chrIb | 1635560 | 1637014 | + | ID = TGME49_321685; | 841 |
| | | | | length = 1454 | |
| TGME49_chrXII | 4936100 | 4940316 | − | ID = TGME49_249890; | 842 |
| | | | | length = 4216 | |
| TGME49_chrXI | 542439 | 545032 | − | ID = TGME49_309185; | 843 |
| | | | | length = 2593 | |
| TGME49_chrX | 4421909 | 4423573 | + | ID = TGME49_234505; | 844 |
| | | | | length = 1664 | |
| TGME49_chrXI | 6172181 | 6176170 | − | ID = TGME49_216400; | 845 |
| | | | | length = 3989 | |
| TGME49_chrX | 2291510 | 2293010 | − | ID = TGME49_225350; | 846 |
| | | | | length = 1500 | |
| TGME49_chrV | 1749542 | 1751790 | + | ID = TGME49_286630; | 847 |
| | | | | length = 2248 | |
| TGME49_chrVI | 1319811 | 1322525 | + | ID = TGME49_240570; | 848 |
| | | | | length = 2714 | |
| TGME49_chrVIIb | 229491 | 232296 | − | ID = TGME49_264030; | 849 |
| | | | | length = 2805 | |
| TGME49_chrVI | 2310854 | 2312930 | + | ID = TGME49_242810; | 850 |
| | | | | length = 2076 | |
| TGME49_chrX | 6502678 | 6507667 | − | ID = TGME49_214800; | 851 |
| | | | | length = 4989 | |
| TGME49_chrXI | 2060339 | 2062705 | − | ID = TGME49_311400; | 852 |
| | | | | length = 2366 | |
| TGME49_chrVIII | 926825 | 929619 | + | ID = TGME49_230650; | 853 |
| | | | | length = 2794 | |
| TGME49_chrXII | 105272 | 106503 | − | ID = TGME49_300300; | 854 |
| | | | | length = 1231 | |
| TGME49_chrVIII | 453277 | 455115 | − | ID = TGME49_229800; | 855 |
| | | | | length = 1838 | |
| TGME49_chrX | 1644562 | 1648123 | + | ID = TGME49_226420; | 856 |
| | | | | length = 3561 | |
| TGME49_chrII | 1517438 | 1521865 | + | ID = TGME49_297080; | 857 |
| | | | | length = 4427 | |
| TGME49_chrVIIa | 4046509 | 4047748 | − | ID = TGME49_281360; | 858 |
| | | | | length = 1239 | |
| TGME49_chrX | 2847812 | 2849682 | − | ID = TGME49_224740; | 859 |
| | | | | length = 1870 | |
| TGME49_chrIX | 2404001 | 2406112 | + | ID = TGME49_288240; | 860 |
| | | | | length = 2111 | |
| TGME49_chrII | 2059679 | 2062541 | − | ID = TGME49_297830; | 861 |
| | | | | length = 2862 | |
| TGME49_chrVI | 1483766 | 1486135 | + | ID = TGME49_240870; | 862 |
| | | | | length = 2369 | |
| TGME49_chrVIII | 5701192 | 5703410 | − | ID = TGME49_269670; | 863 |
| | | | | length = 2218 | |
| TGME49_chrV | 3011022 | 3012612 | + | ID = TGME49_283720; | 864 |
| | | | | length = 1590 | |
| TGME49_chrV | 2873814 | 2875242 | − | ID = TGME49_283900; | 865 |
| | | | | length = 1428 | |
| TGME49_chrX | 2677638 | 2679002 | − | ID = TGME49_224928; | 866 |
| | | | | length = 1364 | |
| TGME49_chrVI | 459221 | 463664 | − | ID = TGME49_239090; | 867 |
| | | | | length = 4443 | |
| TGME49_chrIX | 2481691 | 2483404 | + | ID = TGME49_288380; | 868 |
| | | | | length = 1713 | |
| TGME49_chrXII | 6336466 | 6338146 | − | ID = TGME49_278050; | 869 |
| | | | | length = 1680 | |
| TGME49_chrXI | 3461726 | 3464489 | − | ID = TGME49_313530; | 870 |
| | | | | length = 2763 | |
| TGME49_chrIV | 494931 | 499385 | − | ID = TGME49_320105; | 871 |
| | | | | length = 4454 | |
| TGME49_chrVIIb | 3216785 | 3221009 | + | ID = TGME49_258730; | 872 |
| | | | | length = 4224 | |
| TGME49_chrIV | 2387569 | 2389243 | − | ID = TGME49_301330; | 873 |
| | | | | length = 1674 | |
| TGME49_chrXII | 4581992 | 4584975 | + | ID = TGME49_249510; | 874 |
| | | | | length = 2983 | |
| TGME49_chrX | 764443 | 766659 | − | ID = TGME49_227870; | 875 |
| | | | | length = 2216 | |
| TGME49_chrXI | 5272434 | 5274572 | + | ID = TGME49_316400; | 876 |
| | | | | length = 2138 | |
| TGME49_chrIX | 907526 | 912198 | − | ID = TGME49_266910; | 877 |
| | | | | length = 4672 | |
| TGME49_chrVIII | 3348738 | 3350248 | − | ID = TGME49_273620; | 878 |
| | | | | length = 1510 | |
| TGME49_chrXII | 4977966 | 4980165 | − | ID = TGME49_249990; | 879 |
| | | | | length = 2199 | |
| TGME49_chrV | 2971036 | 2974678 | − | ID = TGME49_283790; | 880 |
| | | | | length = 3642 | |
| TGME49_chrXII | 6194501 | 6196639 | + | ID = TGME49_278250; | 881 |
| | | | | length = 2138 | |
| TGME49_chrVIIb | 4886434 | 4890628 | − | ID = TGME49_255350; | 882 |
| | | | | length = 4194 | |
| TGME49_chrVIIb | 1537462 | 1538674 | − | ID = TGME49_261770; | 883 |
| | | | | length = 1212 | |
| TGME49_chrIX | 2673441 | 2676363 | − | ID = TGME49_288680; | 884 |
| | | | | length = 2922 | |
| TGME49_chrX | 3787941 | 3790472 | + | ID = TGME49_223480; | 885 |
| | | | | length = 2531 | |
| TGME49_chrXII | 3635884 | 3640897 | − | ID = TGME49_247940; | 886 |
| | | | | length = 5013 | |
| TGME49_chrVI | 3491337 | 3495343 | + | ID = TGME49_244726; | 887 |
| | | | | length = 4006 | |
| TGME49_chrXII | 3425901 | 3428625 | − | ID = TGME49_247580; | 888 |
| | | | | length = 2724 | |
| TGME49_chrVIIb | 1660039 | 1663128 | + | ID = TGME49_261540; | 889 |
| | | | | length = 3089 | |
| TGME49_chrVI | 110931 | 113077 | − | ID = TGME49_238180; | 890 |
| | | | | length = 2146 | |
| TGME49_chrXII | 1569011 | 1573385 | − | ID = TGME49_218362; | 891 |
| | | | | length = 4374 | |
| TGME49_chrVIIb | 3048837 | 3050490 | − | ID = TGME49_258990; | 892 |
| | | | | length = 1653 | |
| TGME49_chrVIIb | 301194 | 305916 | + | ID = TGME49_263820; | 893 |
| | | | | length = 4722 | |
| TGME49_chrVIIa | 4386727 | 4390549 | − | ID = TGME49_282120; | 894 |
| | | | | length = 3822 | |
| TGME49_chrIV | 205415 | 209239 | + | ID = TGME49_320600; | 895 |
| | | | | length = 3824 | |
| TGME49_chrIX | 281401 | 284597 | − | ID = TGME49_279315; | 896 |
| | | | | length = 3196 | |
| TGME49_chrVIIb | 4247947 | 4250288 | + | ID = TGME49_257060; | 897 |
| | | | | length = 2341 | |
| TGME49_chrXI | 4347593 | 4351033 | − | ID = TGME49_314850; | 898 |
| | | | | length = 3440 | |
| TGME49_chrX | 1671295 | 1673894 | − | ID = TGME49_226385; | 899 |
| | | | | length = 2599 | |
| TGME49_chrXII | 1898504 | 1900791 | − | ID = TGME49_217540; | 900 |
| | | | | length = 2287 | |
| TGME49_chrVI | 1623501 | 1626197 | + | ID = TGME49_241130; | 901 |
| | | | | length = 2696 | |
| TGME49_chrXI | 5083118 | 5085552 | + | ID = TGME49_315940; | 902 |
| | | | | length = 2434 | |
| TGME49_chrXII | 1108648 | 1110707 | − | ID = TGME49_219150; | 903 |
| | | | | length = 2059 | |
| TGME49_chrXI | 3691754 | 3696010 | − | ID = TGME49_313780; | 904 |
| | | | | length = 4256 | |
| TGME49_chrIX | 1201055 | 1203450 | + | ID = TGME49_266360; | 905 |
| | | | | length = 2395 | |
| TGME49_chrIX | 1628753 | 1630162 | + | ID = TGME49_265290; | 906 |
| | | | | length = 1409 | |
| TGME49_chrIX | 5802166 | 5805344 | + | ID = TGME49_306080; | 907 |
| | | | | length = 3178 | |
| TGME49_chrV | 1269324 | 1271922 | − | ID = TGME49_213730; | 908 |
| | | | | length = 2598 | |
| TGME49_chrVIII | 6544943 | 6546577 | + | ID = TGME49_268320; | 909 |
| | | | | length = 1634 | |
| TGME49_chrVI | 2565899 | 2570600 | + | ID = TGME49_243350; | 910 |
| | | | | length = 4701 | |
| TGME49_chrV | 244725 | 247396 | − | ID = TGME49_220250; | 911 |
| | | | | length = 2671 | |
| TGME49_chrX | 4253581 | 4254822 | − | ID = TGME49_234260; | 912 |
| | | | | length = 1241 | |
| TGME49_chrXII | 141229 | 143333 | + | ID = TGME49_300230; | 913 |
| | | | | length = 2104 | |
| TGME49_chrX | 5248755 | 5253245 | + | ID = TGME49_236050; | 914 |
| | | | | length = 4490 | |
| TGME49_chrII | 1255974 | 1257956 | − | ID = TGME49_222840; | 915 |
| | | | | length = 1982 | |
| TGME49_chrVIII | 1421265 | 1423169 | − | ID = TGME49_231430; | 916 |
| | | | | length = 1904 | |
| TGME49_chrVIIa | 789026 | 794038 | − | ID = TGME49_206610; | 917 |
| | | | | length = 5012 | |
| TGME49_chrVI | 1454696 | 1457473 | + | ID = TGME49_240810; | 918 |
| | | | | length = 2777 | |
| TGME49_chrX | 4432719 | 4434480 | + | ID = TGME49_234520; | 919 |
| | | | | length = 1761 | |
| TGME49_chrIa | 999746 | 1003574 | − | ID = TGME49_294610; | 920 |
| | | | | length = 3828 | |
| TGME49_chrVIIa | 374254 | 376921 | − | ID = TGME49_280480; | 921 |
| | | | | length = 2667 | |
| TGME49_chrIV | 146510 | 149451 | + | ID = TGME49_320670; | 922 |
| | | | | length = 2941 | |
| TGME49_chrIX | 2955650 | 2958322 | − | ID = TGME49_289060; | 923 |
| | | | | length = 2672 | |
| TGME49_chrV | 2283288 | 2285190 | − | ID = TGME49_285700; | 924 |
| | | | | length = 1902 | |
| TGME49_chrVIII | 2619287 | 2621303 | + | ID = TGME49_233390; | 925 |
| | | | | length = 2016 | |
| TGME49_chrXI | 2246218 | 2248260 | − | ID = TGME49_311740; | 926 |
| | | | | length = 2042 | |
| TGME49_chrXII | 3304425 | 3309462 | + | ID = TGME49_247390; | 927 |
| | | | | length = 5037 | |
| TGME49_chrX | 6822559 | 6826683 | − | ID = TGME49_215210; | 928 |
| | | | | length = 4124 | |
| TGME49_chrXI | 1048590 | 1053342 | + | ID = TGME49_310100; | 929 |
| | | | | length = 4752 | |
| TGME49_chrX | 1429153 | 1433385 | + | ID = TGME49_226690; | 930 |
| | | | | length = 4232 | |
| TGME49_chrIX | 2602771 | 2606731 | + | ID = TGME49_288540; | 931 |
| | | | | length = 3960 | |
| TGME49_chrX | 76000 | 78305 | − | ID = TGME49_200590; | 932 |
| | | | | length = 2305 | |
| TGME49_chrVI | 3131474 | 3132802 | + | ID = TGME49_244240; | 933 |
| | | | | length = 1328 | |
| TGME49_chrVI | 2746962 | 2750934 | − | ID = TGME49_243600; | 934 |
| | | | | length = 3972 | |
| TGME49_chrX | 4869703 | 4872065 | + | ID = TGME49_235440; | 935 |
| | | | | length = 2362 | |
| TGME49_chrIa | 245706 | 248432 | − | ID = TGME49_293310; | 936 |
| | | | | length = 2726 | |
| TGME49_chrVI | 18291 | 19862 | − | ID = TGME49_238030; | 937 |
| | | | | length = 1571 | |
| TGME49_chrIa | 1025883 | 1028407 | + | ID = TGME49_294640; | 938 |
| | | | | length = 2524 | |
| TGME49_chrXII | 6329045 | 6330752 | − | ID = TGME49_278060; | 939 |
| | | | | length = 1707 | |
| TGME49_chrXI | 6343575 | 6346044 | + | ID = TGME49_216200; | 940 |
| | | | | length = 2469 | |
| TGME49_chrX | 5528016 | 5528444 | − | ID = TGME49_236830; | 941 |
| | | | | length = 428 | |
| TGME49_chrVIIa | 4006122 | 4008450 | + | ID = TGME49_201140; | 942 |
| | | | | length = 2328 | |
| TGME49_chrXI | 744895 | 746156 | + | ID = TGME49_309590; | 943 |
| | | | | length = 1261 | |
| TGME49_chrIV | 777767 | 779444 | + | ID = TGME49_319700; | 944 |
| | | | | length = 1677 | |
| TGME49_chrIa | 1704993 | 1707763 | − | ID = TGME49_295600; | 945 |
| | | | | length = 2770 | |
| TGME49_chrIV | 251460 | 253297 | − | ID = TGME49_320580; | 946 |
| | | | | length = 1837 | |
| TGME49_chrVIIb | 4543345 | 4545276 | + | ID = TGME49_256050; | 947 |
| | | | | length = 1931 | |
| TGME49_chrVI | 2880063 | 2882722 | + | ID = TGME49_243920; | 948 |
| | | | | length = 2659 | |
| TGME49_chrV | 2297009 | 2301830 | − | ID = TGME49_285670; | 949 |
| | | | | length = 4821 | |
| TGME49_chrIV | 742966 | 745952 | + | ID = TGME49_319850; | 950 |
| | | | | length = 2986 | |
| TGME49_chrII | 551419 | 555255 | − | ID = TGME49_221670; | 951 |
| | | | | length = 3836 | |
| TGME49_chrIX | 903708 | 908281 | + | ID = TGME49_266900; | 952 |
| | | | | length = 4573 | |
| TGME49_chrXII | 6571890 | 6574505 | + | ID = TGME49_277685; | 953 |
| | | | | length = 2615 | |
| TGME49_chrIV | 2511002 | 2514234 | + | ID = TGME49_301470; | 954 |
| | | | | length = 3232 | |
| TGME49_chrX | 2881882 | 2886012 | − | ID = TGME49_224680; | 955 |
| | | | | length = 4130 | |
| TGME49_chrXII | 1189943 | 1192566 | − | ID = TGME49_218955; | 956 |
| | | | | length = 2623 | |
| TGME49_chrXI | 1636715 | 1638328 | + | ID = TGME49_310870; | 957 |
| | | | | length = 1613 | |
| TGME49_chrV | 1740838 | 1743872 | − | ID = TGME49_286650; | 958 |
| | | | | length = 3034 | |
| TGME49_chrIV | 2038028 | 2039463 | − | ID = TGME49_210815; | 959 |
| | | | | length = 1435 | |
| TGME49_chrX | 6246170 | 6248972 | + | ID = TGME49_214320; | 960 |
| | | | | length = 2802 | |
| TGME49_chrVIIb | 460354 | 462837 | − | ID = TGME49_263590; | 961 |
| | | | | length = 2483 | |
| TGME49_chrXI | 4239198 | 4241167 | + | ID = TGME49_314715; | 962 |
| | | | | length = 1969 | |
| TGME49_chrX | 1747886 | 1749867 | − | ID = TGME49_226280; | 963 |
| | | | | length = 1981 | |
| TGME49_chrVIII | 4872953 | 4877607 | + | ID = TGME49_270920; | 964 |
| | | | | length = 4654 | |
| TGME49_chrII | 420859 | 424002 | − | ID = TGME49_221530; | 965 |
| | | | | length = 3143 | |
| TGME49_chrXI | 4902639 | 4904888 | + | ID = TGME49_315690; | 966 |
| | | | | length = 2249 | |
| TGME49_chrIX | 2404526 | 2406796 | − | ID = TGME49_288230; | 967 |
| | | | | length = 2270 | |
| TGME49_chrXI | 5009093 | 5010699 | − | ID = TGME49_315810; | 968 |
| | | | | length = 1606 | |
| TGME49_chrVIII | 6809858 | 6812222 | − | ID = TGME49_200330; | 969 |
| | | | | length = 2364 | |
| TGME49_chrVI | 1973911 | 1974670 | + | ID = TGME49_242340; | 970 |
| | | | | length = 759 | |
| TGME49_chrXII | 316928 | 321044 | − | ID = TGME49_299825; | 971 |
| | | | | length = 4116 | |
| TGME49_chrII | 683949 | 688778 | + | ID = TGME49_221910; | 972 |
| | | | | length = 4829 | |
| TGME49_chrIb | 607119 | 609291 | − | ID = TGME49_208310; | 973 |
| | | | | length = 2172 | |
| TGME49_chrXI | 1717490 | 1721072 | + | ID = TGME49_311000; | 974 |
| | | | | length = 3582 | |
| TGME49_chrXI | 2887262 | 2889295 | − | ID = TGME49_312650; | 975 |
| | | | | length = 2033 | |
| TGME49_chrVIIa | 332983 | 334493 | + | ID = TGME49_280522; | 976 |
| | | | | length = 1510 | |
| TGME49_chrX | 1531923 | 1536680 | + | ID = TGME49_226560; | 977 |
| | | | | length = 4757 | |
| TGME49_chrVIII | 2626057 | 2627682 | + | ID = TGME49_233405; | 978 |
| | | | | length = 1625 | |
| TGME49_chrVIIb | 1170152 | 1173763 | − | ID = TGME49_262550; | 979 |
| | | | | length = 3611 | |
| TGME49_chrIV | 1941441 | 1943945 | + | ID = TGME49_211060; | 980 |
| | | | | length = 2504 | |
| TGME49_chrVIII | 4447522 | 4450597 | + | ID = TGME49_271600; | 981 |
| | | | | length = 3075 | |
| TGME49_chrVIII | 1965225 | 1967627 | + | ID = TGME49_232240; | 982 |
| | | | | length = 2402 | |
| TGME49_chrIX | 3596648 | 3598874 | + | ID = TGME49_290040; | 983 |
| | | | | length = 2226 | |
| TGME49_chrVIIb | 3968336 | 3973027 | − | ID = TGME49_257572; | 984 |
| | | | | length = 4691 | |
| TGME49_chrV | 187252 | 190551 | − | ID = TGME49_220170; | 985 |
| | | | | length = 3299 | |
| TGME49_chrVIII | 1274114 | 1276871 | + | ID = TGME49_231160; | 986 |
| | | | | length = 2757 | |
| TGME49_chrVIIb | 4633239 | 4633990 | − | ID = TGME49_255910; | 987 |
| | | | | length = 751 | |
| TGME49_chrXII | 6567740 | 6569055 | + | ID = TGME49_277690; | 988 |
| | | | | length = 1315 | |
| TGME49_chrII | 605002 | 607207 | − | ID = TGME49_221710; | 989 |
| | | | | length = 2205 | |
| TGME49_chrIb | 1391208 | 1394231 | + | ID = TGME49_209680; | 990 |
| | | | | length = 3023 | |
| TGME49_chrVI | 468532 | 470265 | + | ID = TGME49_239120; | 991 |
| | | | | length = 1733 | |
| TGME49_chrX | 2921630 | 2925549 | − | ID = TGME49_224630; | 992 |
| | | | | length = 3919 | |
| TGME49_chrVI | 2799007 | 2803879 | − | ID = TGME49_243690; | 993 |
| | | | | length = 4872 | |
| TGME49_chrVI | 2904927 | 2906963 | − | ID = TGME49_243940; | 994 |
| | | | | length = 2036 | |
| TGME49_chrII | 466401 | 468740 | − | ID = TGME49_221585; | 995 |
| | | | | length = 2339 | |
| TGME49_chrVIII | 6616283 | 6618113 | − | ID = TGME49_268240; | 996 |
| | | | | length = 1830 | |
| TGME49_chrX | 5565970 | 5568898 | − | ID = TGME49_236890; | 997 |
| | | | | length = 2928 | |
| TGME49_chrXII | 651262 | 652841 | + | ID = TGME49_219770; | 998 |
| | | | | length = 1579 | |
| TGME49_chrIX | 2432096 | 2434121 | + | ID = TGME49_288280; | 999 |
| | | | | length = 2025 | |
| TGME49_chrXII | 1636217 | 1640467 | − | ID = TGME49_218270; | 1000 |
| | | | | length = 4250 | |
| TGME49_chrVIIa | 1872508 | 1874024 | + | ID = TGME49_204330; | 1001 |
| | | | | length = 1516 | |
| TGME49_chrXII | 3737300 | 3739417 | + | ID = TGME49_248200; | 1002 |
| | | | | length = 2117 | |
| TGME49_chrXI | 3858510 | 3860201 | + | ID = TGME49_313990; | 1003 |
| | | | | length = 1691 | |
| TGME49_chrVI | 2535609 | 2537835 | − | ID = TGME49_243302; | 1004 |
| | | | | length = 2226 | |
| TGME49_chrVIII | 218635 | 220518 | + | ID = TGME49_229380; | 1005 |
| | | | | length = 1883 | |
| TGME49_chrXII | 5899226 | 5904153 | + | ID = TGME49_278750; | 1006 |
| | | | | length = 4927 | |
| TGME49_chrVIIb | 791575 | 793258 | − | ID = TGME49_263120; | 1007 |
| | | | | length = 1683 | |
| TGME49_chrXII | 965702 | 969227 | − | ID = TGME49_219370; | 1008 |
| | | | | length = 3525 | |
| TGME49_chrVIIb | 2247921 | 2252571 | − | ID = TGME49_260470; | 1009 |
| | | | | length = 4650 | |
| TGME49_chrII | 925169 | 930001 | − | ID = TGME49_222160; | 1010 |
| | | | | length = 4832 | |
| TGME49_chrVIII | 4328122 | 4331040 | − | ID = TGME49_271870; | 1011 |
| | | | | length = 2918 | |
| TGME49_chrVIIb | 4565803 | 4568166 | − | ID = TGME49_256020; | 1012 |
| | | | | length = 2363 | |
| TGME49_chrIX | 401868 | 404259 | − | ID = TGME49_267730; | 1013 |
| | | | | length = 2391 | |
| TGME49_chrIV | 883987 | 886188 | + | ID = TGME49_319580; | 1014 |
| | | | | length = 2201 | |
| TGME49_chrXII | 3271212 | 3273508 | − | ID = TGME49_247330; | 1015 |
| | | | | length = 2296 | |
| TGME49_chrIV | 1179180 | 1180121 | − | ID = TGME49_318632; | 1016 |
| | | | | length = 941 | |
| TGME49_chrIX | 5904748 | 5906644 | − | ID = TGME49_306270; | 1017 |
| | | | | length = 1896 | |
| TGME49_chrVIII | 2882878 | 2885243 | + | ID = TGME49_233905; | 1018 |
| | | | | length = 2365 | |
| TGME49_chrIb | 319440 | 322320 | + | ID = TGME49_207830; | 1019 |
| | | | | length = 2880 | |
| TGME49_chrXI | 5276064 | 5279392 | + | ID = TGME49_316410; | 1020 |
| | | | | length = 3328 | |
| TGME49_chrVIIb | 4327835 | 4329892 | − | ID = TGME49_256965; | 1021 |
| | | | | length = 2057 | |
| TGME49_chrVIIa | 1383664 | 1387009 | − | ID = TGME49_205480; | 1022 |
| | | | | length = 3345 | |
| TGME49_chrX | 1183277 | 1184615 | − | ID = TGME49_226970; | 1023 |
| | | | | length = 1338 | |
| TGME49_chrV | 3011696 | 3013612 | − | ID = TGME49_283730; | 1024 |
| | | | | length = 1916 | |
| TGME49_chrX | 1531923 | 1533938 | + | ID = TGME49_226565; | 1025 |
| | | | | length = 2015 | |
| TGME49_chrX | 2248390 | 2249697 | + | ID = TGME49_225420; | 1026 |
| | | | | length = 1307 | |
| TGME49_chrVIII | 792105 | 796468 | + | ID = TGME49_230450; | 1027 |
| | | | | length = 4363 | |
| TGME49_chrIX | 3471473 | 3473649 | + | ID = TGME49_289830; | 1028 |
| | | | | length = 2176 | |
| TGME49_chrXI | 6086232 | 6089255 | − | ID = TGME49_216560; | 1029 |
| | | | | length = 3023 | |
| TGME49_chrVIII | 5980059 | 5982851 | − | ID = TGME49_269232; | 1030 |
| | | | | length = 2792 | |
| TGME49_chrVIII | 2023670 | 2028207 | + | ID = TGME49_232350; | 1031 |
| | | | | length = 4537 | |
| TGME49_chrXII | 3641104 | 3645165 | + | ID = TGME49_247970; | 1032 |
| | | | | length = 4061 | |
| TGME49_chrVIIb | 883251 | 885953 | − | ID = TGME49_262990; | 1033 |
| | | | | length = 2702 | |
| TGME49_chrIV | 2626644 | 2631162 | − | ID = TGME49_237880; | 1034 |
| | | | | length = 4518 | |
| TGME49_chrIa | 111397 | 113812 | + | ID = TGME49_293060; | 1035 |
| | | | | length = 2415 | |
| TGME49_chrVI | 428224 | 431908 | − | ID = TGME49_239030; | 1036 |
| | | | | length = 3684 | |
| TGME49_chrVIII | 2540409 | 2542122 | − | ID = TGME49_233245; | 1037 |
| | | | | length = 1713 | |
| TGME49_chrXI | 5728987 | 5730625 | + | ID = TGME49_217000; | 1038 |
| | | | | length = 1638 | |
| TGME49_chrXII | 4394111 | 4398427 | − | ID = TGME49_249240; | 1039 |
| | | | | length = 4316 | |
| TGME49_chrVIIa | 3976204 | 3977892 | − | ID = TGME49_201210; | 1040 |
| | | | | length = 1688 | |
| TGME49_chrIa | 135999 | 139033 | − | ID = TGME49_293170; | 1041 |
| | | | | length = 3034 | |
| TGME49_chrVIIb | 2446322 | 2450162 | − | ID = TGME49_260220; | 1042 |
| | | | | length = 3840 | |
| TGME49_chrXI | 4005065 | 4007884 | + | ID = TGME49_314330; | 1043 |
| | | | | length = 2819 | |
| TGME49_chrIV | 1721858 | 1725651 | + | ID = TGME49_211430; | 1044 |
| | | | | length = 3793 | |
| TGME49_chrVI | 1440256 | 1442654 | + | ID = TGME49_240780; | 1045 |
| | | | | length = 2398 | |
| TGME49_chrVIIb | 2309437 | 2311494 | + | ID = TGME49_260400; | 1046 |
| | | | | length = 2057 | |
| TGME49_chrVIII | 1057314 | 1061637 | + | ID = TGME49_230850; | 1047 |
| | | | | length = 4323 | |
| TGME49_chrVIIb | 3104595 | 3106681 | + | ID = TGME49_258880; | 1048 |
| | | | | length = 2086 | |
| TGME49_chrIX | 3553898 | 3558050 | + | ID = TGME49_289970; | 1049 |
| | | | | length = 4152 | |
| TGME49_chrVIIb | 747456 | 750990 | − | ID = TGME49_263180; | 1050 |
| | | | | length = 3534 | |
| TGME49_chrIb | 508499 | 510809 | + | ID = TGME49_208010; | 1051 |
| | | | | length = 2310 | |
| TGME49_chrVIII | 3403939 | 3407719 | − | ID = TGME49_273560; | 1052 |
| | | | | length = 3780 | |
| TGME49_chrVIIb | 2328258 | 2331030 | − | ID = TGME49_260380; | 1053 |
| | | | | length = 2772 | |
| TGME49_chrIX | 5447569 | 5449517 | + | ID = TGME49_305520; | 1054 |
| | | | | length = 1948 | |
| TGME49_chrXII | 4540898 | 4544602 | − | ID = TGME49_249440; | 1055 |
| | | | | length = 3704 | |
| TGME49_chrIX | 1180662 | 1185700 | − | ID = TGME49_266380; | 1056 |
| | | | | length = 5038 | |
| TGME49_chrII | 741431 | 743464 | − | ID = TGME49_221990; | 1057 |
| | | | | length = 2033 | |
| TGME49_chrIX | 3302423 | 3304195 | − | ID = TGME49_289550; | 1058 |
| | | | | length = 1772 | |
| TGME49_chrXII | 5163344 | 5167027 | − | ID = TGME49_250740; | 1059 |
| | | | | length = 3683 | |
| TGME49_chrIb | 1364877 | 1366149 | − | ID = TGME49_209620; | 1060 |
| | | | | length = 1272 | |
| TGME49_chrVIIb | 858403 | 860259 | + | ID = TGME49_263020; | 1061 |
| | | | | length = 1856 | |
| TGME49_chrVI | 2080861 | 2082634 | − | ID = TGME49_242580; | 1062 |
| | | | | length = 1773 | |
| TGME49_chrXI | 5126509 | 5128203 | + | ID = TGME49_316100; | 1063 |
| | | | | length = 1694 | |
| TGME49_chrVIIb | 2142072 | 2145018 | + | ID = TGME49_260580; | 1064 |
| | | | | length = 2946 | |
| TGME49_chrXII | 2685283 | 2687256 | + | ID = TGME49_246150; | 1065 |
| | | | | length = 1973 | |
| TGME49_chrVI | 110307 | 112590 | + | ID = TGME49_238190; | 1066 |
| | | | | length = 2283 | |
| TGME49_chrVIII | 2837478 | 2839433 | − | ID = TGME49_233830; | 1067 |
| | | | | length = 1955 | |
| TGME49_chrX | 867923 | 871948 | + | ID = TGME49_227615; | 1068 |
| | | | | length = 4025 | |
| TGME49_chrIX | 5071223 | 5073998 | − | ID = TGME49_304880; | 1069 |
| | | | | length = 2775 | |
| TGME49_chrVIII | 2090890 | 2095794 | − | ID = TGME49_232430; | 1070 |
| | | | | length = 4904 | |
| TGME49_chrVIIb | 2781631 | 2784134 | − | ID = TGME49_259550; | 1071 |
| | | | | length = 2503 | |
| TGME49_chrX | 193904 | 195964 | + | ID = TGME49_228690; | 1072 |
| | | | | length = 2060 | |
| TGME49_chrIa | 1059712 | 1062031 | − | ID = TGME49_294670; | 1073 |
| | | | | length = 2319 | |
| TGME49_chrVIIa | 3890344 | 3893030 | + | ID = TGME49_201520; | 1074 |
| | | | | length = 2686 | |
| TGME49_chrIX | 5214676 | 5217074 | + | ID = TGME49_305100; | 1075 |
| | | | | length = 2398 | |
| TGME49_chrVIIa | 899877 | 902361 | + | ID = TGME49_206520; | 1076 |
| | | | | length = 2484 | |
| TGME49_chrIX | 3539347 | 3541778 | − | ID = TGME49_289940; | 1077 |
| | | | | length = 2431 | |
| TGME49_chrVIIb | 4528811 | 4530770 | − | ID = TGME49_256080; | 1078 |
| | | | | length = 1959 | |
| TGME49_chrVIII | 110877 | 112644 | − | ID = TGME49_229250; | 1079 |
| | | | | length = 1767 | |
| TGME49_chrXI | 2296765 | 2300817 | + | ID = TGME49_311810; | 1080 |
| | | | | length = 4052 | |
| TGME49_chrXI | 2742958 | 2745345 | − | ID = TGME49_312500; | 1081 |
| | | | | length = 2387 | |
| TGME49_chrV | 417057 | 419288 | + | ID = TGME49_220500; | 1082 |
| | | | | length = 2231 | |
| TGME49_chrVIIb | 2057525 | 2060480 | + | ID = TGME49_260680; | 1083 |
| | | | | length = 2955 | |
| TGME49_chrIb | 746521 | 750200 | + | ID = TGME49_208530; | 1084 |
| | | | | length = 3679 | |
| TGME49_chrX | 5474968 | 5478116 | − | ID = TGME49_236650; | 1085 |
| | | | | length = 3148 | |
| TGME49_chrX | 5074937 | 5076733 | − | ID = TGME49_235710; | 1086 |
| | | | | length = 1796 | |
| TGME49_chrIb | 1282077 | 1283563 | + | ID = TGME49_209510; | 1087 |
| | | | | length = 1486 | |
| TGME49_chrIa | 617372 | 619206 | + | ID = TGME49_293870; | 1088 |
| | | | | length = 1834 | |
| TGME49_chrX | 5248755 | 5250532 | + | ID = TGME49_236040; | 1089 |
| | | | | length = 1777 | |
| TGME49_chrXII | 5288046 | 5290319 | − | ID = TGME49_250860; | 1090 |
| | | | | length = 2273 | |
| TGME49_chrIX | 2720225 | 2724939 | + | ID = TGME49_288750; | 1091 |
| | | | | length = 4714 | |
| TGME49_chrIX | 544999 | 547818 | + | ID = TGME49_267585; | 1092 |
| | | | | length = 2819 | |
| TGME49_chrVIIa | 1068023 | 1069996 | + | ID = TGME49_206310; | 1093 |
| | | | | length = 1973 | |
| TGME49_chrVI | 830758 | 833127 | + | ID = TGME49_239690; | 1094 |
| | | | | length = 2369 | |
| TGME49_chrIX | 2265055 | 2268965 | − | ID = TGME49_287960; | 1095 |
| | | | | length = 3910 | |
| TGME49_chrXI | 6087183 | 6089255 | − | ID = TGME49_216550; | 1096 |
| | | | | length = 2072 | |
| TGME49_chrIV | 2578257 | 2581065 | + | ID = TGME49_237840; | 1097 |
| | | | | length = 2808 | |
| TGME49_chrVIII | 991782 | 995395 | − | ID = TGME49_230705; | 1098 |
| | | | | length = 3613 | |
| TGME49_chrII | 1884186 | 1886034 | + | ID = TGME49_297643; | 1099 |
| | | | | length = 1848 | |
| TGME49_chrXI | 2312050 | 2313267 | + | ID = TGME49_311830; | 1100 |
| | | | | length = 1217 | |
| TGME49_chrII | 1254506 | 1256879 | + | ID = TGME49_222850; | 1101 |
| | | | | length = 2373 | |
| TGME49_chrII | 766484 | 768700 | + | ID = TGME49_222030; | 1102 |
| | | | | length = 2216 | |
| TGME49_chrIX | 1961088 | 1961769 | + | ID = TGME49_264850; | 1103 |
| | | | | length = 681 | |
| TGME49_chrVIII | 5344269 | 5348104 | − | ID = TGME49_270200; | 1104 |
| | | | | length = 3835 | |
| TGME49_chrVI | 1380775 | 1382606 | − | ID = TGME49_240660; | 1105 |
| | | | | length = 1831 | |
| TGME49_chrVIIb | 1804716 | 1807943 | + | ID = TGME49_261240; | 1106 |
| | | | | length = 3227 | |
| TGME49_chrX | 3382286 | 3386675 | + | ID = TGME49_224020; | 1107 |
| | | | | length = 4389 | |
| TGME49_chrXI | 1908342 | 1912400 | − | ID = TGME49_311240; | 1108 |
| | | | | length = 4058 | |
| TGME49_chrVIIa | 4438610 | 4442652 | + | ID = TGME49_282200; | 1109 |
| | | | | length = 4042 | |
| TGME49_chrIX | 5844712 | 5848045 | + | ID = TGME49_306230; | 1110 |
| | | | | length = 3333 | |
| TGME49_chrXI | 1502815 | 1504291 | − | ID = TGME49_310650; | 1111 |
| | | | | length = 1476 | |
| TGME49_chrXI | 1970355 | 1973898 | + | ID = TGME49_311320; | 1112 |
| | | | | length = 3543 | |
| TGME49_chrX | 2305695 | 2308125 | + | ID = TGME49_225330; | 1113 |
| | | | | length = 2430 | |
| TGME49_chrVIIb | 1736562 | 1738490 | − | ID = TGME49_261460; | 1114 |
| | | | | length = 1928 | |
| TGME49_chrXI | 2288840 | 2290926 | + | ID = TGME49_311790; | 1115 |
| | | | | length = 2086 | |
| TGME49_chrX | 5000703 | 5002026 | + | ID = TGME49_235635; | 1116 |
| | | | | length = 1323 | |
| TGME49_chrXI | 3051809 | 3053089 | + | ID = TGME49_313025; | 1117 |
| | | | | length = 1280 | |
| TGME49_chrV | 1226819 | 1229241 | − | ID = TGME49_213670; | 1118 |
| | | | | length = 2422 | |
| TGME49_chrVI | 1846930 | 1848152 | + | ID = TGME49_242040; | 1119 |
| | | | | length = 1222 | |
| TGME49_chrXI | 5127101 | 5129194 | − | ID = TGME49_316090; | 1120 |
| | | | | length = 2093 | |
| TGME49_chrVIIa | 489530 | 492510 | + | ID = TGME49_280370; | 1121 |
| | | | | length = 2980 | |
| TGME49_chrVIII | 2733118 | 2736128 | − | ID = TGME49_233702; | 1122 |
| | | | | length = 3010 | |
| TGME49_chrXI | 6398771 | 6401970 | − | ID = TGME49_216120; | 1123 |
| | | | | length = 3199 | |
| TGME49_chrXI | 530082 | 533588 | − | ID = TGME49_309160; | 1124 |
| | | | | length = 3506 | |
| TGME49_chrVIII | 428448 | 432358 | − | ID = TGME49_229750; | 1125 |
| | | | | length = 3910 | |
| TGME49_chrII | 2077832 | 2082637 | + | ID = TGME49_297850; | 1126 |
| | | | | length = 4805 | |
| TGME49_chrIV | 2088470 | 2090595 | − | ID = TGME49_210770; | 1127 |
| | | | | length = 2125 | |
| TGME49_chrIV | 1112801 | 1114995 | − | ID = TGME49_318742; | 1128 |
| | | | | length = 2194 | |
| TGME49_chrVIII | 2694512 | 2696420 | + | ID = TGME49_233530; | 1129 |
| | | | | length = 1908 | |
| TGME49_chrIb | 1392188 | 1394786 | − | ID = TGME49_209650; | 1130 |
| | | | | length = 2598 | |
| TGME49_chrV | 469162 | 470010 | + | ID = TGME49_220580; | 1131 |
| | | | | length = 848 | |
| TGME49_chrIX | 2034098 | 2036991 | + | ID = TGME49_264770; | 1132 |
| | | | | length = 2893 | |
| TGME49_chrVIII | 2855966 | 2857966 | − | ID = TGME49_233850; | 1133 |
| | | | | length = 2000 | |
| TGME49_chrXI | 1595350 | 1597733 | + | ID = TGME49_310798; | 1134 |
| | | | | length = 2383 | |
| TGME49_chrIX | 5541500 | 5543417 | + | ID = TGME49_305750; | 1135 |
| | | | | length = 1917 | |
| TGME49_chrIX | 4142523 | 4144608 | + | ID = TGME49_291130; | 1136 |
| | | | | length = 2085 | |
| TGME49_chrVIIb | 790933 | 792672 | + | ID = TGME49_263110; | 1137 |
| | | | | length = 1739 | |
| TGME49_chrVIIa | 2210477 | 2211546 | − | ID = TGME49_203815; | 1138 |
| | | | | length = 1069 | |
| TGME49_chrVIII | 4063764 | 4065564 | + | ID = TGME49_272340; | 1139 |
| | | | | length = 1800 | |
| TGME49_chrIX | 862193 | 864770 | + | ID = TGME49_266970; | 1140 |
| | | | | length = 2577 | |
| TGME49_chrX | 6005350 | 6009045 | − | ID = TGME49_237585; | 1141 |
| | | | | length = 3695 | |
| TGME49_chrIV | 812682 | 816552 | − | ID = TGME49_319650; | 1142 |
| | | | | length = 3870 | |
| TGME49_chrIV | 1351025 | 1353144 | + | ID = TGME49_318410; | 1143 |
| | | | | length = 2119 | |
| TGME49_chrVIIb | 628035 | 632181 | + | ID = TGME49_263323; | 1144 |
| | | | | length = 4146 | |
| TGME49_chrII | 464340 | 467546 | + | ID = TGME49_221590; | 1145 |
| | | | | length = 3206 | |
| TGME49_chrVIIa | 2353189 | 2355787 | − | ID = TGME49_203682; | 1146 |
| | | | | length = 2598 | |
| TGME49_chrIa | 1365331 | 1367979 | + | ID = TGME49_295060; | 1147 |
| | | | | length = 2648 | |
| TGME49_chrXI | 3086379 | 3090390 | + | ID = TGME49_313090; | 1148 |
| | | | | length = 4011 | |
| TGME49_chrII | 639786 | 644118 | + | ID = TGME49_221870; | 1149 |
| | | | | length = 4332 | |
| TGME49_chrIV | 1283541 | 1287463 | − | ID = TGME49_318490; | 1150 |
| | | | | length = 3922 | |
| TGME49_chrX | 2544948 | 2548532 | − | ID = TGME49_225070; | 1151 |
| | | | | length = 3584 | |
| TGME49_chrVIIb | 541912 | 545460 | − | ID = TGME49_263470; | 1152 |
| | | | | length = 3548 | |
| TGME49_chrIX | 3591560 | 3593074 | − | ID = TGME49_290020; | 1153 |
| | | | | length = 1514 | |
| TGME49_chrX | 3928163 | 3932517 | − | ID = TGME49_212310; | 1154 |
| | | | | length = 4354 | |
| TGME49_chrVIIb | 4701292 | 4702972 | − | ID = TGME49_255720; | 1155 |
| | | | | length = 1680 | |
| TGME49_chrVIII | 5506593 | 5510411 | + | ID = TGME49_269940; | 1156 |
| | | | | length = 3818 | |
| TGME49_chrIV | 592700 | 595047 | + | ID = TGME49_320005; | 1157 |
| | | | | length = 2347 | |
| TGME49_chrVIIb | 4519629 | 4521475 | − | ID = TGME49_256100; | 1158 |
| | | | | length = 1846 | |
| TGME49_chrIa | 1848533 | 1850781 | − | ID = TGME49_295320; | 1159 |
| | | | | length = 2248 | |
| TGME49_chrX | 3761112 | 3762929 | − | ID = TGME49_223530; | 1160 |
| | | | | length = 1817 | |
| TGME49_chrVIII | 3839250 | 3840966 | − | ID = TGME49_272620; | 1161 |
| | | | | length = 1716 | |
| TGME49_chrX | 5533324 | 5536592 | + | ID = TGME49_236850; | 1162 |
| | | | | length = 3268 | |
| TGME49_chrX | 5233291 | 5235370 | − | ID = TGME49_235990; | 1163 |
| | | | | length = 2079 | |
| TGME49_chrIb | 1816564 | 1818369 | + | ID = TGME49_321430; | 1164 |
| | | | | length = 1805 | |
| TGME49_chrXI | 3327009 | 3329669 | + | ID = TGME49_313380; | 1165 |
| | | | | length = 2660 | |
| TGME49_chrIX | 3363488 | 3365112 | + | ID = TGME49_289650; | 1166 |
| | | | | length = 1624 | |
| TGME49_chrV | 287641 | 288269 | − | ID = TGME49_220310; | 1167 |
| | | | | length = 628 | |
| TGME49_chrII | 2077832 | 2079808 | + | ID = TGME49_297845; | 1168 |
| | | | | length = 1976 | |
| TGME49_chrVIIb | 3657735 | 3659476 | + | ID = TGME49_258000; | 1169 |
| | | | | length = 1741 | |
| TGME49_chrIX | 2039013 | 2043206 | + | ID = TGME49_264760; | 1170 |
| | | | | length = 4193 | |
| TGME49_chrXII | 6988840 | 6990981 | + | ID = TGME49_276810; | 1171 |
| | | | | length = 2141 | |
| TGME49_chrIX | 3612365 | 3615024 | − | ID = TGME49_290160; | 1172 |
| | | | | length = 2659 | |
| TGME49_chrIa | 1259545 | 1263126 | − | ID = TGME49_294898; | 1173 |
| | | | | length = 3581 | |
| TGME49_chrXI | 6165715 | 6166848 | + | ID = TGME49_216415; | 1174 |
| | | | | length = 1133 | |
| TGME49_chrIX | 3511489 | 3512915 | − | ID = TGME49_289890; | 1175 |
| | | | | length = 1426 | |
| TGME49_chrIX | 1748283 | 1752414 | + | ID = TGME49_265130; | 1176 |
| | | | | length = 4131 | |
| TGME49_chrIV | 1015278 | 1019035 | + | ID = TGME49_319340; | 1177 |
| | | | | length = 3757 | |
| TGME49_chrVI | 905412 | 908079 | − | ID = TGME49_239770; | 1178 |
| | | | | length = 2667 | |
| TGME49_chrXI | 570018 | 574932 | − | ID = TGME49_309220; | 1179 |
| | | | | length = 4914 | |
| TGME49_chrVIII | 2228983 | 2231436 | + | ID = TGME49_232690; | 1180 |
| | | | | length = 2453 | |
| TGME49_chrXI | 3756375 | 3758818 | + | ID = TGME49_313870; | 1181 |
| | | | | length = 2443 | |
| TGME49_chrXI | 1683330 | 1684845 | − | ID = TGME49_310940; | 1182 |
| | | | | length = 1515 | |
| TGME49_chrIb | 802516 | 804677 | − | ID = TGME49_208580; | 1183 |
| | | | | length = 2161 | |
| TGME49_chrV | 3073350 | 3075701 | − | ID = TGME49_283580; | 1184 |
| | | | | length = 2351 | |
| TGME49_chrIX | 2433199 | 2434876 | − | ID = TGME49_288270; | 1185 |
| | | | | length = 1677 | |
| TGME49_chrVIII | 5247499 | 5249101 | + | ID = TGME49_270360; | 1186 |
| | | | | length = 1602 | |
| TGME49_chrIa | 538347 | 541224 | + | ID = TGME49_293740; | 1187 |
| | | | | length = 2877 | |
| TGME49_chrXI | 1034402 | 1037980 | − | ID = TGME49_310055; | 1188 |
| | | | | length = 3578 | |
| TGME49_chrVIII | 4273765 | 4277392 | + | ID = TGME49_271930; | 1189 |
| | | | | length = 3627 | |
| TGME49_chrX | 3942210 | 3943072 | + | ID = TGME49_212280; | 1190 |
| | | | | length = 862 | |
| TGME49_chrXI | 6427213 | 6429335 | − | ID = TGME49_216060; | 1191 |
| | | | | length = 2122 | |
| TGME49_chrVIII | 5776984 | 5780816 | − | ID = TGME49_269470; | 1192 |
| | | | | length = 3832 | |
| TGME49_chrVI | 1334066 | 1335457 | + | ID = TGME49_240600; | 1193 |
| | | | | length = 1391 | |
| TGME49_chrVIIa | 4234959 | 4237402 | + | ID = TGME49_281640; | 1194 |
| | | | | length = 2443 | |
| TGME49_chrV | 1240541 | 1242474 | + | ID = TGME49_213700; | 1195 |
| | | | | length = 1933 | |
| TGME49_chrX | 1079054 | 1081448 | − | ID = TGME49_227140; | 1196 |
| | | | | length = 2394 | |
| TGME49_chrXII | 2362341 | 2363912 | − | ID = TGME49_245540; | 1197 |
| | | | | length = 1571 | |
| TGME49_chrVIIb | 4735950 | 4738492 | − | ID = TGME49_255690; | 1198 |
| | | | | length = 2542 | |
| TGME49_chrVIIb | 215535 | 217628 | − | ID = TGME49_264060; | 1199 |
| | | | | length = 2093 | |
| TGME49_chrXI | 3767685 | 3770308 | + | ID = TGME49_313880; | 1200 |
| | | | | length = 2623 | |
| TGME49_chrVIIb | 382525 | 387001 | − | ID = TGME49_263710; | 1201 |
| | | | | length = 4476 | |
| TGME49_chrVIII | 3764146 | 3769011 | − | ID = TGME49_272730; | 1202 |
| | | | | length = 4865 | |
| TGME49_chrVIII | 2518242 | 2523170 | + | ID = TGME49_233230; | 1203 |
| | | | | length = 4928 | |
| TGME49_chrX | 2512981 | 2514745 | + | ID = TGME49_225105; | 1204 |
| | | | | length = 1764 | |
| TGME49_chrX | 1747337 | 1749496 | + | ID = TGME49_226270; | 1205 |
| | | | | length = 2159 | |
| TGME49_chrXI | 2556450 | 2561384 | + | ID = TGME49_312280; | 1206 |
| | | | | length = 4934 | |
| TGME49_chrXI | 1508511 | 1511130 | + | ID = TGME49_310670; | 1207 |
| | | | | length = 2619 | |
| TGME49_chrX | 1357073 | 1358633 | − | ID = TGME49_226800; | 1208 |
| | | | | length = 1560 | |
| TGME49_chrXII | 1856018 | 1859951 | − | ID = TGME49_217460; | 1209 |
| | | | | length = 3933 | |
| TGME49_chrVI | 1032113 | 1035230 | + | ID = TGME49_240060; | 1210 |
| | | | | length = 3117 | |
| TGME49_chrVIIb | 4750240 | 4753174 | − | ID = TGME49_255660; | 1211 |
| | | | | length = 2934 | |
| TGME49_chrIV | 2488322 | 2491013 | + | ID = TGME49_301450; | 1212 |
| | | | | length = 2691 | |
| TGME49_chrVIIa | 2399437 | 2401178 | + | ID = TGME49_203610; | 1213 |
| | | | | length = 1741 | |
| TGME49_chrIV | 717427 | 720591 | − | ID = TGME49_319870; | 1214 |
| | | | | length = 3164 | |
| TGME49_chrIX | 633939 | 636510 | + | ID = TGME49_267450; | 1215 |
| | | | | length = 2571 | |
| TGME49_chrII | 1064277 | 1067130 | − | ID = TGME49_222350; | 1216 |
| | | | | length = 2853 | |
| TGME49_chrX | 6587512 | 6589629 | − | ID = TGME49_214910; | 1217 |
| | | | | length = 2117 | |
| TGME49_chrVIIb | 1100273 | 1103123 | + | ID = TGME49_262650; | 1218 |
| | | | | length = 2850 | |
| TGME49_chrX | 4019693 | 4021700 | − | ID = TGME49_212150; | 1219 |
| | | | | length = 2007 | |
| TGME49_chrIV | 910057 | 912578 | + | ID = TGME49_319560; | 1220 |
| | | | | length = 2521 | |
| TGME49_chrXI | 5954623 | 5956672 | + | ID = TGME49_216680; | 1221 |
| | | | | length = 2049 | |
| TGME49_chrVIIb | 936733 | 939153 | + | ID = TGME49_262900; | 1222 |
| | | | | length = 2420 | |
| TGME49_chrIX | 2624481 | 2626169 | + | ID = TGME49_288580; | 1223 |
| | | | | length = 1688 | |
| TGME49_chrX | 6117985 | 6120211 | + | ID = TGME49_214220; | 1224 |
| | | | | length = 2226 | |
| TGME49_chrIX | 4670575 | 4671677 | − | ID = TGME49_292310; | 1225 |
| | | | | length = 1102 | |
| TGME49_chrVIIa | 1586701 | 1588039 | + | ID = TGME49_205140; | 1226 |
| | | | | length = 1338 | |
| TGME49_chrV | 343813 | 347336 | − | ID = TGME49_220380; | 1227 |
| | | | | length = 3523 | |
| TGME49_chrVIIa | 2824543 | 2828105 | − | ID = TGME49_203060; | 1228 |
| | | | | length = 3562 | |
| TGME49_chrVI | 2842072 | 2843767 | − | ID = TGME49_243750; | 1229 |
| | | | | length = 1695 | |
| TGME49_chrXII | 5901664 | 5905896 | − | ID = TGME49_278757; | 1230 |
| | | | | length = 4232 | |
| TGME49_chrIX | 864169 | 866128 | − | ID = TGME49_266980; | 1231 |
| | | | | length = 1959 | |
| TGME49_chrV | 405382 | 408887 | − | ID = TGME49_220470; | 1232 |
| | | | | length = 3505 | |
| TGME49_chrVIIb | 2512076 | 2514420 | − | ID = TGME49_260140; | 1233 |
| | | | | length = 2344 | |
| TGME49_chrVI | 2098336 | 2100722 | − | ID = TGME49_242600; | 1234 |
| | | | | length = 2386 | |
| TGME49_chrX | 1508884 | 1511053 | − | ID = TGME49_226610; | 1235 |
| | | | | length = 2169 | |
| TGME49_chrVIIa | 2043666 | 2046086 | + | ID = TGME49_204020; | 1236 |
| | | | | length = 2420 | |
| TGME49_chrVIIb | 1030528 | 1035441 | + | ID = TGME49_262760; | 1237 |
| | | | | length = 4913 | |
| TGME49_chrIa | 906891 | 908355 | − | ID = TGME49_294420; | 1238 |
| | | | | length = 1464 | |
| TGME49_chrIX | 3949096 | 3950443 | − | ID = TGME49_290925; | 1239 |
| | | | | length = 1347 | |
| TGME49_chrV | 2021160 | 2025024 | + | ID = TGME49_286060; | 1240 |
| | | | | length = 3864 | |
| TGME49_chrXI | 3334286 | 3335654 | − | ID = TGME49_313385; | 1241 |
| | | | | length = 1368 | |
| TGME49_chrIX | 4592337 | 4595459 | − | ID = TGME49_292170; | 1242 |
| | | | | length = 3122 | |
| TGME49_chrXII | 883327 | 885042 | − | ID = TGME49_219530; | 1243 |
| | | | | length = 1715 | |
| TGME49_chrVIIa | 646040 | 650529 | + | ID = TGME49_304720; | 1244 |
| | | | | length = 4489 | |
| TGME49_chrXII | 2582968 | 2583778 | + | ID = TGME49_245995; | 1245 |
| | | | | length = 810 | |
| TGME49_chrVIIa | 1492534 | 1497097 | + | ID = TGME49_205280; | 1246 |
| | | | | length = 4563 | |
| TGME49_chrVIII | 6529292 | 6532178 | − | ID = TGME49_268340; | 1247 |
| | | | | length = 2886 | |
| TGME49_chrX | 1775473 | 1776642 | − | ID = TGME49_226240; | 1248 |
| | | | | length = 1169 | |
| TGME49_chrX | 3282886 | 3287547 | + | ID = TGME49_224160; | 1249 |
| | | | | length = 4661 | |
| TGME49_chrXI | 6397920 | 6400037 | + | ID = TGME49_216090; | 1250 |
| | | | | length = 2117 | |
| TGME49_chrVI | 2706529 | 2711143 | + | ID = TGME49_243545; | 1251 |
| | | | | length = 4614 | |
| TGME49_chrXI | 416696 | 419057 | − | ID = TGME49_308980; | 1252 |
| | | | | length = 2361 | |
| TGME49_chrIb | 1342257 | 1346867 | + | ID = TGME49_209580; | 1253 |
| | | | | length = 4610 | |
| TGME49_chrX | 5509755 | 5511547 | − | ID = TGME49_236790; | 1254 |
| | | | | length = 1792 | |
| TGME49_chrXI | 463158 | 465197 | − | ID = TGME49_309050; | 1255 |
| | | | | length = 2039 | |
| TGME49_chrVI | 256977 | 258317 | − | ID = TGME49_238505; | 1256 |
| | | | | length = 1340 | |
| TGME49_chrX | 6916813 | 6920734 | − | ID = TGME49_215343; | 1257 |
| | | | | length = 3921 | |
| TGME49_chrXII | 4789347 | 4790800 | + | ID = TGME49_249770; | 1258 |
| | | | | length = 1453 | |
| TGME49_chrXII | 2221509 | 2225506 | − | ID = TGME49_217910; | 1259 |
| | | | | length = 3997 | |
| TGME49_chrXII | 635109 | 638817 | − | ID = TGME49_219810; | 1260 |
| | | | | length = 3708 | |
| TGME49_chrX | 996966 | 1001699 | − | ID = TGME49_227360; | 1261 |
| | | | | length = 4733 | |
| TGME49_chrXII | 4759357 | 4761502 | − | ID = TGME49_249720; | 1262 |
| | | | | length = 2145 | |
| TGME49_chrVIII | 880481 | 882435 | − | ID = TGME49_230580; | 1263 |
| | | | | length = 1954 | |
| TGME49_chrVIIa | 2393820 | 2395507 | − | ID = TGME49_203630; | 1264 |
| | | | | length = 1687 | |
| TGME49_chrX | 3969673 | 3972540 | − | ID = TGME49_212230; | 1265 |
| | | | | length = 2867 | |
| TGME49_chrVIIa | 3730718 | 3732764 | + | ID = TGME49_201870; | 1266 |
| | | | | length = 2046 | |
| TGME49_chrVIII | 1001169 | 1003387 | + | ID = TGME49_230820; | 1267 |
| | | | | length = 2218 | |
| TGME49_chrIX | 4600674 | 4601980 | − | ID = TGME49_292190; | 1268 |
| | | | | length = 1306 | |
| TGME49_chrIV | 1318793 | 1321000 | − | ID = TGME49_318460; | 1269 |
| | | | | length = 2207 | |
| TGME49_chrXII | 5008645 | 5010570 | − | ID = TGME49_250050; | 1270 |
| | | | | length = 1925 | |
| TGME49_chrVIII | 2821108 | 2824516 | + | ID = TGME49_233820; | 1271 |
| | | | | length = 3408 | |
| TGME49_chrVIIa | 945242 | 947003 | + | ID = TGME49_206470; | 1272 |
| | | | | length = 1761 | |
| TGME49_chrVIIa | 618512 | 620275 | − | ID = TGME49_304670; | 1273 |
| | | | | length = 1763 | |
| TGME49_chrXI | 5431083 | 5433154 | − | ID = TGME49_316610; | 1274 |
| | | | | length = 2071 | |
| TGME49_chrXI | 3894915 | 3897284 | + | ID = TGME49_314042; | 1275 |
| | | | | length = 2369 | |
| TGME49_chrVI | 613785 | 617334 | − | ID = TGME49_239885; | 1276 |
| | | | | length = 3549 | |
| TGME49_chrXII | 6080645 | 6082084 | + | ID = TGME49_278470; | 1277 |
| | | | | length = 1439 | |
| TGME49_chrXII | 4530057 | 4533822 | − | ID = TGME49_249425; | 1278 |
| | | | | length = 3765 | |
| TGME49_chrVIIb | 4983552 | 4986683 | − | ID = TGME49_255240; | 1279 |
| | | | | length = 3131 | |
| TGME49_chrIX | 6162509 | 6166258 | + | ID = TGME49_306540; | 1280 |
| | | | | length = 3749 | |
| TGME49_chrVIII | 1191790 | 1195369 | − | ID = TGME49_231000; | 1281 |
| | | | | length = 3579 | |
| TGME49_chrVIIb | 2539671 | 2543923 | − | ID = TGME49_260000; | 1282 |
| | | | | length = 4252 | |
| TGME49_chrVIIb | 849810 | 852648 | − | ID = TGME49_263060; | 1283 |
| | | | | length = 2838 | |
| TGME49_chrVIIb | 648112 | 651155 | − | ID = TGME49_263300; | 1284 |
| | | | | length = 3043 | |
| TGME49_chrIX | 3384763 | 3389725 | + | ID = TGME49_289710; | 1285 |
| | | | | length = 4962 | |
| TGME49_chrIV | 1667704 | 1671687 | − | ID = TGME49_211610; | 1286 |
| | | | | length = 3983 | |
| TGME49_chrVI | 3370670 | 3372867 | − | ID = TGME49_244570; | 1287 |
| | | | | length = 2197 | |
| TGME49_chrIa | 1384531 | 1387176 | − | ID = TGME49_295070; | 1288 |
| | | | | length = 2645 | |
| TGME49_chrII | 1380736 | 1382666 | + | ID = TGME49_223045; | 1289 |
| | | | | length = 1930 | |
| TGME49_chrVIIa | 4051293 | 4053186 | − | ID = TGME49_281370; | 1290 |
| | | | | length = 1893 | |
| TGME49_chrX | 3955985 | 3958323 | + | ID = TGME49_212250; | 1291 |
| | | | | length = 2338 | |
| TGME49_chrVI | 320087 | 321893 | − | ID = TGME49_238930; | 1292 |
| | | | | length = 1806 | |
| TGME49_chrV | 1821412 | 1825437 | + | ID = TGME49_286450; | 1293 |
| | | | | length = 4025 | |
| TGME49_chrX | 4558668 | 4561661 | − | ID = TGME49_234950; | 1294 |
| | | | | length = 2993 | |
| TGME49_chrIX | 1512833 | 1516330 | + | ID = TGME49_265510; | 1295 |
| | | | | length = 3497 | |
| TGME49_chrVIII | 6794045 | 6796697 | + | ID = TGME49_200320; | 1296 |
| | | | | length = 2652 | |
| TGME49_chrX | 6978264 | 6981039 | + | ID = TGME49_215490; | 1297 |
| | | | | length = 2775 | |
| TGME49_chrX | 2174211 | 2176205 | − | ID = TGME49_225540; | 1298 |
| | | | | length = 1994 | |
| TGME49_chrVIII | 1298224 | 1302758 | + | ID = TGME49_231180; | 1299 |
| | | | | length = 4534 | |
| TGME49_chrII | 2142882 | 2147668 | − | ID = TGME49_297960; | 1300 |
| | | | | length = 4786 | |
| TGME49_chrXII | 3433690 | 3435922 | + | ID = TGME49_247600; | 1301 |
| | | | | length = 2232 | |
| TGME49_chrVIIa | 2317501 | 2320428 | − | ID = TGME49_203700; | 1302 |
| | | | | length = 2927 | |
| TGME49_chrXII | 6674607 | 6677822 | − | ID = TGME49_277490; | 1303 |
| | | | | length = 3215 | |
| TGME49_chrXI | 4233721 | 4237966 | − | ID = TGME49_314700; | 1304 |
| | | | | length = 4245 | |
| TGME49_chrIV | 425592 | 427430 | − | ID = TGME49_320230; | 1305 |
| | | | | length = 1838 | |
| TGME49_chrVIIa | 2514862 | 2517330 | − | ID = TGME49_203420; | 1306 |
| | | | | length = 2468 | |
| TGME49_chrIX | 4579461 | 4584034 | − | ID = TGME49_292140; | 1307 |
| | | | | length = 4573 | |
| TGME49_chrXII | 5609336 | 5612206 | + | ID = TGME49_251850; | 1308 |
| | | | | length = 2870 | |
| TGME49_chrVIIb | 2348892 | 2349464 | + | ID = TGME49_260330; | 1309 |
| | | | | length = 572 | |
| TGME49_chrVI | 1829041 | 1831040 | − | ID = TGME49_242010; | 1310 |
| | | | | length = 1999 | |
| TGME49_chrVIII | 2298908 | 2301088 | + | ID = TGME49_232970; | 1311 |
| | | | | length = 2180 | |
| TGME49_chrVIIb | 5051588 | 5052399 | + | ID = TGME49_255175; | 1312 |
| | | | | length = 811 | |
| TGME49_chrX | 1835017 | 1837256 | − | ID = TGME49_226068; | 1313 |
| | | | | length = 2239 | |
| TGME49_chrXI | 3842477 | 3844120 | − | ID = TGME49_313960; | 1314 |
| | | | | length = 1643 | |
| TGME49_chrVIIb | 821627 | 824086 | − | ID = TGME49_263085; | 1315 |
| | | | | length = 2459 | |
| TGME49_chrIV | 250795 | 252483 | + | ID = TGME49_320570; | 1316 |
| | | | | length = 1688 | |
| TGME49_chrX | 2164468 | 2166075 | − | ID = TGME49_225555; | 1317 |
| | | | | length = 1607 | |
| TGME49_chrX | 1105074 | 1106948 | − | ID = TGME49_227070; | 1318 |
| | | | | length = 1874 | |
| TGME49_chrVIIb | 1404269 | 1407193 | + | ID = TGME49_262050; | 1319 |
| | | | | length = 2924 | |
| TGME49_chrIX | 599004 | 602300 | + | ID = TGME49_267520; | 1320 |
| | | | | length = 3296 | |
| TGME49_chrVIIa | 3270410 | 3274311 | − | ID = TGME49_202510; | 1321 |
| | | | | length = 3901 | |
| TGME49_chrVIII | 3516693 | 3521323 | + | ID = TGME49_273410; | 1322 |
| | | | | length = 4630 | |
| TGME49_chrV | 2626675 | 2628503 | + | ID = TGME49_284670; | 1323 |
| | | | | length = 1828 | |
| TGME49_chrX | 7344849 | 7347942 | − | ID = TGME49_207020; | 1324 |
| | | | | length = 3093 | |
| TGME49_chrVIIa | 1741358 | 1745785 | + | ID = TGME49_204500; | 1325 |
| | | | | length = 4427 | |
| TGME49_chrXI | 4646243 | 4648666 | − | ID = TGME49_315310; | 1326 |
| | | | | length = 2423 | |
| TGME49_chrVIIb | 4281282 | 4283353 | + | ID = TGME49_257010; | 1327 |
| | | | | length = 2071 | |
| TGME49_chrIb | 1755720 | 1757922 | + | ID = TGME49_321520; | 1328 |
| | | | | length = 2202 | |
| TGME49_chrX | 6940384 | 6941995 | + | ID = TGME49_215400; | 1329 |
| | | | | length = 1611 | |
| TGME49_chrVI | 1108072 | 1112890 | − | ID = TGME49_240243; | 1330 |
| | | | | length = 4818 | |
| TGME49_chrXII | 4472490 | 4474867 | − | ID = TGME49_249340; | 1331 |
| | | | | length = 2377 | |
| TGME49_chrVIIa | 970566 | 973439 | − | ID = TGME49_206450; | 1332 |
| | | | | length = 2873 | |
| TGME49_chrIb | 601001 | 603218 | + | ID = TGME49_208300; | 1333 |
| | | | | length = 2217 | |
| TGME49_chrIX | 5762838 | 5764549 | + | ID = TGME49_306035; | 1334 |
| | | | | length = 1711 | |
| TGME49_chrIX | 653845 | 657554 | − | ID = TGME49_267440; | 1335 |
| | | | | length = 3709 | |
| TGME49_chrX | 2967494 | 2971910 | + | ID = TGME49_224570; | 1336 |
| | | | | length = 4416 | |
| TGME49_chrVIII | 5286926 | 5289744 | − | ID = TGME49_270310; | 1337 |
| | | | | length = 2818 | |
| TGME49_chrVIII | 1877930 | 1881330 | + | ID = TGME49_232130; | 1338 |
| | | | | length = 3400 | |
| TGME49_chrXI | 852387 | 855185 | − | ID = TGME49_309865; | 1339 |
| | | | | length = 2798 | |
| TGME49_chrXI | 6261741 | 6265340 | − | ID = TGME49_216280; | 1340 |
| | | | | length = 3599 | |
| TGME49_chrX | 2712114 | 2714287 | − | ID = TGME49_224890; | 1341 |
| | | | | length = 2173 | |
| TGME49_chrXII | 2592707 | 2596028 | − | ID = TGME49_246010; | 1342 |
| | | | | length = 3321 | |
| TGME49_chrX | 1673837 | 1675489 | + | ID = TGME49_226380; | 1343 |
| | | | | length = 1652 | |
| TGME49_chrXII | 4784125 | 4785752 | − | ID = TGME49_249750; | 1344 |
| | | | | length = 1627 | |
| TGME49_chrVIIb | 1379649 | 1382568 | + | ID = TGME49_262090; | 1345 |
| | | | | length = 2919 | |
| TGME49_chrVIIb | 292075 | 294154 | − | ID = TGME49_263850; | 1346 |
| | | | | length = 2079 | |
| TGME49_chrXII | 2582968 | 2585062 | + | ID = TGME49_246000; | 1347 |
| | | | | length = 2094 | |
| TGME49_chrIX | 5480897 | 5483034 | − | ID = TGME49_305580; | 1348 |
| | | | | length = 2137 | |
| TGME49_chrIX | 678959 | 682427 | + | ID = TGME49_267370; | 1349 |
| | | | | length = 3468 | |
| TGME49_chrIX | 1283348 | 1288325 | − | ID = TGME49_266130; | 1350 |
| | | | | length = 4977 | |
| TGME49_chrXI | 6528191 | 6531898 | + | ID = TGME49_215910; | 1351 |
| | | | | length = 3707 | |
| TGME49_chrVIIb | 4536725 | 4538969 | + | ID = TGME49_256060; | 1352 |
| | | | | length = 2244 | |
| TGME49_chrIX | 800121 | 801864 | + | ID = TGME49_267050; | 1353 |
| | | | | length = 1743 | |
| TGME49_chrXI | 2857820 | 2862733 | + | ID = TGME49_312635; | 1354 |
| | | | | length = 4913 | |
| TGME49_chrVIIa | 2173780 | 2176161 | − | ID = TGME49_203870; | 1355 |
| | | | | length = 2381 | |
| TGME49_chrV | 1761372 | 1763556 | + | ID = TGME49_286610; | 1356 |
| | | | | length = 2184 | |
| TGME49_chrVIII | 2657912 | 2660930 | + | ID = TGME49_233450; | 1357 |
| | | | | length = 3018 | |
| TGME49_chrVIIa | 2656175 | 2659506 | + | ID = TGME49_203230; | 1358 |
| | | | | length = 3331 | |
| TGME49_chrVIIb | 3927316 | 3929847 | − | ID = TGME49_257670; | 1359 |
| | | | | length = 2531 | |
| TGME49_chrIX | 2429266 | 2431241 | − | ID = TGME49_288265; | 1360 |
| | | | | length = 1975 | |
| TGME49_chrVIII | 2207468 | 2209626 | − | ID = TGME49_232650; | 1361 |
| | | | | length = 2158 | |
| TGME49_chrIV | 482747 | 486460 | − | ID = TGME49_320130; | 1362 |
| | | | | length = 3713 | |
| TGME49_chrVIIb | 1792513 | 1796589 | − | ID = TGME49_261300; | 1363 |
| | | | | length = 4076 | |
| TGME49_chrX | 6083410 | 6086247 | + | ID = TGME49_214180; | 1364 |
| | | | | length = 2837 | |
| TGME49_chrX | 6748004 | 6750095 | − | ID = TGME49_215080; | 1365 |
| | | | | length = 2091 | |
| TGME49_chrX | 4919793 | 4924423 | − | ID = TGME49_235500; | 1366 |
| | | | | length = 4630 | |
| TGME49_chrVIIa | 3365745 | 3369481 | − | ID = TGME49_202390; | 1367 |
| | | | | length = 3736 | |
| TGME49_chrVIIa | 88266 | 91194 | + | ID = TGME49_280780; | 1368 |
| | | | | length = 2928 | |
| TGME49_chrXII | 6725504 | 6728703 | − | ID = TGME49_277080; | 1369 |
| | | | | length = 3199 | |
| TGME49_chrVIII | 5699778 | 5702719 | + | ID = TGME49_269660; | 1370 |
| | | | | length = 2941 | |
| TGME49_chrIV | 101470 | 104091 | + | ID = TGME49_320740; | 1371 |
| | | | | length = 2621 | |
| TGME49_chrXI | 4317799 | 4319648 | − | ID = TGME49_314820; | 1372 |
| | | | | length = 1849 | |
| TGME49_chrIb | 1727396 | 1729180 | − | ID = TGME49_321570; | 1373 |
| | | | | length = 1784 | |
| TGME49_chrXI | 3841735 | 3843470 | + | ID = TGME49_313970; | 1374 |
| | | | | length = 1735 | |
| TGME49_chrVIIb | 3286431 | 3288841 | − | ID = TGME49_258650; | 1375 |
| | | | | length = 2410 | |
| TGME49_chrIX | 2706389 | 2708077 | − | ID = TGME49_288710; | 1376 |
| | | | | length = 1688 | |
| TGME49_chrX | 912881 | 916723 | − | ID = TGME49_227570; | 1377 |
| | | | | length = 3842 | |
| TGME49_chrVIIb | 1762209 | 1764225 | + | ID = TGME49_261410; | 1378 |
| | | | | length = 2016 | |
| TGME49_chrXI | 2723240 | 2725414 | + | ID = TGME49_312490; | 1379 |
| | | | | length = 2174 | |
| TGME49_chrIX | 932063 | 933944 | − | ID = TGME49_266840; | 1380 |
| | | | | length = 1881 | |
| TGME49_chrIa | 296552 | 299464 | + | ID = TGME49_293390; | 1381 |
| | | | | length = 2912 | |
| TGME49_chrVI | 3125605 | 3127814 | − | ID = TGME49_244210; | 1382 |
| | | | | length = 2209 | |
| TGME49_chrVIII | 2067930 | 2069608 | − | ID = TGME49_232380; | 1383 |
| | | | | length = 1678 | |
| TGME49_chrXI | 656827 | 661285 | + | ID = TGME49_309390; | 1384 |
| | | | | length = 4458 | |
| TGME49_chrXII | 1846841 | 1847991 | − | ID = TGME49_217450; | 1385 |
| | | | | length = 1150 | |
| TGME49_chrVIIb | 863548 | 865419 | + | ID = TGME49_263000; | 1386 |
| | | | | length = 1871 | |
| TGME49_chrXI | 900050 | 902305 | + | ID = TGME49_309920; | 1387 |
| | | | | length = 2255 | |
| TGME49_chrVIIb | 523777 | 525912 | + | ID = TGME49_263490; | 1388 |
| | | | | length = 2135 | |
| TGME49_chrIV | 452586 | 457475 | − | ID = TGME49_320170; | 1389 |
| | | | | length = 4889 | |
| TGME49_chrIX | 4345155 | 4348378 | − | ID = TGME49_291690; | 1390 |
| | | | | length = 3223 | |
| TGME49_chrX | 5735321 | 5736518 | + | ID = TGME49_237140; | 1391 |
| | | | | length = 1197 | |
| TGME49_chrV | 971313 | 973576 | − | ID = TGME49_213380; | 1392 |
| | | | | length = 2263 | |
| TGME49_chrX | 3668011 | 3669970 | + | ID = TGME49_223660; | 1393 |
| | | | | length = 1959 | |
| TGME49_chrVIII | 2956529 | 2961446 | − | ID = TGME49_274170; | 1394 |
| | | | | length = 4917 | |
| TGME49_chrIb | 714291 | 719214 | + | ID = TGME49_208470; | 1395 |
| | | | | length = 4923 | |
| TGME49_chrXII | 4009400 | 4010849 | + | ID = TGME49_248580; | 1396 |
| | | | | length = 1449 | |
| TGME49_chrV | 2549712 | 2552335 | − | ID = TGME49_285190; | 1397 |
| | | | | length = 2623 | |
| TGME49_chrII | 1927281 | 1928097 | + | ID = TGME49_297700; | 1398 |
| | | | | length = 816 | |
| TGME49_chrVIII | 2689521 | 2690407 | − | ID = TGME49_233510; | 1399 |
| | | | | length = 886 | |
| TGME49_chrVIIa | 2220731 | 2225084 | + | ID = TGME49_203800; | 1400 |
| | | | | length = 4353 | |
| TGME49_chrVI | 2798189 | 2801702 | + | ID = TGME49_243700; | 1401 |
| | | | | length = 3513 | |
| TGME49_chrXI | 810675 | 812617 | + | ID = TGME49_309790; | 1402 |
| | | | | length = 1942 | |
| TGME49_chrIa | 521377 | 525024 | + | ID = TGME49_293720; | 1403 |
| | | | | length = 3647 | |
| TGME49_chrXII | 4275825 | 4279900 | + | ID = TGME49_248970; | 1404 |
| | | | | length = 4075 | |
| TGME49_chrII | 748920 | 750747 | − | ID = TGME49_222000; | 1405 |
| | | | | length = 1827 | |
| TGME49_chrIX | 4400803 | 4404708 | + | ID = TGME49_291920; | 1406 |
| | | | | length = 3905 | |
| TGME49_chrVIII | 5507253 | 5511071 | − | ID = TGME49_269950; | 1407 |
| | | | | length = 3818 | |
| TGME49_chrXII | 1398435 | 1401335 | − | ID = TGME49_218590; | 1408 |
| | | | | length = 2900 | |
| TGME49_chrVIIb | 1154398 | 1159024 | + | ID = TGME49_262568; | 1409 |
| | | | | length = 4626 | |
| TGME49_chrVIIb | 2834684 | 2838145 | − | ID = TGME49_259260; | 1410 |
| | | | | length = 3461 | |
| TGME49_chrVIIb | 1020393 | 1022780 | − | ID = TGME49_262800; | 1411 |
| | | | | length = 2387 | |
| TGME49_chrX | 871374 | 874994 | − | ID = TGME49_227620; | 1412 |
| | | | | length = 3620 | |
| TGME49_chrIa | 270952 | 273178 | + | ID = TGME49_293350; | 1413 |
| | | | | length = 2226 | |
| TGME49_chrXI | 4579521 | 4583971 | − | ID = TGME49_315210; | 1414 |
| | | | | length = 4450 | |
| TGME49_chrX | 2114737 | 2118243 | − | ID = TGME49_225710; | 1415 |
| | | | | length = 3506 | |
| TGME49_chrXI | 915530 | 919805 | − | ID = TGME49_309930; | 1416 |
| | | | | length = 4275 | |
| TGME49_chrVIII | 4874658 | 4879348 | − | ID = TGME49_270925; | 1417 |
| | | | | length = 4690 | |
| TGME49_chrVIIb | 2396904 | 2397972 | − | ID = TGME49_260280; | 1418 |
| | | | | length = 1068 | |
| TGME49_chrVIII | 4339933 | 4342675 | − | ID = TGME49_271840; | 1419 |
| | | | | length = 2742 | |
| TGME49_chrII | 1978826 | 1981903 | + | ID = TGME49_297760; | 1420 |
| | | | | length = 3077 | |
| TGME49_chrVI | 724098 | 726949 | + | ID = TGME49_239510; | 1421 |
| | | | | length = 2851 | |
| TGME49_chrVIII | 394955 | 397268 | − | ID = TGME49_229710; | 1422 |
| | | | | length = 2313 | |
| TGME49_chrX | 2538346 | 2540172 | + | ID = TGME49_225080; | 1423 |
| | | | | length = 1826 | |
| TGME49_chrX | 3957033 | 3959160 | − | ID = TGME49_212260; | 1424 |
| | | | | length = 2127 | |
| TGME49_chrVIII | 6036204 | 6038366 | − | ID = TGME49_269160; | 1425 |
| | | | | length = 2162 | |
| TGME49_chrIa | 1507041 | 1511154 | + | ID = TGME49_295770; | 1426 |
| | | | | length = 4113 | |
| TGME49_chrVIIa | 256069 | 257838 | − | ID = TGME49_280660; | 1427 |
| | | | | length = 1769 | |
| TGME49_chrXII | 876562 | 878297 | − | ID = TGME49_219540; | 1428 |
| | | | | length = 1735 | |
| TGME49_chrVIIa | 4386321 | 4390549 | − | ID = TGME49_282100; | 1429 |
| | | | | length = 4228 | |
| TGME49_chrX | 7344432 | 7346618 | + | ID = TGME49_207040; | 1430 |
| | | | | length = 2186 | |
| TGME49_chrVIII | 4560505 | 4562544 | + | ID = TGME49_271335; | 1431 |
| | | | | length = 2039 | |
| TGME49_chrXI | 4316863 | 4319362 | + | ID = TGME49_314830; | 1432 |
| | | | | length = 2499 | |
| TGME49_chrVIIb | 1422808 | 1424669 | − | ID = TGME49_262030; | 1433 |
| | | | | length = 1861 | |
| TGME49_chrVIII | 2285212 | 2287451 | − | ID = TGME49_232830; | 1434 |
| | | | | length = 2239 | |
| TGME49_chrVIIa | 3992533 | 3996332 | − | ID = TGME49_201170; | 1435 |
| | | | | length = 3799 | |
| TGME49_chrXI | 1004000 | 1006816 | + | ID = TGME49_310010; | 1436 |
| | | | | length = 2816 | |
| TGME49_chrIX | 5957299 | 5959752 | − | ID = TGME49_306310; | 1437 |
| | | | | length = 2453 | |
| TGME49_chrX | 7344432 | 7345679 | + | ID = TGME49_207030; | 1438 |
| | | | | length = 1247 | |
| TGME49_chrVIIb | 4253602 | 4256192 | + | ID = TGME49_257050; | 1439 |
| | | | | length = 2590 | |
| TGME49_chrX | 1452312 | 1454768 | − | ID = TGME49_226670; | 1440 |
| | | | | length = 2456 | |
| TGME49_chrV | 469797 | 472077 | − | ID = TGME49_220570; | 1441 |
| | | | | length = 2280 | |
| TGME49_chrIX | 2094408 | 2096713 | + | ID = TGME49_264710; | 1442 |
| | | | | length = 2305 | |
| TGME49_chrVIIa | 3662602 | 3666008 | + | ID = TGME49_202060; | 1443 |
| | | | | length = 3406 | |
| TGME49_chrXII | 3253841 | 3255658 | − | ID = TGME49_247320; | 1444 |
| | | | | length = 1817 | |
| TGME49_chrIb | 547531 | 550624 | − | ID = TGME49_208040; | 1445 |
| | | | | length = 3093 | |
| TGME49_chrIX | 2133128 | 2135664 | + | ID = TGME49_264660; | 1446 |
| | | | | length = 2536 | |
| TGME49_chrIX | 1292458 | 1295329 | − | ID = TGME49_266120; | 1447 |
| | | | | length = 2871 | |
| TGME49_chrXI | 1328980 | 1332607 | + | ID = TGME49_310430; | 1448 |
| | | | | length = 3627 | |
| TGME49_chrX | 6270785 | 6272853 | − | ID = TGME49_214370; | 1449 |
| | | | | length = 2068 | |
| TGME49_chrVIIb | 251585 | 254066 | − | ID = TGME49_264000; | 1450 |
| | | | | length = 2481 | |
| TGME49_chrVI | 1612726 | 1614168 | + | ID = TGME49_240990; | 1451 |
| | | | | length = 1442 | |
| TGME49_chrIX | 1530142 | 1532118 | − | ID = TGME49_265500; | 1452 |
| | | | | length = 1976 | |
| TGME49_chrIX | 6232749 | 6234329 | − | ID = TGME49_306630; | 1453 |
| | | | | length = 1580 | |
| TGME49_chrXI | 4753701 | 4755221 | + | ID = TGME49_315495; | 1454 |
| | | | | length = 1520 | |
| TGME49_chrVIIa | 3844338 | 3846794 | − | ID = TGME49_201700; | 1455 |
| | | | | length = 2456 | |
| TGME49_chrXII | 1058438 | 1061957 | − | ID = TGME49_219222; | 1456 |
| | | | | length = 3519 | |
| TGME49_chrVIII | 3632654 | 3634741 | + | ID = TGME49_273140; | 1457 |
| | | | | length = 2087 | |
| TGME49_chrVIII | 5032871 | 5035049 | − | ID = TGME49_270740; | 1458 |
| | | | | length = 2178 | |
| TGME49_chrIa | 89272 | 92865 | + | ID = TGME49_293010; | 1459 |
| | | | | length = 3593 | |
| TGME49_chrXII | 2686419 | 2690798 | − | ID = TGME49_246140; | 1460 |
| | | | | length = 4379 | |
| TGME49_chrXII | 2197081 | 2200494 | + | ID = TGME49_217880; | 1461 |
| | | | | length = 3413 | |
| TGME49_chrXI | 4536782 | 4540443 | + | ID = TGME49_315165; | 1462 |
| | | | | length = 3661 | |
| TGME49_chrXII | 727484 | 728939 | − | ID = TGME49_219690; | 1463 |
| | | | | length = 1455 | |
| TGME49_chrVIIb | 4699937 | 4702102 | + | ID = TGME49_255715; | 1464 |
| | | | | length = 2165 | |
| TGME49_chrVIIb | 4573700 | 4576785 | + | ID = TGME49_255980; | 1465 |
| | | | | length = 3085 | |
| TGME49_chrVIIb | 475047 | 477267 | − | ID = TGME49_263570; | 1466 |
| | | | | length = 2220 | |
| TGME49_chrV | 1705802 | 1710404 | + | ID = TGME49_286720; | 1467 |
| | | | | length = 4602 | |
| TGME49_chrV | 2326677 | 2329241 | − | ID = TGME49_285650; | 1468 |
| | | | | length = 2564 | |
| TGME49_chrIb | 1641650 | 1645144 | + | ID = TGME49_321660; | 1469 |
| | | | | length = 3494 | |
| TGME49_chrVIII | 2198843 | 2203273 | + | ID = TGME49_232640; | 1470 |
| | | | | length = 4430 | |
| TGME49_chrV | 1532883 | 1536115 | + | ID = TGME49_287180; | 1471 |
| | | | | length = 3232 | |
| TGME49_chrV | 1908950 | 1912837 | − | ID = TGME49_286230; | 1472 |
| | | | | length = 3887 | |
| TGME49_chrXII | 4413457 | 4417115 | + | ID = TGME49_249270; | 1473 |
| | | | | length = 3658 | |
| TGME49_chrIX | 5898832 | 5900782 | − | ID = TGME49_306250; | 1474 |
| | | | | length = 1950 | |
| TGME49_chrVIIb | 4154765 | 4156893 | − | ID = TGME49_257290; | 1475 |
| | | | | length = 2128 | |
| TGME49_chrVIII | 1268914 | 1270935 | + | ID = TGME49_231150; | 1476 |
| | | | | length = 2021 | |
| TGME49_chrVIIb | 971154 | 973119 | − | ID = TGME49_262870; | 1477 |
| | | | | length = 1965 | |
| TGME49_chrIV | 282678 | 285486 | + | ID = TGME49_320515; | 1478 |
| | | | | length = 2808 | |
| TGME49_chrXII | 6880772 | 6883692 | + | ID = TGME49_276880; | 1479 |
| | | | | length = 2920 | |
| TGME49_chrX | 6032756 | 6036014 | + | ID = TGME49_214110; | 1480 |
| | | | | length = 3258 | |
| TGME49_chrX | 4061115 | 4063643 | + | ID = TGME49_212100; | 1481 |
| | | | | length = 2528 | |
| TGME49_chrV | 2498999 | 2501500 | − | ID = TGME49_285240; | 1482 |
| | | | | length = 2501 | |
| TGME49_chrXII | 1724144 | 1728800 | − | ID = TGME49_218188; | 1483 |
| | | | | length = 4656 | |
| TGME49_chrIX | 5437186 | 5438779 | − | ID = TGME49_305485; | 1484 |
| | | | | length = 1593 | |
| TGME49_chrVIII | 6795589 | 6797461 | − | ID = TGME49_200310; | 1485 |
| | | | | length = 1872 | |
| TGME49_chrIX | 1829415 | 1830688 | − | ID = TGME49_265030; | 1486 |
| | | | | length = 1273 | |
| TGME49_chrVI | 1828265 | 1830308 | + | ID = TGME49_242020; | 1487 |
| | | | | length = 2043 | |
| TGME49_chrVIII | 2016463 | 2018840 | − | ID = TGME49_232320; | 1488 |
| | | | | length = 2377 | |
| TGME49_chrXI | 3740855 | 3743951 | − | ID = TGME49_313852; | 1489 |
| | | | | length = 3096 | |
| TGME49_chrVIIb | 4275109 | 4277123 | − | ID = TGME49_257030; | 1490 |
| | | | | length = 2014 | |
| TGME49_chrX | 6767981 | 6769751 | − | ID = TGME49_215120; | 1491 |
| | | | | length = 1770 | |
| TGME49_chrVIIa | 2075756 | 2076930 | + | ID = TGME49_203970; | 1492 |
| | | | | length = 1174 | |
| TGME49_chrVIIb | 2416856 | 2418383 | − | ID = TGME49_260260; | 1493 |
| | | | | length = 1527 | |
| TGME49_chrIX | 3779931 | 3784973 | + | ID = TGME49_290630; | 1494 |
| | | | | length = 5042 | |
| TGME49_chrVIIb | 581365 | 584740 | + | ID = TGME49_263390; | 1495 |
| | | | | length = 3375 | |
| TGME49_chrXII | 4466466 | 4468532 | − | ID = TGME49_249330; | 1496 |
| | | | | length = 2066 | |
| TGME49_chrII | 1858989 | 1860788 | + | ID = TGME49_297530; | 1497 |
| | | | | length = 1799 | |
| TGME49_chrII | 22256 | 25319 | − | ID = TGME49_220840; | 1498 |
| | | | | length = 3063 | |
| TGME49_chrIX | 3868643 | 3870136 | + | ID = TGME49_290730; | 1499 |
| | | | | length = 1493 | |
| TGME49_chrXI | 551152 | 554422 | + | ID = TGME49_309200; | 1500 |
| | | | | length = 3270 | |
| TGME49_chrIb | 1422277 | 1424478 | − | ID = TGME49_209730; | 1501 |
| | | | | length = 2201 | |
| TGME49_chrIX | 1830908 | 1832938 | + | ID = TGME49_265020; | 1502 |
| | | | | length = 2030 | |
| TGME49_chrXII | 2839463 | 2841372 | − | ID = TGME49_246535; | 1503 |
| | | | | length = 1909 | |
| TGME49_chrVIII | 5830510 | 5832051 | − | ID = TGME49_269413; | 1504 |
| | | | | length = 1541 | |
| TGME49_chrVIIb | 3160690 | 3162547 | + | ID = TGME49_258826; | 1505 |
| | | | | length = 1857 | |
| TGME49_chrXI | 4307313 | 4309840 | + | ID = TGME49_314810; | 1506 |
| | | | | length = 2527 | |
| TGME49_chrVIII | 406789 | 409738 | − | ID = TGME49_229730; | 1507 |
| | | | | length = 2949 | |
| TGME49_chrXII | 2456140 | 2459097 | + | ID = TGME49_245670; | 1508 |
| | | | | length = 2957 | |
| TGME49_chrVIIa | 2619487 | 2621645 | − | ID = TGME49_203290; | 1509 |
| | | | | length = 2158 | |
| TGME49_chrV | 1924282 | 1927117 | + | ID = TGME49_286190; | 1510 |
| | | | | length = 2835 | |
| TGME49_chrVI | 716743 | 721319 | + | ID = TGME49_239500; | 1511 |
| | | | | length = 4576 | |
| TGME49_chrX | 5770090 | 5772025 | − | ID = TGME49_237180; | 1512 |
| | | | | length = 1935 | |
| TGME49_chrXII | 2832970 | 2834932 | − | ID = TGME49_246520; | 1513 |
| | | | | length = 1962 | |
| TGME49_chrXII | 5499795 | 5502016 | − | ID = TGME49_251620; | 1514 |
| | | | | length = 2221 | |
| TGME49_chrVIII | 3996074 | 3999088 | + | ID = TGME49_272400; | 1515 |
| | | | | length = 3014 | |
| TGME49_chrIX | 1961567 | 1963588 | − | ID = TGME49_264860; | 1516 |
| | | | | length = 2021 | |
| TGME49_chrVIIa | 1028393 | 1032556 | + | ID = TGME49_206380; | 1517 |
| | | | | length = 4163 | |
| TGME49_chrX | 3004741 | 3008120 | − | ID = TGME49_224530; | 1518 |
| | | | | length = 3379 | |
| TGME49_chrII | 1710951 | 1714500 | − | ID = TGME49_297350; | 1519 |
| | | | | length = 3549 | |
| TGME49_chrV | 244391 | 246292 | + | ID = TGME49_220260; | 1520 |
| | | | | length = 1901 | |
| TGME49_chrX | 4446902 | 4449402 | − | ID = TGME49_234540; | 1521 |
| | | | | length = 2500 | |
| TGME49_chrVIII | 3410793 | 3412947 | + | ID = TGME49_273540; | 1522 |
| | | | | length = 2154 | |
| TGME49_chrXI | 3686190 | 3687061 | + | ID = TGME49_313775; | 1523 |
| | | | | length = 871 | |
| TGME49_chrIV | 1961999 | 1964761 | − | ID = TGME49_211030; | 1524 |
| | | | | length = 2762 | |
| TGME49_chrVIIb | 4217527 | 4220783 | + | ID = TGME49_257100; | 1525 |
| | | | | length = 3256 | |
| TGME49_chrIV | 2355261 | 2356404 | − | ID = TGME49_301260; | 1526 |
| | | | | length = 1143 | |
| TGME49_chrVIIb | 1978655 | 1980752 | + | ID = TGME49_261000; | 1527 |
| | | | | length = 2097 | |
| TGME49_chrXII | 1707434 | 1711430 | − | ID = TGME49_218195; | 1528 |
| | | | | length = 3996 | |
| TGME49_chrVI | 2626707 | 2630269 | − | ID = TGME49_243430; | 1529 |
| | | | | length = 3562 | |
| TGME49_chrVIIb | 3086523 | 3088120 | − | ID = TGME49_258930; | 1530 |
| | | | | length = 1597 | |
| TGME49_chrIb | 820471 | 822527 | − | ID = TGME49_208710; | 1531 |
| | | | | length = 2056 | |
| TGME49_chrX | 6097197 | 6099437 | − | ID = TGME49_214190; | 1532 |
| | | | | length = 2240 | |
| TGME49_chrX | 5747724 | 5750210 | − | ID = TGME49_237150; | 1533 |
| | | | | length = 2486 | |
| TGME49_chrIb | 1052146 | 1053746 | + | ID = TGME49_209120; | 1534 |
| | | | | length = 1600 | |
| TGME49_chrVIIb | 821098 | 823077 | + | ID = TGME49_263080; | 1535 |
| | | | | length = 1979 | |
| TGME49_chrXII | 1276521 | 1280802 | − | ID = TGME49_218830; | 1536 |
| | | | | length = 4281 | |
| TGME49_chrXII | 1314254 | 1315857 | − | ID = TGME49_218780; | 1537 |
| | | | | length = 1603 | |
| TGME49_chrVIII | 3808316 | 3811592 | + | ID = TGME49_272660; | 1538 |
| | | | | length = 3276 | |
| TGME49_chrXII | 3339927 | 3343970 | − | ID = TGME49_247440; | 1539 |
| | | | | length = 4043 | |
| TGME49_chrX | 669041 | 669809 | − | ID = TGME49_228020; | 1540 |
| | | | | length = 768 | |
| TGME49_chrIa | 1801426 | 1803846 | − | ID = TGME49_295380; | 1541 |
| | | | | length = 2420 | |
| TGME49_chrIX | 1152435 | 1155997 | + | ID = TGME49_266400; | 1542 |
| | | | | length = 3562 | |
| TGME49_chrXII | 4736176 | 4738097 | − | ID = TGME49_249685; | 1543 |
| | | | | length = 1921 | |
| TGME49_chrVIII | 6462646 | 6464783 | − | ID = TGME49_268400; | 1544 |
| | | | | length = 2137 | |
| TGME49_chrX | 2405925 | 2408633 | + | ID = TGME49_225200; | 1545 |
| | | | | length = 2708 | |
| TGME49_chrX | 4250667 | 4254283 | + | ID = TGME49_234270; | 1546 |
| | | | | length = 3616 | |
| TGME49_chrIV | 2580676 | 2583197 | − | ID = TGME49_237835; | 1547 |
| | | | | length = 2521 | |
| TGME49_chrX | 2837717 | 2842141 | − | ID = TGME49_224760; | 1548 |
| | | | | length = 4424 | |
| TGME49_chrVIIa | 1225490 | 1228154 | + | ID = TGME49_205658; | 1549 |
| | | | | length = 2664 | |
| TGME49_chrIV | 472782 | 476325 | − | ID = TGME49_320150; | 1550 |
| | | | | length = 3543 | |
| TGME49_chrVIII | 2495326 | 2497228 | − | ID = TGME49_233200; | 1551 |
| | | | | length = 1902 | |
| TGME49_chrIX | 1398246 | 1400896 | − | ID = TGME49_265870; | 1552 |
| | | | | length = 2650 | |
| TGME49_chrVIIb | 779047 | 782310 | − | ID = TGME49_263135; | 1553 |
| | | | | length = 3263 | |
| TGME49_chrVIIa | 2499387 | 2501343 | + | ID = TGME49_203440; | 1554 |
| | | | | length = 1956 | |
| TGME49_chrXII | 3179343 | 3181561 | + | ID = TGME49_247230; | 1555 |
| | | | | length = 2218 | |
| TGME49_chrVIIb | 906498 | 907438 | + | ID = TGME49_262940; | 1556 |
| | | | | length = 940 | |
| TGME49_chrX | 3106086 | 3109088 | + | ID = TGME49_224290; | 1557 |
| | | | | length = 3002 | |
| TGME49_chrVIIb | 2972536 | 2974185 | − | ID = TGME49_259100; | 1558 |
| | | | | length = 1649 | |
| TGME49_chrVIII | 322273 | 327193 | − | ID = TGME49_229620; | 1559 |
| | | | | length = 4920 | |
| TGME49_chrVI | 2726419 | 2728299 | − | ID = TGME49_243570; | 1560 |
| | | | | length = 1880 | |
| TGME49_chrIb | 1763476 | 1764810 | − | ID = TGME49_321510; | 1561 |
| | | | | length = 1334 | |
| TGME49_chrVIII | 1915936 | 1917426 | − | ID = TGME49_232170; | 1562 |
| | | | | length = 1490 | |
| TGME49_chrXI | 1198381 | 1203275 | − | ID = TGME49_310260; | 1563 |
| | | | | length = 4894 | |
| TGME49_chrV | 1164970 | 1166774 | − | ID = TGME49_213600; | 1564 |
| | | | | length = 1804 | |
| TGME49_chrXII | 1120459 | 1123972 | − | ID = TGME49_219125; | 1565 |
| | | | | length = 3513 | |
| TGME49_chrXI | 3087960 | 3092164 | − | ID = TGME49_313080; | 1566 |
| | | | | length = 4204 | |
| TGME49_chrXI | 1976585 | 1979964 | + | ID = TGME49_311335; | 1567 |
| | | | | length = 3379 | |
| TGME49_chrXII | 5059554 | 5061900 | − | ID = TGME49_250340; | 1568 |
| | | | | length = 2346 | |
| TGME49_chrIX | 708789 | 710487 | + | ID = TGME49_267330; | 1569 |
| | | | | length = 1698 | |
| TGME49_chrVI | 2874483 | 2878854 | + | ID = TGME49_243910; | 1570 |
| | | | | length = 4371 | |
| TGME49_chrX | 3857496 | 3859431 | − | ID = TGME49_223420; | 1571 |
| | | | | length = 1935 | |
| TGME49_chrVIIa | 176036 | 178132 | + | ID = TGME49_280690; | 1572 |
| | | | | length = 2096 | |
| TGME49_chrX | 5637919 | 5640447 | + | ID = TGME49_236980; | 1573 |
| | | | | length = 2528 | |
| TGME49_chrVIII | 5981273 | 5982851 | − | ID = TGME49_269225; | 1574 |
| | | | | length = 1578 | |
| TGME49_chrIV | 1821118 | 1825235 | + | ID = TGME49_211330; | 1575 |
| | | | | length = 4117 | |
| TGME49_chrV | 2548699 | 2551643 | + | ID = TGME49_285180; | 1576 |
| | | | | length = 2944 | |
| TGME49_chrVIIb | 1989290 | 1990938 | + | ID = TGME49_260990; | 1577 |
| | | | | length = 1648 | |
| TGME49_chrX | 1834669 | 1836342 | + | ID = TGME49_226060; | 1578 |
| | | | | length = 1673 | |
| TGME49_chrV | 817024 | 819593 | + | ID = TGME49_213050; | 1579 |
| | | | | length = 2569 | |
| TGME49_chrVIII | 2234318 | 2235909 | + | ID = TGME49_232710; | 1580 |
| | | | | length = 1591 | |
| TGME49_chrVIIb | 3147875 | 3150412 | + | ID = TGME49_258832; | 1581 |
| | | | | length = 2537 | |
| TGME49_chrVIIb | 4740043 | 4742016 | − | ID = TGME49_255680; | 1582 |
| | | | | length = 1973 | |
| TGME49_chrVIII | 3585349 | 3587718 | − | ID = TGME49_273340; | 1583 |
| | | | | length = 2369 | |
| TGME49_chrVI | 1619493 | 1622431 | − | ID = TGME49_241000; | 1584 |
| | | | | length = 2938 | |
| TGME49_chrVI | 3235482 | 3240036 | + | ID = TGME49_244400; | 1585 |
| | | | | length = 4554 | |
| TGME49_chrVIII | 4624312 | 4626375 | − | ID = TGME49_271250; | 1586 |
| | | | | length = 2063 | |
| TGME49_chrIV | 1260400 | 1264074 | − | ID = TGME49_318525; | 1587 |
| | | | | length = 3674 | |
| TGME49_chrXII | 2946217 | 2948125 | + | ID = TGME49_246730; | 1588 |
| | | | | length = 1908 | |
| TGME49_chrV | 1102556 | 1104367 | + | ID = TGME49_213490; | 1589 |
| | | | | length = 1811 | |
| TGME49_chrVIIb | 1064528 | 1067088 | − | ID = TGME49_262715; | 1590 |
| | | | | length = 2560 | |
| TGME49_chrIV | 564447 | 565815 | − | ID = TGME49_320040; | 1591 |
| | | | | length = 1368 | |
| TGME49_chrV | 1295918 | 1298121 | − | ID = TGME49_213760; | 1592 |
| | | | | length = 2203 | |
| TGME49_chrVIII | 1859181 | 1860943 | − | ID = TGME49_232100; | 1593 |
| | | | | length = 1762 | |
| TGME49_chrXI | 5852137 | 5854406 | + | ID = TGME49_216840; | 1594 |
| | | | | length = 2269 | |
| TGME49_chrX | 6047181 | 6050358 | + | ID = TGME49_214130; | 1595 |
| | | | | length = 3177 | |
| TGME49_chrV | 702364 | 705795 | + | ID = TGME49_212937; | 1596 |
| | | | | length = 3431 | |
| TGME49_chrX | 644166 | 645619 | − | ID = TGME49_228065; | 1597 |
| | | | | length = 1453 | |
| TGME49_chrIb | 707596 | 710331 | + | ID = TGME49_208440; | 1598 |
| | | | | length = 2735 | |
| TGME49_chrVIII | 4254025 | 4256840 | + | ID = TGME49_271970; | 1599 |
| | | | | length = 2815 | |
| TGME49_chrVIIa | 1752677 | 1754734 | − | ID = TGME49_204490; | 1600 |
| | | | | length = 2057 | |
| TGME49_chrIX | 3031260 | 3032617 | + | ID = TGME49_289160; | 1601 |
| | | | | length = 1357 | |
| TGME49_chrIa | 1610589 | 1612536 | − | ID = TGME49_295690; | 1602 |
| | | | | length = 1947 | |
| TGME49_chrXII | 3652284 | 3655006 | + | ID = TGME49_248100; | 1603 |
| | | | | length = 2722 | |
| TGME49_chrV | 2253285 | 2254950 | − | ID = TGME49_285760; | 1604 |
| | | | | length = 1665 | |
| TGME49_chrIa | 644712 | 646745 | − | ID = TGME49_294010; | 1605 |
| | | | | length = 2033 | |
| TGME49_chrVIIb | 2634842 | 2637275 | − | ID = TGME49_259890; | 1606 |
| | | | | length = 2433 | |
| TGME49_chrXII | 3357594 | 3360110 | − | ID = TGME49_247460; | 1607 |
| | | | | length = 2516 | |
| TGME49_chrIb | 458487 | 461835 | − | ID = TGME49_207950; | 1608 |
| | | | | length = 3348 | |
| TGME49_chrII | 309176 | 312120 | − | ID = TGME49_221390; | 1609 |
| | | | | length = 2944 | |
| TGME49_chrXII | 5240975 | 5243070 | − | ID = TGME49_250810; | 1610 |
| | | | | length = 2095 | |
| TGME49_chrIX | 1501064 | 1504713 | − | ID = TGME49_265530; | 1611 |
| | | | | length = 3649 | |
| TGME49_chrIb | 48324 | 49906 | − | ID = TGME49_207420; | 1612 |
| | | | | length = 1582 | |
| TGME49_chrVIIa | 2960709 | 2963102 | + | ID = TGME49_202880; | 1613 |
| | | | | length = 2393 | |
| TGME49_chrXII | 2759303 | 2762582 | − | ID = TGME49_246230; | 1614 |
| | | | | length = 3279 | |
| TGME49_chrVIIa | 3364291 | 3368281 | + | ID = TGME49_202380; | 1615 |
| | | | | length = 3990 | |
| TGME49_chrVIII | 5847471 | 5851413 | + | ID = TGME49_269380; | 1616 |
| | | | | length = 3942 | |
| TGME49_chrXI | 2803915 | 2808538 | + | ID = TGME49_312590; | 1617 |
| | | | | length = 4623 | |
| TGME49_chrXI | 3587275 | 3589602 | + | ID = TGME49_313665; | 1618 |
| | | | | length = 2327 | |
| TGME49_chrXII | 4168320 | 4169758 | + | ID = TGME49_248780; | 1619 |
| | | | | length = 1438 | |
| TGME49_chrX | 5074453 | 5075975 | + | ID = TGME49_235720; | 1620 |
| | | | | length = 1522 | |
| TGME49_chrII | 2127562 | 2129984 | + | ID = TGME49_297950; | 1621 |
| | | | | length = 2422 | |
| TGME49_chrVIIb | 894167 | 897847 | − | ID = TGME49_262970; | 1622 |
| | | | | length = 3680 | |
| TGME49_chrVIII | 2420778 | 2422638 | + | ID = TGME49_233110; | 1623 |
| | | | | length = 1860 | |
| TGME49_chrXII | 5430634 | 5433016 | − | ID = TGME49_251490; | 1624 |
| | | | | length = 2382 | |
| TGME49_chrX | 438371 | 442269 | + | ID = TGME49_228280; | 1625 |
| | | | | length = 3898 | |
| TGME49_chrV | 2053342 | 2058060 | − | ID = TGME49_286020; | 1626 |
| | | | | length = 4718 | |
| TGME49_chrIX | 1548370 | 1553308 | − | ID = TGME49_265450; | 1627 |
| | | | | length = 4938 | |
| TGME49_chrIb | 1361665 | 1366149 | − | ID = TGME49_209610; | 1628 |
| | | | | length = 4484 | |
| TGME49_chrII | 1160506 | 1162386 | − | ID = TGME49_222440; | 1629 |
| | | | | length = 1880 | |
| TGME49_chrXII | 3825625 | 3827372 | + | ID = TGME49_248370; | 1630 |
| | | | | length = 1747 | |
| TGME49_chrIa | 695084 | 698240 | + | ID = TGME49_294200; | 1631 |
| | | | | length = 3156 | |
| TGME49_chrXI | 6391216 | 6392903 | − | ID = TGME49_216130; | 1632 |
| | | | | length = 1687 | |
| TGME49_chrXI | 496472 | 497645 | + | ID = TGME49_309095; | 1633 |
| | | | | length = 1173 | |
| TGME49_chrVI | 2105036 | 2106954 | − | ID = TGME49_242610; | 1634 |
| | | | | length = 1918 | |
| TGME49_chrVIIa | 20277 | 22070 | − | ID = TGME49_279550; | 1635 |
| | | | | length = 1793 | |
| TGME49_chrVIII | 5588163 | 5591148 | + | ID = TGME49_269810; | 1636 |
| | | | | length = 2985 | |
| TGME49_chrII | 1643776 | 1646520 | − | ID = TGME49_297245; | 1637 |
| | | | | length = 2744 | |
| TGME49_chrXII | 1661314 | 1663812 | − | ID = TGME49_218230; | 1638 |
| | | | | length = 2498 | |
| TGME49_chrVIIa | 1958747 | 1961164 | − | ID = TGME49_204140; | 1639 |
| | | | | length = 2417 | |
| TGME49_chrIV | 1317765 | 1320416 | + | ID = TGME49_318450; | 1640 |
| | | | | length = 2651 | |
| TGME49_chrX | 4551871 | 4556156 | − | ID = TGME49_234930; | 1641 |
| | | | | length = 4285 | |
| TGME49_chrV | 1361167 | 1363437 | − | ID = TGME49_213830; | 1642 |
| | | | | length = 2270 | |
| TGME49_chrV | 2135398 | 2138100 | − | ID = TGME49_285940; | 1643 |
| | | | | length = 2702 | |
| TGME49_chrVIII | 4288270 | 4290925 | + | ID = TGME49_271910; | 1644 |
| | | | | length = 2655 | |
| TGME49_chrX | 5448896 | 5450860 | + | ID = TGME49_236620; | 1645 |
| | | | | length = 1964 | |
| TGME49_chrX | 7170482 | 7175111 | − | ID = TGME49_275310; | 1646 |
| | | | | length = 4629 | |
| TGME49_chrIX | 3092344 | 3096555 | − | ID = TGME49_289218; | 1647 |
| | | | | length = 4211 | |
| TGME49_chrIV | 866827 | 869130 | + | ID = TGME49_319590; | 1648 |
| | | | | length = 2303 | |
| TGME49_chrX | 6109656 | 6111516 | − | ID = TGME49_214200; | 1649 |
| | | | | length = 1860 | |
| TGME49_chrIa | 716367 | 719854 | − | ID = TGME49_294210; | 1650 |
| | | | | length = 3487 | |
| TGME49_chrIX | 2520742 | 2523456 | − | ID = TGME49_288420; | 1651 |
| | | | | length = 2714 | |
| TGME49_chrIX | 3369880 | 3371358 | − | ID = TGME49_289660; | 1652 |
| | | | | length = 1478 | |
| TGME49_chrX | 456771 | 458903 | + | ID = TGME49_228240; | 1653 |
| | | | | length = 2132 | |
| TGME49_chrVIIb | 2969500 | 2972803 | + | ID = TGME49_259090; | 1654 |
| | | | | length = 3303 | |
| TGME49_chrVIIb | 711535 | 716415 | − | ID = TGME49_263210; | 1655 |
| | | | | length = 4880 | |
| TGME49_chrVIII | 2122538 | 2126263 | − | ID = TGME49_232500; | 1656 |
| | | | | length = 3725 | |
| TGME49_chrIV | 2096934 | 2099104 | − | ID = TGME49_210750; | 1657 |
| | | | | length = 2170 | |
| TGME49_chrIb | 863212 | 866544 | + | ID = TGME49_208800; | 1658 |
| | | | | length = 3332 | |
| TGME49_chrVIII | 5219785 | 5222055 | − | ID = TGME49_270520; | 1659 |
| | | | | length = 2270 | |
| TGME49_chrVI | 1285261 | 1288152 | − | ID = TGME49_240450; | 1660 |
| | | | | length = 2891 | |
| TGME49_chrVIIa | 3031763 | 3033039 | − | ID = TGME49_202790; | 1661 |
| | | | | length = 1276 | |
| TGME49_chrXI | 3235407 | 3237049 | − | ID = TGME49_313277; | 1662 |
| | | | | length = 1642 | |
| TGME49_chrXII | 4460349 | 4461980 | − | ID = TGME49_249325; | 1663 |
| | | | | length = 1631 | |
| TGME49_chrVIIb | 1062098 | 1065932 | + | ID = TGME49_262710; | 1664 |
| | | | | length = 3834 | |
| TGME49_chrVIII | 2155428 | 2158102 | + | ID = TGME49_232550; | 1665 |
| | | | | length = 2674 | |
| TGME49_chrIX | 325672 | 328132 | + | ID = TGME49_267820; | 1666 |
| | | | | length = 2460 | |
| TGME49_chrXI | 5157299 | 5158701 | + | ID = TGME49_316150; | 1667 |
| | | | | length = 1402 | |
| TGME49_chrVIIb | 4842347 | 4847324 | + | ID = TGME49_255400; | 1668 |
| | | | | length = 4977 | |
| TGME49_chrX | 2287678 | 2289457 | − | ID = TGME49_225360; | 1669 |
| | | | | length = 1779 | |
| TGME49_chrVIIa | 3819058 | 3822835 | + | ID = TGME49_201750; | 1670 |
| | | | | length = 3777 | |
| TGME49_chrX | 4843932 | 4845765 | − | ID = TGME49_235398; | 1671 |
| | | | | length = 1833 | |
| TGME49_chrIV | 1145000 | 1147010 | + | ID = TGME49_318690; | 1672 |
| | | | | length = 2010 | |
| TGME49_chrXII | 5588646 | 5590856 | − | ID = TGME49_251780; | 1673 |
| | | | | length = 2210 | |
| TGME49_chrXI | 6129114 | 6134065 | − | ID = TGME49_216470; | 1674 |
| | | | | length = 4951 | |
| TGME49_chrVI | 455338 | 457067 | − | ID = TGME49_239083; | 1675 |
| | | | | length = 1729 | |
| TGME49_chrVIII | 3289883 | 3294737 | + | ID = TGME49_273750; | 1676 |
| | | | | length = 4854 | |
| TGME49_chrVIII | 3689219 | 3691099 | + | ID = TGME49_273060; | 1677 |
| | | | | length = 1880 | |
| TGME49_chrX | 3326589 | 3328196 | − | ID = TGME49_224100; | 1678 |
| | | | | length = 1607 | |
| TGME49_chrVIIa | 1060833 | 1063141 | + | ID = TGME49_206320; | 1679 |
| | | | | length = 2308 | |
| TGME49_chrII | 1301776 | 1305290 | + | ID = TGME49_222910; | 1680 |
| | | | | length = 3514 | |
| TGME49_chrII | 1512263 | 1514584 | + | ID = TGME49_297065; | 1681 |
| | | | | length = 2321 | |
| TGME49_chrVIII | 3030733 | 3033855 | + | ID = TGME49_274090; | 1682 |
| | | | | length = 3122 | |
| TGME49_chrII | 342210 | 344003 | + | ID = TGME49_221430; | 1683 |
| | | | | length = 1793 | |
| TGME49_chrVI | 1320689 | 1322846 | − | ID = TGME49_240560; | 1684 |
| | | | | length = 2157 | |
| TGME49_chrXI | 4851796 | 4855798 | + | ID = TGME49_315610; | 1685 |
| | | | | length = 4002 | |
| TGME49_chrXII | 2866217 | 2868700 | + | ID = TGME49_246590; | 1686 |
| | | | | length = 2483 | |
| TGME49_chrVIIb | 2395067 | 2397478 | + | ID = TGME49_260270; | 1687 |
| | | | | length = 2411 | |
| TGME49_chrV | 766839 | 769527 | + | ID = TGME49_213000; | 1688 |
| | | | | length = 2688 | |
| TGME49_chrXII | 1927136 | 1929197 | − | ID = TGME49_217580; | 1689 |
| | | | | length = 2061 | |
| TGME49_chrXII | 6597836 | 6600162 | − | ID = TGME49_275568; | 1690 |
| | | | | length = 2326 | |
| TGME49_chrIX | 5330740 | 5332155 | + | ID = TGME49_305280; | 1691 |
| | | | | length = 1415 | |
| TGME49_chrX | 6259145 | 6260711 | + | ID = TGME49_214350; | 1692 |
| | | | | length = 1566 | |
| TGME49_chrIX | 2730243 | 2732515 | − | ID = TGME49_288765; | 1693 |
| | | | | length = 2272 | |
| TGME49_chrXI | 4169227 | 4173719 | − | ID = TGME49_314515; | 1694 |
| | | | | length = 4492 | |
| TGME49_chrXI | 1722895 | 1726565 | + | ID = TGME49_311020; | 1695 |
| | | | | length = 3670 | |
| TGME49_chrXI | 2059780 | 2062470 | + | ID = TGME49_311410; | 1696 |
| | | | | length = 2690 | |
| TGME49_chrVIIa | 4202011 | 4206408 | + | ID = TGME49_281580; | 1697 |
| | | | | length = 4397 | |
| TGME49_chrVIIa | 2946359 | 2950755 | + | ID = TGME49_202900; | 1698 |
| | | | | length = 4396 | |
| TGME49_chrVIIb | 2678088 | 2682997 | + | ID = TGME49_259830; | 1699 |
| | | | | length = 4909 | |
| TGME49_chrVIIa | 899877 | 903405 | + | ID = TGME49_206510; | 1700 |
| | | | | length = 3528 | |
| TGME49_chrXI | 3996077 | 3999430 | − | ID = TGME49_314310; | 1701 |
| | | | | length = 3353 | |
| TGME49_chrXII | 5353411 | 5355727 | + | ID = TGME49_251400; | 1702 |
| | | | | length = 2316 | |
| TGME49_chrXII | 2176868 | 2180818 | + | ID = TGME49_217860; | 1703 |
| | | | | length = 3950 | |
| TGME49_chrVIII | 5792673 | 5796876 | − | ID = TGME49_269450; | 1704 |
| | | | | length = 4203 | |
| TGME49_chrVIII | 6863500 | 6867930 | − | ID = TGME49_200400; | 1705 |
| | | | | length = 4430 | |
| TGME49_chrIX | 1642011 | 1646868 | − | ID = TGME49_265270; | 1706 |
| | | | | length = 4857 | |
| TGME49_chrIa | 451232 | 453213 | + | ID = TGME49_293610; | 1707 |
| | | | | length = 1981 | |
| TGME49_chrVI | 1445741 | 1449188 | + | ID = TGME49_240800; | 1708 |
| | | | | length = 3447 | |
| TGME49_chrVIIb | 899808 | 902193 | + | ID = TGME49_262950; | 1709 |
| | | | | length = 2385 | |
| TGME49_chrXII | 5526551 | 5531499 | + | ID = TGME49_251690; | 1710 |
| | | | | length = 4948 | |
| TGME49_chrIV | 2154878 | 2157331 | + | ID = TGME49_210690; | 1711 |
| | | | | length = 2453 | |
| TGME49_chrVIIa | 2244701 | 2247997 | + | ID = TGME49_203770; | 1712 |
| | | | | length = 3296 | |
| TGME49_chrVIIb | 1773969 | 1777524 | − | ID = TGME49_261400; | 1713 |
| | | | | length = 3555 | |
| TGME49_chrIX | 2087644 | 2089518 | − | ID = TGME49_264730; | 1714 |
| | | | | length = 1874 | |
| TGME49_chrX | 5326096 | 5328125 | − | ID = TGME49_236200; | 1715 |
| | | | | length = 2029 | |
| TGME49_chrIX | 5280180 | 5282539 | + | ID = TGME49_305200; | 1716 |
| | | | | length = 2359 | |
| TGME49_chrV | 1815047 | 1818388 | + | ID = TGME49_286480; | 1717 |
| | | | | length = 3341 | |
| TGME49_chrVIIa | 624310 | 629301 | + | ID = TGME49_304700; | 1718 |
| | | | | length = 4991 | |
| TGME49_chrII | 505138 | 509495 | − | ID = TGME49_221630; | 1719 |
| | | | | length = 4357 | |
| TGME49_chrVI | 3153014 | 3156401 | + | ID = TGME49_244280; | 1720 |
| | | | | length = 3387 | |
| TGME49_chrVIII | 3997097 | 3999384 | − | ID = TGME49_272410; | 1721 |
| | | | | length = 2287 | |
| TGME49_chrXII | 6205376 | 6207991 | + | ID = TGME49_278245; | 1722 |
| | | | | length = 2615 | |
| TGME49_chrVIII | 5108236 | 5110579 | − | ID = TGME49_270650; | 1723 |
| | | | | length = 2343 | |
| TGME49_chrIX | 1415881 | 1418195 | + | ID = TGME49_265840; | 1724 |
| | | | | length = 2314 | |
| TGME49_chrVIIb | 3863097 | 3864612 | − | ID = TGME49_257740; | 1725 |
| | | | | length = 1515 | |
| TGME49_chrVIII | 4215825 | 4218765 | − | ID = TGME49_272020; | 1726 |
| | | | | length = 2940 | |
| TGME49_chrVIIa | 1629342 | 1632196 | − | ID = TGME49_205120; | 1727 |
| | | | | length = 2854 | |
| TGME49_chrVIIa | 463960 | 467129 | + | ID = TGME49_280390; | 1728 |
| | | | | length = 3169 | |
| TGME49_chrVIIa | 1426542 | 1431194 | − | ID = TGME49_205390; | 1729 |
| | | | | length = 4652 | |
| TGME49_chrII | 201437 | 204275 | − | ID = TGME49_221275; | 1730 |
| | | | | length = 2838 | |
| TGME49_chrXII | 2437627 | 2439102 | − | ID = TGME49_245620; | 1731 |
| | | | | length = 1475 | |
| TGME49_chrVIIb | 2332162 | 2334662 | − | ID = TGME49_260370; | 1732 |
| | | | | length = 2500 | |
| TGME49_chrVIIa | 788333 | 792905 | + | ID = TGME49_206600; | 1733 |
| | | | | length = 4572 | |
| TGME49_chrIX | 4108788 | 4113576 | + | ID = TGME49_291090; | 1734 |
| | | | | length = 4788 | |
| TGME49_chrIX | 4682427 | 4683833 | + | ID = TGME49_292325; | 1735 |
| | | | | length = 1406 | |
| TGME49_chrXI | 2417445 | 2418466 | − | ID = TGME49_312075; | 1736 |
| | | | | length = 1021 | |
| TGME49_chrIa | 556012 | 560537 | + | ID = TGME49_293790; | 1737 |
| | | | | length = 4525 | |
| TGME49_chrIX | 779646 | 784608 | + | ID = TGME49_267090; | 1738 |
| | | | | length = 4962 | |
| TGME49_chrX | 2592957 | 2594193 | + | ID = TGME49_225005; | 1739 |
| | | | | length = 1236 | |
| TGME49_chrIX | 2410595 | 2414911 | − | ID = TGME49_288245; | 1740 |
| | | | | length = 4316 | |
| TGME49_chrVIIb | 2602303 | 2605077 | + | ID = TGME49_259940; | 1741 |
| | | | | length = 2774 | |
| TGME49_chrX | 5395871 | 5397679 | + | ID = TGME49_236520; | 1742 |
| | | | | length = 1808 | |
| TGME49_chrIV | 1107275 | 1109514 | + | ID = TGME49_318750; | 1743 |
| | | | | length = 2239 | |
| TGME49_chrVI | 191582 | 194227 | + | ID = TGME49_238400; | 1744 |
| | | | | length = 2645 | |
| TGME49_chrX | 6586789 | 6588930 | + | ID = TGME49_214920; | 1745 |
| | | | | length = 2141 | |
| TGME49_chrXII | 6371094 | 6373426 | − | ID = TGME49_277990; | 1746 |
| | | | | length = 2332 | |
| TGME49_chrIa | 1812506 | 1814521 | − | ID = TGME49_295350; | 1747 |
| | | | | length = 2015 | |
| TGME49_chrXII | 6656982 | 6660694 | + | ID = TGME49_277500; | 1748 |
| | | | | length = 3712 | |
| TGME49_chrXII | 2663643 | 2665815 | + | ID = TGME49_246100; | 1749 |
| | | | | length = 2172 | |
| TGME49_chrXI | 436997 | 438672 | − | ID = TGME49_309010; | 1750 |
| | | | | length = 1675 | |
| TGME49_chrIX | 5442829 | 5445816 | − | ID = TGME49_305498; | 1751 |
| | | | | length = 2987 | |
| TGME49_chrVI | 41637 | 43605 | + | ID = TGME49_238060; | 1752 |
| | | | | length = 1968 | |
| TGME49_chrXII | 613045 | 617971 | + | ID = TGME49_219828; | 1753 |
| | | | | length = 4926 | |
| TGME49_chrX | 2026020 | 2028673 | − | ID = TGME49_225820; | 1754 |
| | | | | length = 2653 | |
| TGME49_chrIX | 3690964 | 3692526 | + | ID = TGME49_290300; | 1755 |
| | | | | length = 1562 | |
| TGME49_chrIX | 652699 | 654379 | + | ID = TGME49_267435; | 1756 |
| | | | | length = 1680 | |
| TGME49_chrV | 489825 | 492876 | − | ID = TGME49_220610; | 1757 |
| | | | | length = 3051 | |
| TGME49_chrVIIb | 486067 | 488472 | + | ID = TGME49_263540; | 1758 |
| | | | | length = 2405 | |
| TGME49_chrVIII | 3283733 | 3286012 | + | ID = TGME49_273770; | 1759 |
| | | | | length = 2279 | |
| TGME49_chrIb | 978776 | 983209 | + | ID = TGME49_209010; | 1760 |
| | | | | length = 4433 | |
| TGME49_chrVI | 1775119 | 1776850 | − | ID = TGME49_241860; | 1761 |
| | | | | length = 1731 | |
| TGME49_chrIa | 1146951 | 1148726 | − | ID = TGME49_294790; | 1762 |
| | | | | length = 1775 | |
| TGME49_chrXII | 1041731 | 1043438 | − | ID = TGME49_219250; | 1763 |
| | | | | length = 1707 | |
| TGME49_chrVIII | 733619 | 737486 | − | ID = TGME49_230350; | 1764 |
| | | | | length = 3867 | |
| TGME49_chrII | 1603694 | 1605698 | − | ID = TGME49_297190; | 1765 |
| | | | | length = 2004 | |
| TGME49_chrIX | 2711191 | 2713335 | − | ID = TGME49_288720; | 1766 |
| | | | | length = 2144 | |
| TGME49_chrX | 1196543 | 1199550 | + | ID = TGME49_226950; | 1767 |
| | | | | length = 3007 | |
| TGME49_chrIX | 5393544 | 5395750 | + | ID = TGME49_305455; | 1768 |
| | | | | length = 2206 | |
| TGME49_chrXI | 1499161 | 1503181 | + | ID = TGME49_310660; | 1769 |
| | | | | length = 4020 | |
| TGME49_chrXI | 5008254 | 5010201 | + | ID = TGME49_315820; | 1770 |
| | | | | length = 1947 | |
| TGME49_chrVI | 1390368 | 1392791 | − | ID = TGME49_240690; | 1771 |
| | | | | length = 2423 | |
| TGME49_chrII | 1120393 | 1123132 | + | ID = TGME49_222410; | 1772 |
| | | | | length = 2739 | |
| TGME49_chrX | 739417 | 741694 | − | ID = TGME49_227920; | 1773 |
| | | | | length = 2277 | |
| TGME49_chrVIII | 5548282 | 5553068 | − | ID = TGME49_269910; | 1774 |
| | | | | length = 4786 | |
| TGME49_chrVIII | 503704 | 505886 | − | ID = TGME49_229990; | 1775 |
| | | | | length = 2182 | |
| TGME49_chrX | 2521891 | 2524155 | + | ID = TGME49_225102; | 1776 |
| | | | | length = 2264 | |
| TGME49_chrVIIb | 2469232 | 2470805 | + | ID = TGME49_260190; | 1777 |
| | | | | length = 1573 | |
| TGME49_chrIX | 381279 | 384341 | + | ID = TGME49_267750; | 1778 |
| | | | | length = 3062 | |
| TGME49_chrXII | 2603118 | 2605598 | + | ID = TGME49_246030; | 1779 |
| | | | | length = 2480 | |
| TGME49_chrII | 1373856 | 1375582 | + | ID = TGME49_223025; | 1780 |
| | | | | length = 1726 | |
| TGME49_chrVIIb | 2167761 | 2170472 | − | ID = TGME49_260550; | 1781 |
| | | | | length = 2711 | |
| TGME49_chrXI | 4240194 | 4244498 | − | ID = TGME49_314710; | 1782 |
| | | | | length = 4304 | |
| TGME49_chrVIIa | 293961 | 296113 | − | ID = TGME49_280570; | 1783 |
| | | | | length = 2152 | |
| TGME49_chrIX | 1323487 | 1325964 | − | ID = TGME49_266065; | 1784 |
| | | | | length = 2477 | |
| TGME49_chrVIII | 1513803 | 1516857 | + | ID = TGME49_231640; | 1785 |
| | | | | length = 3054 | |
| TGME49_chrV | 342801 | 346665 | + | ID = TGME49_220390; | 1786 |
| | | | | length = 3864 | |
| TGME49_chrVIIa | 1663101 | 1666170 | + | ID = TGME49_205030; | 1787 |
| | | | | length = 3069 | |
| TGME49_chrVI | 2847971 | 2852954 | − | ID = TGME49_243760; | 1788 |
| | | | | length = 4983 | |
| TGME49_chrIX | 5351150 | 5353348 | + | ID = TGME49_305320; | 1789 |
| | | | | length = 2198 | |
| TGME49_chrXII | 4131891 | 4133450 | − | ID = TGME49_248730; | 1790 |
| | | | | length = 1559 | |
| TGME49_chrXI | 133543 | 134623 | + | ID = TGME49_306990; | 1791 |
| | | | | length = 1080 | |
| TGME49_chrX | 6353248 | 6354650 | − | ID = TGME49_214550; | 1792 |
| | | | | length = 1402 | |
| TGME49_chrVIII | 6042411 | 6044655 | + | ID = TGME49_269140; | 1793 |
| | | | | length = 2244 | |
| TGME49_chrIX | 1688833 | 1690933 | − | ID = TGME49_265230; | 1794 |
| | | | | length = 2100 | |
| TGME49_chrIa | 306442 | 309887 | + | ID = TGME49_293420; | 1795 |
| | | | | length = 3445 | |
| TGME49_chrVIIa | 1824928 | 1827582 | + | ID = TGME49_204390; | 1796 |
| | | | | length = 2654 | |
| TGME49_chrXII | 951031 | 952710 | + | ID = TGME49_219430; | 1797 |
| | | | | length = 1679 | |
| TGME49_chrVI | 581992 | 583744 | − | ID = TGME49_239350; | 1798 |
| | | | | length = 1752 | |
| TGME49_chrX | 3441657 | 3444661 | − | ID = TGME49_223940; | 1799 |
| | | | | length = 3004 | |
| TGME49_chrVIII | 846765 | 849139 | + | ID = TGME49_230520; | 1800 |
| | | | | length = 2374 | |
| TGME49_chrXII | 3323790 | 3326774 | + | ID = TGME49_247400; | 1801 |
| | | | | length = 2984 | |
| TGME49_chrVIIa | 2920724 | 2923694 | − | ID = TGME49_202960; | 1802 |
| | | | | length = 2970 | |
| TGME49_chrXI | 4578541 | 4582751 | + | ID = TGME49_315220; | 1803 |
| | | | | length = 4210 | |
| TGME49_chrIX | 1528778 | 1531783 | + | ID = TGME49_265470; | 1804 |
| | | | | length = 3005 | |
| TGME49_chrXI | 1239947 | 1242270 | − | ID = TGME49_310290; | 1805 |
| | | | | length = 2323 | |
| TGME49_chrVIIb | 222702 | 224691 | − | ID = TGME49_264040; | 1806 |
| | | | | length = 1989 | |
| TGME49_chrVIII | 405193 | 409738 | − | ID = TGME49_229720; | 1807 |
| | | | | length = 4545 | |
| TGME49_chrVIIa | 625071 | 629635 | − | ID = TGME49_304680; | 1808 |
| | | | | length = 4564 | |
| TGME49_chrIX | 2507287 | 2509481 | − | ID = TGME49_288400; | 1809 |
| | | | | length = 2194 | |
| TGME49_chrVIIa | 3260937 | 3263671 | − | ID = TGME49_202530; | 1810 |
| | | | | length = 2734 | |
| TGME49_chrIX | 227007 | 229288 | + | ID = TGME49_279360; | 1811 |
| | | | | length = 2281 | |
| TGME49_chrX | 4021655 | 4024338 | + | ID = TGME49_212140; | 1812 |
| | | | | length = 2683 | |
| TGME49_chrVIIb | 1215908 | 1219966 | + | ID = TGME49_262460; | 1813 |
| | | | | length = 4058 | |
| TGME49_chrX | 7457937 | 7460592 | − | ID = TGME49_207230; | 1814 |
| | | | | length = 2655 | |
| TGME49_chrVIII | 1071514 | 1075639 | − | ID = TGME49_230870; | 1815 |
| | | | | length = 4125 | |
| TGME49_chrX | 5029202 | 5030634 | − | ID = TGME49_235660; | 1816 |
| | | | | length = 1432 | |
| TGME49_chrVIIb | 4838297 | 4840986 | − | ID = TGME49_255420; | 1817 |
| | | | | length = 2689 | |
| TGME49_chrVIII | 574328 | 576120 | − | ID = TGME49_230070; | 1818 |
| | | | | length = 1792 | |
| TGME49_chrVIIa | 1434529 | 1437210 | + | ID = TGME49_205370; | 1819 |
| | | | | length = 2681 | |
| TGME49_chrVIIb | 3184714 | 3187955 | − | ID = TGME49_258790; | 1820 |
| | | | | length = 3241 | |
| TGME49_chrVIIb | 452002 | 453575 | + | ID = TGME49_263595; | 1821 |
| | | | | length = 1573 | |
| TGME49_chrII | 1799177 | 1801013 | − | ID = TGME49_297460; | 1822 |
| | | | | length = 1836 | |
| TGME49_chrIX | 1348019 | 1350404 | + | ID = TGME49_266010; | 1823 |
| | | | | length = 2385 | |
| TGME49_chrXI | 422982 | 426252 | − | ID = TGME49_308990; | 1824 |
| | | | | length = 3270 | |
| TGME49_chrVIIa | 2638640 | 2643428 | + | ID = TGME49_203250; | 1825 |
| | | | | length = 4788 | |
| TGME49_chrXII | 3112106 | 3117089 | + | ID = TGME49_247030; | 1826 |
| | | | | length = 4983 | |
| TGME49_chrV | 1786117 | 1787739 | + | ID = TGME49_286550; | 1827 |
| | | | | length = 1622 | |
| TGME49_chrIb | 1636369 | 1639495 | − | ID = TGME49_321690; | 1828 |
| | | | | length = 3126 | |
| TGME49_chrXII | 4744062 | 4745703 | − | ID = TGME49_249698; | 1829 |
| | | | | length = 1641 | |
| TGME49_chrXI | 1049288 | 1054295 | − | ID = TGME49_310080; | 1830 |
| | | | | length = 5007 | |
| TGME49_chrXII | 2997364 | 3001613 | + | ID = TGME49_246800; | 1831 |
| | | | | length = 4249 | |
| TGME49_chrVIIa | 276480 | 280573 | − | ID = TGME49_280600; | 1832 |
| | | | | length = 4093 | |
| TGME49_chrVIIa | 2044834 | 2047221 | − | ID = TGME49_204040; | 1833 |
| | | | | length = 2387 | |
| TGME49_chrIV | 1443575 | 1445262 | − | ID = TGME49_318290; | 1834 |
| | | | | length = 1687 | |
| TGME49_chrVIIb | 1358543 | 1363574 | − | ID = TGME49_262125; | 1835 |
| | | | | length = 5031 | |
| TGME49_chrXII | 1889739 | 1893641 | − | ID = TGME49_217520; | 1836 |
| | | | | length = 3902 | |
| TGME49_chrVIII | 6218156 | 6222777 | + | ID = TGME49_268890; | 1837 |
| | | | | length = 4621 | |
| TGME49_chrIX | 212823 | 215942 | − | ID = TGME49_279390; | 1838 |
| | | | | length = 3119 | |
| TGME49_chrV | 3074668 | 3075701 | − | ID = TGME49_283570; | 1839 |
| | | | | length = 1033 | |
| TGME49_chrVIIa | 329088 | 331013 | − | ID = TGME49_280540; | 1840 |
| | | | | length = 1925 | |
| TGME49_chrXII | 1135859 | 1136707 | − | ID = TGME49_219090; | 1841 |
| | | | | length = 848 | |
| TGME49_chrXI | 562038 | 563532 | − | ID = TGME49_309210; | 1842 |
| | | | | length = 1494 | |
| TGME49_chrXI | 5079763 | 5082015 | + | ID = TGME49_315930; | 1843 |
| | | | | length = 2252 | |
| TGME49_chrXII | 4230010 | 4231788 | + | ID = TGME49_248870; | 1844 |
| | | | | length = 1778 | |
| TGME49_chrVIII | 347018 | 350776 | + | ID = TGME49_229640; | 1845 |
| | | | | length = 3758 | |
| TGME49_chrIX | 3368958 | 3370369 | + | ID = TGME49_289670; | 1846 |
| | | | | length = 1411 | |
| TGME49_chrVIII | 2687436 | 2690407 | − | ID = TGME49_233500; | 1847 |
| | | | | length = 2971 | |
| TGME49_chrVIIb | 611076 | 613065 | − | ID = TGME49_263360; | 1848 |
| | | | | length = 1989 | |
| TGME49_chrVIIb | 3970006 | 3973027 | − | ID = TGME49_257568; | 1849 |
| | | | | length = 3021 | |
| TGME49_chrVIIb | 1325239 | 1328902 | + | ID = TGME49_262160; | 1850 |
| | | | | length = 3663 | |
| TGME49_chrVIII | 4413113 | 4415505 | − | ID = TGME49_271760; | 1851 |
| | | | | length = 2392 | |
| TGME49_chrVIIa | 3814503 | 3816891 | + | ID = TGME49_201760; | 1852 |
| | | | | length = 2388 | |
| TGME49_chrXI | 4058535 | 4061396 | + | ID = TGME49_314400; | 1853 |
| | | | | length = 2861 | |
| TGME49_chrXI | 1854395 | 1859046 | + | ID = TGME49_311210; | 1854 |
| | | | | length = 4651 | |
| TGME49_chrX | 4632110 | 4634094 | + | ID = TGME49_235140; | 1855 |
| | | | | length = 1984 | |
| TGME49_chrIX | 5815296 | 5819202 | + | ID = TGME49_306190; | 1856 |
| | | | | length = 3906 | |
| TGME49_chrVIIb | 2908955 | 2910810 | − | ID = TGME49_259180; | 1857 |
| | | | | length = 1855 | |
| TGME49_chrVIII | 2421212 | 2423837 | − | ID = TGME49_233100; | 1858 |
| | | | | length = 2625 | |
| TGME49_chrXI | 431000 | 433353 | − | ID = TGME49_309000; | 1859 |
| | | | | length = 2353 | |
| TGME49_chrXI | 2271030 | 2275657 | + | ID = TGME49_311770; | 1860 |
| | | | | length = 4627 | |
| TGME49_chrVIII | 4332070 | 4335007 | + | ID = TGME49_271850; | 1861 |
| | | | | length = 2937 | |
| TGME49_chrXII | 4989160 | 4990606 | + | ID = TGME49_250020; | 1862 |
| | | | | length = 1446 | |
| TGME49_chrXII | 2677358 | 2679539 | + | ID = TGME49_246130; | 1863 |
| | | | | length = 2181 | |
| TGME49_chrVIIa | 305043 | 307438 | + | ID = TGME49_280550; | 1864 |
| | | | | length = 2395 | |
| TGME49_chrXI | 4668181 | 4671233 | + | ID = TGME49_315360; | 1865 |
| | | | | length = 3052 | |
| TGME49_chrX | 2035088 | 2038686 | + | ID = TGME49_225790; | 1866 |
| | | | | length = 3598 | |
| TGME49_chrVIIb | 3259872 | 3262590 | − | ID = TGME49_258690; | 1867 |
| | | | | length = 2718 | |
| TGME49_chrXII | 4912829 | 4914644 | − | ID = TGME49_249860; | 1868 |
| | | | | length = 1815 | |
| TGME49_chrVI | 2440086 | 2442352 | − | ID = TGME49_243200; | 1869 |
| | | | | length = 2266 | |
| TGME49_chrVIII | 3880336 | 3884798 | + | ID = TGME49_272560; | 1870 |
| | | | | length = 4462 | |
| TGME49_chrXII | 3831607 | 3833051 | − | ID = TGME49_248390; | 1871 |
| | | | | length = 1444 | |
| TGME49_chrXI | 2262796 | 2265505 | − | ID = TGME49_311760; | 1872 |
| | | | | length = 2709 | |
| TGME49_chrIa | 741460 | 745719 | − | ID = TGME49_294240; | 1873 |
| | | | | length = 4259 | |
| TGME49_chrIb | 1782617 | 1787380 | − | ID = TGME49_321470; | 1874 |
| | | | | length = 4763 | |
| TGME49_chrVIIa | 1669931 | 1670876 | − | ID = TGME49_205020; | 1875 |
| | | | | length = 945 | |
| TGME49_chrVIII | 6326491 | 6329179 | − | ID = TGME49_268770; | 1876 |
| | | | | length = 2688 | |
| TGME49_chrV | 166266 | 168190 | − | ID = TGME49_220145; | 1877 |
| | | | | length = 1924 | |
| TGME49_chrIV | 576195 | 580895 | − | ID = TGME49_320020; | 1878 |
| | | | | length = 4700 | |
| TGME49_chrVIII | 1298224 | 1301679 | + | ID = TGME49_231175; | 1879 |
| | | | | length = 3455 | |
| TGME49_chrVIIb | 4964424 | 4968613 | − | ID = TGME49_255250; | 1880 |
| | | | | length = 4189 | |
| TGME49_chrIX | 709923 | 711569 | − | ID = TGME49_267340; | 1881 |
| | | | | length = 1646 | |
| TGME49_chrX | 4556936 | 4560782 | + | ID = TGME49_234970; | 1882 |
| | | | | length = 3846 | |
| TGME49_chrVIIb | 393977 | 397643 | − | ID = TGME49_263690; | 1883 |
| | | | | length = 3666 | |
| TGME49_chrXII | 5422931 | 5424831 | − | ID = TGME49_251480; | 1884 |
| | | | | length = 1900 | |
| TGME49_chrIX | 914298 | 915352 | + | ID = TGME49_266880; | 1885 |
| | | | | length = 1054 | |
| TGME49_chrV | 428812 | 432815 | + | ID = TGME49_220520; | 1886 |
| | | | | length = 4003 | |
| TGME49_chrXI | 6404954 | 6409920 | − | ID = TGME49_216080; | 1887 |
| | | | | length = 4966 | |
| TGME49_chrII | 861618 | 866482 | − | ID = TGME49_222080; | 1888 |
| | | | | length = 4864 | |
| TGME49_chrXII | 5669867 | 5671445 | + | ID = TGME49_251930; | 1889 |
| | | | | length = 1578 | |
| TGME49_chrVI | 2532929 | 2537138 | + | ID = TGME49_243310; | 1890 |
| | | | | length = 4209 | |
| TGME49_chrIX | 3807821 | 3810806 | − | ID = TGME49_290640; | 1891 |
| | | | | length = 2985 | |
| TGME49_chrVIIa | 901698 | 904817 | − | ID = TGME49_206540; | 1892 |
| | | | | length = 3119 | |
| TGME49_chrIX | 1847463 | 1852082 | + | ID = TGME49_265000; | 1893 |
| | | | | length = 4619 | |
| TGME49_chrVIIa | 2454532 | 2456953 | + | ID = TGME49_203510; | 1894 |
| | | | | length = 2421 | |
| TGME49_chrVIII | 3604698 | 3606638 | + | ID = TGME49_273290; | 1895 |
| | | | | length = 1940 | |
| TGME49_chrVIII | 2234752 | 2236893 | − | ID = TGME49_232700; | 1896 |
| | | | | length = 2141 | |
| TGME49_chrVI | 2449321 | 2450374 | + | ID = TGME49_243220; | 1897 |
| | | | | length = 1053 | |
| TGME49_chrX | 6937184 | 6938923 | + | ID = TGME49_215385; | 1898 |
| | | | | length = 1739 | |
| TGME49_chrIX | 680988 | 684814 | − | ID = TGME49_267380; | 1899 |
| | | | | length = 3826 | |
| TGME49_chrVIIa | 2261027 | 2263156 | − | ID = TGME49_203760; | 1900 |
| | | | | length = 2129 | |
| TGME49_chrIX | 3145275 | 3148375 | − | ID = TGME49_289280; | 1901 |
| | | | | length = 3100 | |
| TGME49_chrVIIa | 2489722 | 2491017 | + | ID = TGME49_203470; | 1902 |
| | | | | length = 1295 | |
| TGME49_chrVIII | 1769885 | 1774294 | − | ID = TGME49_232020; | 1903 |
| | | | | length = 4409 | |
| TGME49_chrVIIa | 3993533 | 3996332 | − | ID = TGME49_201160; | 1904 |
| | | | | length = 2799 | |
| TGME49_chrX | 4514799 | 4516300 | + | ID = TGME49_234660; | 1905 |
| | | | | length = 1501 | |
| TGME49_chrV | 860484 | 863029 | − | ID = TGME49_213100; | 1906 |
| | | | | length = 2545 | |
| TGME49_chrVIIb | 3591281 | 3593195 | − | ID = TGME49_258085; | 1907 |
| | | | | length = 1914 | |
| TGME49_chrIV | 1514865 | 1518877 | + | ID = TGME49_318160; | 1908 |
| | | | | length = 4012 | |
| TGME49_chrX | 3279666 | 3282705 | − | ID = TGME49_224180; | 1909 |
| | | | | length = 3039 | |
| TGME49_chrVIII | 975775 | 977748 | + | ID = TGME49_230700; | 1910 |
| | | | | length = 1973 | |
| TGME49_chrVIIb | 3085729 | 3088120 | − | ID = TGME49_258940; | 1911 |
| | | | | length = 2391 | |
| TGME49_chrXII | 529861 | 532149 | + | ID = TGME49_308050; | 1912 |
| | | | | length = 2288 | |
| TGME49_chrV | 239790 | 243541 | − | ID = TGME49_220240; | 1913 |
| | | | | length = 3751 | |
| TGME49_chrII | 1461513 | 1463416 | − | ID = TGME49_223125; | 1914 |
| | | | | length = 1903 | |
| TGME49_chrXI | 5222117 | 5224159 | − | ID = TGME49_316280; | 1915 |
| | | | | length = 2042 | |
| TGME49_chrII | 1468306 | 1470065 | + | ID = TGME49_223140; | 1916 |
| | | | | length = 1759 | |
| TGME49_chrXI | 2353715 | 2358433 | + | ID = TGME49_311890; | 1917 |
| | | | | length = 4718 | |
| TGME49_chrII | 1582123 | 1586805 | + | ID = TGME49_297170; | 1918 |
| | | | | length = 4682 | |
| TGME49_chrIX | 199072 | 203223 | + | ID = TGME49_279400; | 1919 |
| | | | | length = 4151 | |
| TGME49_chrIV | 284392 | 286223 | − | ID = TGME49_320525; | 1920 |
| | | | | length = 1831 | |
| TGME49_chrIX | 4842934 | 4844771 | − | ID = TGME49_210370; | 1921 |
| | | | | length = 1837 | |
| TGME49_chrXI | 4452167 | 4456567 | − | ID = TGME49_314970; | 1922 |
| | | | | length = 4400 | |
| TGME49_chrXI | 2499772 | 2502355 | − | ID = TGME49_312200; | 1923 |
| | | | | length = 2583 | |
| TGME49_chrIb | 890079 | 892589 | − | ID = TGME49_208830; | 1924 |
| | | | | length = 2510 | |
| TGME49_chrVIII | 1966362 | 1967945 | − | ID = TGME49_232230; | 1925 |
| | | | | length = 1583 | |
| TGME49_chrVI | 989945 | 991803 | − | ID = TGME49_239880; | 1926 |
| | | | | length = 1858 | |
| TGME49_chrVIIb | 3518895 | 3521575 | + | ID = TGME49_258200; | 1927 |
| | | | | length = 2680 | |
| TGME49_chrV | 216186 | 217667 | − | ID = TGME49_220208; | 1928 |
| | | | | length = 1481 | |
| TGME49_chrXII | 5640276 | 5641811 | + | ID = TGME49_251885; | 1929 |
| | | | | length = 1535 | |
| TGME49_chrXII | 3826538 | 3828410 | − | ID = TGME49_248360; | 1930 |
| | | | | length = 1872 | |
| TGME49_chrIX | 736629 | 737403 | + | ID = TGME49_267290; | 1931 |
| | | | | length = 774 | |
| TGME49_chrV | 578793 | 583050 | − | ID = TGME49_212740; | 1932 |
| | | | | length = 4257 | |
| TGME49_chrXII | 2886732 | 2889046 | + | ID = TGME49_246620; | 1933 |
| | | | | length = 2314 | |
| TGME49_chrXII | 4176365 | 4178211 | + | ID = TGME49_248800; | 1934 |
| | | | | length = 1846 | |
| TGME49_chrVIII | 5063747 | 5066564 | − | ID = TGME49_270710; | 1935 |
| | | | | length = 2817 | |
| TGME49_chrV | 1907332 | 1909721 | + | ID = TGME49_286220; | 1936 |
| | | | | length = 2389 | |
| TGME49_chrXI | 3397474 | 3401749 | − | ID = TGME49_313440; | 1937 |
| | | | | length = 4275 | |
| TGME49_chrVIIa | 3861824 | 3865091 | + | ID = TGME49_201670; | 1938 |
| | | | | length = 3267 | |
| TGME49_chrXII | 5569684 | 5571506 | − | ID = TGME49_251760; | 1939 |
| | | | | length = 1822 | |
| TGME49_chrXII | 2225921 | 2229690 | + | ID = TGME49_217920; | 1940 |
| | | | | length = 3769 | |
| TGME49_chrIX | 3307872 | 3310644 | + | ID = TGME49_289570; | 1941 |
| | | | | length = 2772 | |
| TGME49_chrIa | 156682 | 159073 | + | ID = TGME49_293200; | 1942 |
| | | | | length = 2391 | |
| TGME49_chrXII | 3881332 | 3885535 | − | ID = TGME49_248470; | 1943 |
| | | | | length = 4203 | |
| TGME49_chrX | 418777 | 421046 | − | ID = TGME49_228330; | 1944 |
| | | | | length = 2269 | |
| TGME49_chrV | 2274025 | 2276420 | − | ID = TGME49_285720; | 1945 |
| | | | | length = 2395 | |
| TGME49_chrXI | 2992217 | 2995109 | − | ID = TGME49_312940; | 1946 |
| | | | | length = 2892 | |
| TGME49_chrIa | 390048 | 391767 | − | ID = TGME49_293520; | 1947 |
| | | | | length = 1719 | |
| TGME49_chrVIII | 6445709 | 6450718 | − | ID = TGME49_268450; | 1948 |
| | | | | length = 5009 | |
| TGME49_chrVIIa | 3924398 | 3927902 | − | ID = TGME49_201270; | 1949 |
| | | | | length = 3504 | |
| TGME49_chrIX | 2612526 | 2615415 | + | ID = TGME49_288560; | 1950 |
| | | | | length = 2889 | |
| TGME49_chrIX | 5394025 | 5396129 | − | ID = TGME49_305450; | 1951 |
| | | | | length = 2104 | |
| TGME49_chrVI | 2449321 | 2454332 | + | ID = TGME49_243240; | 1952 |
| | | | | length = 5011 | |
| TGME49_chrX | 1141678 | 1144996 | + | ID = TGME49_227000; | 1953 |
| | | | | length = 3318 | |
| TGME49_chrVIIa | 3580633 | 3582769 | − | ID = TGME49_202140; | 1954 |
| | | | | length = 2136 | |
| TGME49_chrVIII | 712149 | 714535 | + | ID = TGME49_230340; | 1955 |
| | | | | length = 2386 | |
| TGME49_chrX | 653775 | 657724 | − | ID = TGME49_228050; | 1956 |
| | | | | length = 3949 | |
| TGME49_chrX | 1529076 | 1530823 | − | ID = TGME49_226580; | 1957 |
| | | | | length = 1747 | |
| TGME49_chrVIIa | 3334651 | 3338417 | − | ID = TGME49_202430; | 1958 |
| | | | | length = 3766 | |
| TGME49_chrVIIb | 2163201 | 2165337 | − | ID = TGME49_260570; | 1959 |
| | | | | length = 2136 | |
| TGME49_chrVIIb | 1043848 | 1045795 | + | ID = TGME49_262740; | 1960 |
| | | | | length = 1947 | |
| TGME49_chrX | 1311053 | 1316055 | + | ID = TGME49_226825; | 1961 |
| | | | | length = 5002 | |
| TGME49_chrVIII | 3977496 | 3979941 | − | ID = TGME49_272430; | 1962 |
| | | | | length = 2445 | |
| TGME49_chrV | 1789192 | 1791334 | + | ID = TGME49_286530; | 1963 |
| | | | | length = 2142 | |
| TGME49_chrVIIb | 4173922 | 4175290 | + | ID = TGME49_257170; | 1964 |
| | | | | length = 1368 | |
| TGME49_chrXI | 4591396 | 4593178 | + | ID = TGME49_315230; | 1965 |
| | | | | length = 1782 | |
| TGME49_chrVIII | 249237 | 251305 | − | ID = TGME49_229420; | 1966 |
| | | | | length = 2068 | |
| TGME49_chrV | 646486 | 648649 | − | ID = TGME49_212840; | 1967 |
| | | | | length = 2163 | |
| TGME49_chrXI | 1120330 | 1122240 | + | ID = TGME49_310180; | 1968 |
| | | | | length = 1910 | |
| TGME49_chrXI | 5575321 | 5577263 | − | ID = TGME49_316760; | 1969 |
| | | | | length = 1942 | |
| TGME49_chrVIII | 2874613 | 2878765 | − | ID = TGME49_233870; | 1970 |
| | | | | length = 4152 | |
| TGME49_chrXII | 5511516 | 5512810 | + | ID = TGME49_251650; | 1971 |
| | | | | length = 1294 | |
| TGME49_chrIV | 1628157 | 1629047 | + | ID = TGME49_211675; | 1972 |
| | | | | length = 890 | |
| TGME49_chrV | 1422629 | 1425901 | − | ID = TGME49_213900; | 1973 |
| | | | | length = 3272 | |
| TGME49_chrVIIa | 186501 | 190276 | + | ID = TGME49_280670; | 1974 |
| | | | | length = 3775 | |
| TGME49_chrVIIa | 929557 | 930012 | − | ID = TGME49_206500; | 1975 |
| | | | | length = 455 | |
| TGME49_chrIX | 2971270 | 2973519 | + | ID = TGME49_289080; | 1976 |
| | | | | length = 2249 | |
| TGME49_chrVIII | 3930340 | 3931981 | − | ID = TGME49_272510; | 1977 |
| | | | | length = 1641 | |
| TGME49_chrXI | 181107 | 183028 | − | ID = TGME49_306930; | 1978 |
| | | | | length = 1921 | |
| TGME49_chrIX | 1649663 | 1652849 | + | ID = TGME49_265255; | 1979 |
| | | | | length = 3186 | |
| TGME49_chrXII | 1073927 | 1076130 | + | ID = TGME49_219200; | 1980 |
| | | | | length = 2203 | |
| TGME49_chrIV | 2471037 | 2473860 | + | ID = TGME49_301430; | 1981 |
| | | | | length = 2823 | |
| TGME49_chrXII | 6364866 | 6366334 | + | ID = TGME49_278005; | 1982 |
| | | | | length = 1468 | |
| TGME49_chrIb | 842071 | 845707 | − | ID = TGME49_208740; | 1983 |
| | | | | length = 3636 | |
| TGME49_chrVI | 790118 | 795087 | + | ID = TGME49_239600; | 1984 |
| | | | | length = 4969 | |
| TGME49_chrX | 1424298 | 1426804 | + | ID = TGME49_226700; | 1985 |
| | | | | length = 2506 | |
| TGME49_chrV | 560109 | 564542 | − | ID = TGME49_287490; | 1986 |
| | | | | length = 4433 | |
| TGME49_chrX | 2483670 | 2486271 | + | ID = TGME49_225120; | 1987 |
| | | | | length = 2601 | |
| TGME49_chrVIIa | 1393725 | 1398244 | − | ID = TGME49_205460; | 1988 |
| | | | | length = 4519 | |
| TGME49_chrXII | 1092592 | 1094200 | + | ID = TGME49_219175; | 1989 |
| | | | | length = 1608 | |
| TGME49_chrX | 705828 | 707714 | − | ID = TGME49_227960; | 1990 |
| | | | | length = 1886 | |
| TGME49_chrIX | 4404496 | 4406990 | − | ID = TGME49_291910; | 1991 |
| | | | | length = 2494 | |
| TGME49_chrX | 6998185 | 6999653 | − | ID = TGME49_215510; | 1992 |
| | | | | length = 1468 | |
| TGME49_chrX | 4525519 | 4527356 | + | ID = TGME49_234680; | 1993 |
| | | | | length = 1837 | |
| TGME49_chrX | 1364413 | 1366308 | + | ID = TGME49_226780; | 1994 |
| | | | | length = 1895 | |
| TGME49_chrVIIb | 1434482 | 1435459 | − | ID = TGME49_262000; | 1995 |
| | | | | length = 977 | |
| TGME49_chrVIII | 3198328 | 3202978 | − | ID = TGME49_273885; | 1996 |
| | | | | length = 4650 | |
| TGME49_chrVIII | 5891946 | 5894191 | + | ID = TGME49_269320; | 1997 |
| | | | | length = 2245 | |
| TGME49_chrII | 1801273 | 1805605 | + | ID = TGME49_297470; | 1998 |
| | | | | length = 4332 | |
| TGME49_chrII | 1583366 | 1587369 | − | ID = TGME49_297160; | 1999 |
| | | | | length = 4003 | |
| TGME49_chrXI | 1015690 | 1017565 | − | ID = TGME49_310030; | 2000 |
| | | | | length = 1875 | |
| TGME49_chrVIII | 284128 | 286310 | + | ID = TGME49_229470; | 2001 |
| | | | | length = 2182 | |
| TGME49_chrIV | 206127 | 211040 | − | ID = TGME49_320610; | 2002 |
| | | | | length = 4913 | |
| TGME49_chrIV | 954032 | 956564 | − | ID = TGME49_319510; | 2003 |
| | | | | length = 2532 | |
| TGME49_chrX | 1102477 | 1104098 | − | ID = TGME49_227080; | 2004 |
| | | | | length = 1621 | |
| TGME49_chrIX | 3667981 | 3670156 | − | ID = TGME49_290250; | 2005 |
| | | | | length = 2175 | |
| TGME49_chrVIII | 6519638 | 6522878 | + | ID = TGME49_268360; | 2006 |
| | | | | length = 3240 | |
| TGME49_chrXI | 5440111 | 5443988 | − | ID = TGME49_316620; | 2007 |
| | | | | length = 3877 | |
| TGME49_chrVIIa | 2177416 | 2179962 | + | ID = TGME49_203840; | 2008 |
| | | | | length = 2546 | |
| TGME49_chrVIII | 5084209 | 5085825 | + | ID = TGME49_270680; | 2009 |
| | | | | length = 1616 | |
| TGME49_chrXI | 2995464 | 2997405 | + | ID = TGME49_312960; | 2010 |
| | | | | length = 1941 | |
| TGME49_chrII | 1625923 | 1628671 | + | ID = TGME49_297230; | 2011 |
| | | | | length = 2748 | |
| TGME49_chrXI | 1618900 | 1619991 | + | ID = TGME49_310830; | 2012 |
| | | | | length = 1091 | |
| TGME49_chrXII | 6751504 | 6754864 | − | ID = TGME49_277060; | 2013 |
| | | | | length = 3360 | |
| TGME49_chrXI | 6165715 | 6168615 | + | ID = TGME49_216410; | 2014 |
| | | | | length = 2900 | |
| TGME49_chrV | 2636647 | 2639120 | + | ID = TGME49_284645; | 2015 |
| | | | | length = 2473 | |
| TGME49_chrVIIb | 4473497 | 4476055 | + | ID = TGME49_256770; | 2016 |
| | | | | length = 2558 | |
| TGME49_chrVIII | 5253838 | 5255754 | − | ID = TGME49_270350; | 2017 |
| | | | | length = 1916 | |
| TGME49_chrVI | 995195 | 999093 | − | ID = TGME49_239890; | 2018 |
| | | | | length = 3898 | |
| TGME49_chrVI | 1546743 | 1551741 | − | ID = TGME49_240900; | 2019 |
| | | | | length = 4998 | |
| TGME49_chrVIIb | 3570823 | 3572905 | − | ID = TGME49_258110; | 2020 |
| | | | | length = 2082 | |
| TGME49_chrIX | 1687388 | 1690438 | + | ID = TGME49_265220; | 2021 |
| | | | | length = 3050 | |
| TGME49_chrVIII | 1861928 | 1864368 | + | ID = TGME49_232120; | 2022 |
| | | | | length = 2440 | |
| TGME49_chrV | 488616 | 490907 | + | ID = TGME49_220620; | 2023 |
| | | | | length = 2291 | |
| TGME49_chrVI | 3402464 | 3405837 | − | ID = TGME49_244620; | 2024 |
| | | | | length = 3373 | |
| TGME49_chrV | 469162 | 471286 | + | ID = TGME49_220585; | 2025 |
| | | | | length = 2124 | |
| TGME49_chrX | 448104 | 450711 | − | ID = TGME49_228270; | 2026 |
| | | | | length = 2607 | |
| TGME49_chrIa | 840385 | 841380 | − | ID = TGME49_294350; | 2027 |
| | | | | length = 995 | |
| TGME49_chrXI | 1642170 | 1643093 | + | ID = TGME49_310875; | 2028 |
| | | | | length = 923 | |
| TGME49_chrVIII | 4995719 | 4997442 | + | ID = TGME49_270780; | 2029 |
| | | | | length = 1723 | |
| TGME49_chrVI | 927570 | 932508 | − | ID = TGME49_239800; | 2030 |
| | | | | length = 4938 | |
| TGME49_chrVIIa | 1843313 | 1845988 | + | ID = TGME49_204370; | 2031 |
| | | | | length = 2675 | |
| TGME49_chrX | 4549606 | 4553931 | + | ID = TGME49_234940; | 2032 |
| | | | | length = 4325 | |
| TGME49_chrVI | 1708785 | 1711030 | + | ID = TGME49_241610; | 2033 |
| | | | | length = 2245 | |
| TGME49_chrX | 4938972 | 4940429 | − | ID = TGME49_235540; | 2034 |
| | | | | length = 1457 | |
| TGME49_chrVIIb | 164856 | 169420 | + | ID = TGME49_264120; | 2035 |
| | | | | length = 4564 | |
| TGME49_chrIX | 4027598 | 4029731 | + | ID = TGME49_291000; | 2036 |
| | | | | length = 2133 | |
| TGME49_chrVIIa | 1419599 | 1421687 | + | ID = TGME49_205402; | 2037 |
| | | | | length = 2088 | |
| TGME49_chrXI | 436362 | 437746 | + | ID = TGME49_309020; | 2038 |
| | | | | length = 1384 | |
| TGME49_chrXI | 5176299 | 5179174 | + | ID = TGME49_316190; | 2039 |
| | | | | length = 2875 | |
| TGME49_chrVIIb | 2712120 | 2714104 | − | ID = TGME49_259690; | 2040 |
| | | | | length = 1984 | |
| TGME49_chrIb | 1450314 | 1450964 | + | ID = TGME49_209780; | 2041 |
| | | | | length = 650 | |
| TGME49_chrXII | 5939359 | 5941323 | − | ID = TGME49_278680; | 2042 |
| | | | | length = 1964 | |
| TGME49_chrXII | 602054 | 603985 | − | ID = TGME49_219850; | 2043 |
| | | | | length = 1931 | |
| TGME49_chrIX | 4431878 | 4435031 | + | ID = TGME49_291960; | 2044 |
| | | | | length = 3153 | |
| TGME49_chrV | 2167500 | 2172395 | − | ID = TGME49_285860; | 2045 |
| | | | | length = 4895 | |
| TGME49_chrIX | 6049752 | 6053318 | + | ID = TGME49_306400; | 2046 |
| | | | | length = 3566 | |
| TGME49_chrVIIb | 1662568 | 1663864 | − | ID = TGME49_261550; | 2047 |
| | | | | length = 1296 | |
| TGME49_chrX | 2807197 | 2808264 | + | ID = TGME49_224820; | 2048 |
| | | | | length = 1067 | |
| TGME49_chrIX | 1941820 | 1943728 | − | ID = TGME49_264875; | 2049 |
| | | | | length = 1908 | |
| TGME49_chrVI | 41637 | 46647 | + | ID = TGME49_238070; | 2050 |
| | | | | length = 5010 | |
| TGME49_chrXI | 6420835 | 6425390 | − | ID = TGME49_216070; | 2051 |
| | | | | length = 4555 | |
| TGME49_chrIX | 469404 | 472283 | + | ID = TGME49_267670; | 2052 |
| | | | | length = 2879 | |
| TGME49_chrX | 6007176 | 6009045 | − | ID = TGME49_237595; | 2053 |
| | | | | length = 1869 | |
| TGME49_chrXI | 5608472 | 5610173 | − | ID = TGME49_316900; | 2054 |
| | | | | length = 1701 | |
| TGME49_chrX | 6171995 | 6176026 | + | ID = TGME49_214250; | 2055 |
| | | | | length = 4031 | |
| TGME49_chrIX | 2786348 | 2787500 | − | ID = TGME49_288870; | 2056 |
| | | | | length = 1152 | |
| TGME49_chrIX | 4071340 | 4075503 | − | ID = TGME49_291020; | 2057 |
| | | | | length = 4163 | |
| TGME49_chrXI | 362611 | 365152 | − | ID = TGME49_308920; | 2058 |
| | | | | length = 2541 | |
| TGME49_chrXII | 6038102 | 6039598 | − | ID = TGME49_278540; | 2059 |
| | | | | length = 1496 | |
| TGME49_chrIa | 1383866 | 1386224 | + | ID = TGME49_295080; | 2060 |
| | | | | length = 2358 | |
| TGME49_chrXI | 1255210 | 1257092 | + | ID = TGME49_310320; | 2061 |
| | | | | length = 1882 | |
| TGME49_chrX | 5800930 | 5803170 | − | ID = TGME49_237230; | 2062 |
| | | | | length = 2240 | |
| TGME49_chrIX | 3725934 | 3727613 | + | ID = TGME49_290460; | 2063 |
| | | | | length = 1679 | |
| TGME49_chrVI | 831846 | 833871 | − | ID = TGME49_239680; | 2064 |
| | | | | length = 2025 | |
| TGME49_chrX | 184156 | 186759 | − | ID = TGME49_228730; | 2065 |
| | | | | length = 2603 | |
| TGME49_chrIX | 608936 | 612060 | − | ID = TGME49_267510; | 2066 |
| | | | | length = 3124 | |
| TGME49_chrVIII | 2604042 | 2605811 | + | ID = TGME49_233350; | 2067 |
| | | | | length = 1769 | |
| TGME49_chrVI | 3370292 | 3371967 | + | ID = TGME49_244580; | 2068 |
| | | | | length = 1675 | |
| TGME49_chrVIIb | 4313028 | 4313787 | − | ID = TGME49_256975; | 2069 |
| | | | | length = 759 | |
| TGME49_chrXI | 5775427 | 5777232 | − | ID = TGME49_216960; | 2070 |
| | | | | length = 1805 | |
| TGME49_chrVIIb | 2103737 | 2106170 | − | ID = TGME49_260640; | 2071 |
| | | | | length = 2433 | |
| TGME49_chrX | 1795604 | 1797542 | + | ID = TGME49_226100; | 2072 |
| | | | | length = 1938 | |
| TGME49_chrX | 418101 | 419981 | + | ID = TGME49_228320; | 2073 |
| | | | | length = 1880 | |
| TGME49_chrXI | 1340616 | 1343000 | + | ID = TGME49_310440; | 2074 |
| | | | | length = 2384 | |
| TGME49_chrIX | 3355308 | 3357831 | + | ID = TGME49_289630; | 2075 |
| | | | | length = 2523 | |
| TGME49_chrVIII | 2192583 | 2194733 | + | ID = TGME49_232620; | 2076 |
| | | | | length = 2150 | |
| TGME49_chrVIIb | 4636561 | 4638383 | − | ID = TGME49_255900; | 2077 |
| | | | | length = 1822 | |
| TGME49_chrVIII | 5588163 | 5590158 | + | ID = TGME49_269820; | 2078 |
| | | | | length = 1995 | |
| TGME49_chrVI | 3247506 | 3250212 | − | ID = TGME49_244408; | 2079 |
| | | | | length = 2706 | |
| TGME49_chrVIIa | 2051496 | 2056236 | − | ID = TGME49_204010; | 2080 |
| | | | | length = 4740 | |
| TGME49_chrVIII | 491985 | 494558 | + | ID = TGME49_229980; | 2081 |
| | | | | length = 2573 | |
| TGME49_chrVIIa | 2056536 | 2058106 | + | ID = TGME49_203985; | 2082 |
| | | | | length = 1570 | |
| TGME49_chrVIIa | 140276 | 144404 | + | ID = TGME49_280725; | 2083 |
| | | | | length = 4128 | |
| TGME49_chrVIII | 2250698 | 2252771 | − | ID = TGME49_232750; | 2084 |
| | | | | length = 2073 | |
| TGME49_chrVIII | 5887047 | 5889397 | − | ID = TGME49_269340; | 2085 |
| | | | | length = 2350 | |
| TGME49_chrXI | 1052803 | 1054295 | − | ID = TGME49_310090; | 2086 |
| | | | | length = 1492 | |
| TGME49_chrVI | 1279772 | 1281594 | + | ID = TGME49_240440; | 2087 |
| | | | | length = 1822 | |
| TGME49_chrVIIb | 756456 | 758017 | − | ID = TGME49_263160; | 2088 |
| | | | | length = 1561 | |
| TGME49_chrII | 1811993 | 1815135 | + | ID = TGME49_297480; | 2089 |
| | | | | length = 3142 | |
| TGME49_chrVIIa | 990948 | 995424 | − | ID = TGME49_206430; | 2090 |
| | | | | length = 4476 | |
| TGME49_chrV | 2986113 | 2990861 | − | ID = TGME49_283770; | 2091 |
| | | | | length = 4748 | |
| TGME49_chrXII | 850493 | 852277 | − | ID = TGME49_219560; | 2092 |
| | | | | length = 1784 | |
| TGME49_chrIV | 1344162 | 1349005 | − | ID = TGME49_318430; | 2093 |
| | | | | length = 4843 | |
| TGME49_chrVIIb | 1056333 | 1059103 | − | ID = TGME49_262730; | 2094 |
| | | | | length = 2770 | |
| TGME49_chrVIII | 4661713 | 4663360 | − | ID = TGME49_271170; | 2095 |
| | | | | length = 1647 | |
| TGME49_chrXI | 5942768 | 5945248 | + | ID = TGME49_216720; | 2096 |
| | | | | length = 2480 | |
| TGME49_chrXI | 1779520 | 1783053 | + | ID = TGME49_311075; | 2097 |
| | | | | length = 3533 | |
| TGME49_chrIb | 1820664 | 1822422 | + | ID = TGME49_321420; | 2098 |
| | | | | length = 1758 | |
| TGME49_chrX | 1944153 | 1948496 | + | ID = TGME49_225900; | 2099 |
| | | | | length = 4343 | |
| TGME49_chrVIIa | 1201335 | 1202972 | + | ID = TGME49_205710; | 2100 |
| | | | | length = 1637 | |
| TGME49_chrXI | 4872334 | 4874729 | − | ID = TGME49_315640; | 2101 |
| | | | | length = 2395 | |
| TGME49_chrVIII | 1554633 | 1557549 | + | ID = TGME49_231815; | 2102 |
| | | | | length = 2916 | |
| TGME49_chrXI | 3051809 | 3056712 | + | ID = TGME49_313030; | 2103 |
| | | | | length = 4903 | |
| TGME49_chrX | 2840250 | 2842141 | − | ID = TGME49_224750; | 2104 |
| | | | | length = 1891 | |
| TGME49_chrIX | 2419221 | 2423061 | + | ID = TGME49_288260; | 2105 |
| | | | | length = 3840 | |
| TGME49_chrII | 443749 | 446045 | − | ID = TGME49_221560; | 2106 |
| | | | | length = 2296 | |
| TGME49_chrVIIb | 1969192 | 1973085 | − | ID = TGME49_261018; | 2107 |
| | | | | length = 3893 | |
| TGME49_chrX | 2971389 | 2973789 | − | ID = TGME49_224575; | 2108 |
| | | | | length = 2400 | |
| TGME49_chrIX | 509919 | 513149 | − | ID = TGME49_267642; | 2109 |
| | | | | length = 3230 | |
| TGME49_chrXI | 5787432 | 5789807 | − | ID = TGME49_216930; | 2110 |
| | | | | length = 2375 | |
| TGME49_chrIX | 4469028 | 4471277 | − | ID = TGME49_292000; | 2111 |
| | | | | length = 2249 | |
| TGME49_chrIX | 4276237 | 4279338 | − | ID = TGME49_291360; | 2112 |
| | | | | length = 3101 | |
| TGME49_chrVIIb | 2342177 | 2343737 | − | ID = TGME49_260360; | 2113 |
| | | | | length = 1560 | |
| TGME49_chrXI | 1287445 | 1292319 | + | ID = TGME49_310360; | 2114 |
| | | | | length = 4874 | |
| TGME49_chrXII | 5070692 | 5074348 | − | ID = TGME49_250360; | 2115 |
| | | | | length = 3656 | |
| TGME49_chrVIIb | 1569559 | 1572751 | + | ID = TGME49_261710; | 2116 |
| | | | | length = 3192 | |
| TGME49_chrX | 2583373 | 2586162 | − | ID = TGME49_225020; | 2117 |
| | | | | length = 2789 | |
| TGME49_chrVIII | 1386339 | 1390571 | − | ID = TGME49_231370; | 2118 |
| | | | | length = 4232 | |
| TGME49_chrIX | 3341749 | 3343589 | − | ID = TGME49_289600; | 2119 |
| | | | | length = 1840 | |
| TGME49_chrIX | 4852500 | 4855230 | + | ID = TGME49_210345; | 2120 |
| | | | | length = 2730 | |
| TGME49_chrVIII | 1999232 | 2003285 | − | ID = TGME49_232300; | 2121 |
| | | | | length = 4053 | |
| TGME49_chrX | 1217918 | 1218840 | + | ID = TGME49_226930; | 2122 |
| | | | | length = 922 | |
| TGME49_chrIX | 393414 | 395802 | + | ID = TGME49_267740; | 2123 |
| | | | | length = 2388 | |
| TGME49_chrVIII | 2239831 | 2241664 | − | ID = TGME49_232720; | 2124 |
| | | | | length = 1833 | |
| TGME49_chrX | 1778082 | 1780845 | + | ID = TGME49_226220; | 2125 |
| | | | | length = 2763 | |
| TGME49_chrVIIb | 4325180 | 4329892 | − | ID = TGME49_256970; | 2126 |
| | | | | length = 4712 | |
| TGME49_chrIV | 185525 | 187612 | + | ID = TGME49_320630; | 2127 |
| | | | | length = 2087 | |
| TGME49_chrXII | 5016450 | 5018497 | + | ID = TGME49_250090; | 2128 |
| | | | | length = 2047 | |
| TGME49_chrIX | 5971552 | 5972595 | + | ID = TGME49_306334; | 2129 |
| | | | | length = 1043 | |
| TGME49_chrIV | 1654904 | 1658845 | − | ID = TGME49_211640; | 2130 |
| | | | | length = 3941 | |
| TGME49_chrIV | 1691102 | 1693242 | + | ID = TGME49_211470; | 2131 |
| | | | | length = 2140 | |
| TGME49_chrVIII | 1440721 | 1442757 | + | ID = TGME49_231460; | 2132 |
| | | | | length = 2036 | |
| TGME49_chrXI | 2173066 | 2177892 | − | ID = TGME49_311640; | 2133 |
| | | | | length = 4826 | |
| TGME49_chrX | 5232720 | 5234701 | + | ID = TGME49_236000; | 2134 |
| | | | | length = 1981 | |
| TGME49_chrXI | 2361325 | 2365388 | + | ID = TGME49_311905; | 2135 |
| | | | | length = 4063 | |
| TGME49_chrVIII | 2482479 | 2486633 | − | ID = TGME49_233180; | 2136 |
| | | | | length = 4154 | |
| TGME49_chrXII | 205121 | 208744 | − | ID = TGME49_300120; | 2137 |
| | | | | length = 3623 | |
| TGME49_chrXII | 5293378 | 5296947 | − | ID = TGME49_250870; | 2138 |
| | | | | length = 3569 | |
| TGME49_chrIX | 4582773 | 4584034 | − | ID = TGME49_292150; | 2139 |
| | | | | length = 1261 | |
| TGME49_chrVIIb | 2118657 | 2123522 | − | ID = TGME49_260620; | 2140 |
| | | | | length = 4865 | |
| TGME49_chrXII | 3632829 | 3637477 | + | ID = TGME49_247950; | 2141 |
| | | | | length = 4648 | |
| TGME49_chrVIII | 3416508 | 3419960 | + | ID = TGME49_273520; | 2142 |
| | | | | length = 3452 | |
| TGME49_chrX | 7007085 | 7010674 | − | ID = TGME49_215540; | 2143 |
| | | | | length = 3589 | |
| TGME49_chrX | 2610836 | 2612776 | − | ID = TGME49_224990; | 2144 |
| | | | | length = 1940 | |
| TGME49_chrXII | 286679 | 290951 | + | ID = TGME49_300000; | 2145 |
| | | | | length = 4272 | |
| TGME49_chrXI | 1067581 | 1069045 | − | ID = TGME49_310122; | 2146 |
| | | | | length = 1464 | |
| TGME49_chrVIIa | 2523724 | 2528425 | − | ID = TGME49_203390; | 2147 |
| | | | | length = 4701 | |
| TGME49_chrVIII | 6368584 | 6372245 | + | ID = TGME49_268670; | 2148 |
| | | | | length = 3661 | |
| TGME49_chrIX | 2379171 | 2383345 | + | ID = TGME49_288210; | 2149 |
| | | | | length = 4174 | |
| TGME49_chrX | 6247060 | 6249835 | − | ID = TGME49_214310; | 2150 |
| | | | | length = 2775 | |
| TGME49_chrX | 4410724 | 4415344 | − | ID = TGME49_234470; | 2151 |
| | | | | length = 4620 | |
| TGME49_chrVIII | 483790 | 485820 | + | ID = TGME49_229950; | 2152 |
| | | | | length = 2030 | |
| TGME49_chrVIIa | 1207940 | 1212921 | + | ID = TGME49_205690; | 2153 |
| | | | | length = 4981 | |
| TGME49_chrIV | 548750 | 550949 | + | ID = TGME49_320050; | 2154 |
| | | | | length = 2199 | |
| TGME49_chrXI | 3335719 | 3337418 | + | ID = TGME49_313390; | 2155 |
| | | | | length = 1699 | |
| TGME49_chrX | 4499729 | 4504428 | + | ID = TGME49_234625; | 2156 |
| | | | | length = 4699 | |
| TGME49_chrIX | 1306171 | 1308162 | − | ID = TGME49_266100; | 2157 |
| | | | | length = 1991 | |
| TGME49_chrX | 4987373 | 4988579 | + | ID = TGME49_235620; | 2158 |
| | | | | length = 1206 | |
| TGME49_chrII | 2049153 | 2053496 | − | ID = TGME49_297820; | 2159 |
| | | | | length = 4343 | |
| TGME49_chrIb | 1005392 | 1010351 | − | ID = TGME49_209040; | 2160 |
| | | | | length = 4959 | |
| TGME49_chrIV | 1416910 | 1419099 | + | ID = TGME49_318320; | 2161 |
| | | | | length = 2189 | |
| TGME49_chrV | 1823713 | 1827597 | − | ID = TGME49_286460; | 2162 |
| | | | | length = 3884 | |
| TGME49_chrXII | 6505888 | 6507354 | − | ID = TGME49_277800; | 2163 |
| | | | | length = 1466 | |
| TGME49_chrXII | 3889671 | 3891930 | − | ID = TGME49_248490; | 2164 |
| | | | | length = 2259 | |
| TGME49_chrVIIa | 1516113 | 1517866 | − | ID = TGME49_205250; | 2165 |
| | | | | length = 1753 | |
| TGME49_chrVIIa | 4147257 | 4149471 | − | ID = TGME49_281480; | 2166 |
| | | | | length = 2214 | |
| TGME49_chrVIII | 2668587 | 2671322 | + | ID = TGME49_233480; | 2167 |
| | | | | length = 2735 | |
| TGME49_chrIX | 5608315 | 5609770 | + | ID = TGME49_305830; | 2168 |
| | | | | length = 1455 | |
| TGME49_chrX | 5460615 | 5465206 | − | ID = TGME49_236630; | 2169 |
| | | | | length = 4591 | |
| TGME49_chrIb | 446581 | 448900 | − | ID = TGME49_207930; | 2170 |
| | | | | length = 2319 | |
| TGME49_chrVI | 2958204 | 2962910 | + | ID = TGME49_244020; | 2171 |
| | | | | length = 4706 | |
| TGME49_chrXI | 2553635 | 2555730 | − | ID = TGME49_312260; | 2172 |
| | | | | length = 2095 | |
| TGME49_chrVIII | 5353669 | 5357579 | + | ID = TGME49_270170; | 2173 |
| | | | | length = 3910 | |
| TGME49_chrXII | 224079 | 225774 | + | ID = TGME49_300090; | 2174 |
| | | | | length = 1695 | |
| TGME49_chrVIIb | 4614928 | 4619845 | − | ID = TGME49_255960; | 2175 |
| | | | | length = 4917 | |
| TGME49_chrVIII | 1473271 | 1475198 | − | ID = TGME49_231480; | 2176 |
| | | | | length = 1927 | |
| TGME49_chrVIIa | 2707675 | 2711017 | + | ID = TGME49_203170; | 2177 |
| | | | | length = 3342 | |
| TGME49_chrX | 4325394 | 4328594 | + | ID = TGME49_234375; | 2178 |
| | | | | length = 3200 | |
| TGME49_chrVIIb | 201826 | 206450 | + | ID = TGME49_264075; | 2179 |
| | | | | length = 4624 | |
| TGME49_chrXI | 3987704 | 3989680 | − | ID = TGME49_314280; | 2180 |
| | | | | length = 1976 | |
| TGME49_chrIV | 2431107 | 2432795 | + | ID = TGME49_301390; | 2181 |
| | | | | length = 1688 | |
| TGME49_chrVIIb | 1554047 | 1557249 | − | ID = TGME49_261740; | 2182 |
| | | | | length = 3202 | |
| TGME49_chrXI | 6077898 | 6080164 | + | ID = TGME49_216570; | 2183 |
| | | | | length = 2266 | |
| TGME49_chrIX | 5907877 | 5909447 | − | ID = TGME49_306280; | 2184 |
| | | | | length = 1570 | |
| TGME49_chrIX | 1291274 | 1293712 | + | ID = TGME49_266110; | 2185 |
| | | | | length = 2438 | |
| TGME49_chrIb | 3431 | 5000 | + | ID = TGME49_207360; | 2186 |
| | | | | length = 1569 | |
| TGME49_chrIV | 749326 | 751746 | + | ID = TGME49_319740; | 2187 |
| | | | | length = 2420 | |
| TGME49_chrVIIb | 1574484 | 1575737 | + | ID = TGME49_261700; | 2188 |
| | | | | length = 1253 | |
| TGME49_chrVI | 1338921 | 1343149 | + | ID = TGME49_240630; | 2189 |
| | | | | length = 4228 | |
| TGME49_chrXII | 5539534 | 5541403 | − | ID = TGME49_251720; | 2190 |
| | | | | length = 1869 | |
| TGME49_chrVIIb | 4896623 | 4898784 | + | ID = TGME49_255330; | 2191 |
| | | | | length = 2161 | |
| TGME49_chrXII | 4733817 | 4737060 | + | ID = TGME49_249690; | 2192 |
| | | | | length = 3243 | |
| TGME49_chrII | 1383871 | 1385210 | + | ID = TGME49_223050; | 2193 |
| | | | | length = 1339 | |
| TGME49_chrXI | 4617346 | 4620622 | + | ID = TGME49_315280; | 2194 |
| | | | | length = 3276 | |
| TGME49_chrXI | 1870125 | 1871822 | + | ID = TGME49_311220; | 2195 |
| | | | | length = 1697 | |
| TGME49_chrXII | 3843245 | 3845735 | + | ID = TGME49_248425; | 2196 |
| | | | | length = 2490 | |
| TGME49_chrXII | 5389506 | 5393276 | + | ID = TGME49_251450; | 2197 |
| | | | | length = 3770 | |
| TGME49_chrVIII | 5980495 | 5982851 | − | ID = TGME49_269228; | 2198 |
| | | | | length = 2356 | |
| TGME49_chrIV | 1479718 | 1482540 | − | ID = TGME49_318220; | 2199 |
| | | | | length = 2822 | |
| TGME49_chrVIIa | 3910752 | 3912895 | − | ID = TGME49_201390; | 2200 |
| | | | | length = 2143 | |
| TGME49_chrVI | 2860199 | 2862974 | − | ID = TGME49_243790; | 2201 |
| | | | | length = 2775 | |
| TGME49_chrVIIa | 2178513 | 2180276 | − | ID = TGME49_203860; | 2202 |
| | | | | length = 1763 | |
| TGME49_chrII | 1341931 | 1344535 | + | ID = TGME49_222970; | 2203 |
| | | | | length = 2604 | |
| TGME49_chrXII | 4348700 | 4350687 | − | ID = TGME49_249160; | 2204 |
| | | | | length = 1987 | |
| TGME49_chrV | 1817252 | 1819572 | − | ID = TGME49_286485; | 2205 |
| | | | | length = 2320 | |
| TGME49_chrIX | 4096568 | 4099371 | + | ID = TGME49_291070; | 2206 |
| | | | | length = 2803 | |
| TGME49_chrV | 1456377 | 1459175 | − | ID = TGME49_213940; | 2207 |
| | | | | length = 2798 | |
| TGME49_chrIa | 1128268 | 1130676 | − | ID = TGME49_294760; | 2208 |
| | | | | length = 2408 | |
| TGME49_chrXII | 112149 | 115996 | + | ID = TGME49_300270; | 2209 |
| | | | | length = 3847 | |
| TGME49_chrIa | 1141182 | 1145699 | − | ID = TGME49_294780; | 2210 |
| | | | | length = 4517 | |
| TGME49_chrIa | 684768 | 686694 | − | ID = TGME49_294180; | 2211 |
| | | | | length = 1926 | |
| TGME49_chrXII | 1982533 | 1984559 | − | ID = TGME49_217665; | 2212 |
| | | | | length = 2026 | |
| TGME49_chrVIIb | 136836 | 141095 | − | ID = TGME49_264150; | 2213 |
| | | | | length = 4259 | |
| TGME49_chrIX | 3644889 | 3646816 | − | ID = TGME49_290200; | 2214 |
| | | | | length = 1927 | |
| TGME49_chrXI | 3416844 | 3420688 | + | ID = TGME49_313475; | 2215 |
| | | | | length = 3844 | |
| TGME49_chrXII | 5558311 | 5563031 | + | ID = TGME49_251750; | 2216 |
| | | | | length = 4720 | |
| TGME49_chrVIII | 3591126 | 3594224 | − | ID = TGME49_273330; | 2217 |
| | | | | length = 3098 | |
| TGME49_chrXI | 1907165 | 1911891 | + | ID = TGME49_311250; | 2218 |
| | | | | length = 4726 | |
| TGME49_chrIb | 606581 | 608427 | + | ID = TGME49_208320; | 2219 |
| | | | | length = 1846 | |
| TGME49_chrIV | 317723 | 320840 | + | ID = TGME49_320470; | 2220 |
| | | | | length = 3117 | |
| TGME49_chrIa | 1231366 | 1233810 | + | ID = TGME49_294870; | 2221 |
| | | | | length = 2444 | |
| TGME49_chrV | 799204 | 803341 | + | ID = TGME49_213030; | 2222 |
| | | | | length = 4137 | |
| TGME49_chrXII | 4141267 | 4145015 | − | ID = TGME49_248740; | 2223 |
| | | | | length = 3748 | |
| TGME49_chrVIII | 6831032 | 6832955 | − | ID = TGME49_200370; | 2224 |
| | | | | length = 1923 | |
| TGME49_chrVIII | 5814181 | 5817773 | + | ID = TGME49_269417; | 2225 |
| | | | | length = 3592 | |
| TGME49_chrIa | 288432 | 290836 | + | ID = TGME49_293380; | 2226 |
| | | | | length = 2404 | |
| TGME49_chrX | 375771 | 377308 | + | ID = TGME49_228360; | 2227 |
| | | | | length = 1537 | |
| TGME49_chrVIIa | 2817075 | 2820018 | + | ID = TGME49_203070; | 2228 |
| | | | | length = 2943 | |
| TGME49_chrIX | 2642426 | 2644741 | + | ID = TGME49_288630; | 2229 |
| | | | | length = 2315 | |
| TGME49_chrVIIa | 3778324 | 3780703 | − | ID = TGME49_201810; | 2230 |
| | | | | length = 2379 | |
| TGME49_chrXI | 2136968 | 2138370 | − | ID = TGME49_311500; | 2231 |
| | | | | length = 1402 | |
| TGME49_chrX | 6746604 | 6749287 | + | ID = TGME49_215090; | 2232 |
| | | | | length = 2683 | |
| TGME49_chrVIIa | 428379 | 432545 | − | ID = TGME49_280420; | 2233 |
| | | | | length = 4166 | |
| TGME49_chrVI | 3187139 | 3188303 | + | ID = TGME49_244320; | 2234 |
| | | | | length = 1164 | |
| TGME49_chrVI | 1463601 | 1465416 | − | ID = TGME49_240830; | 2235 |
| | | | | length = 1815 | |
| TGME49_chrX | 6273860 | 6275989 | + | ID = TGME49_214400; | 2236 |
| | | | | length = 2129 | |
| TGME49_chrVI | 2220309 | 2222591 | + | ID = TGME49_242740; | 2237 |
| | | | | length = 2282 | |
| TGME49_chrIb | 1351872 | 1355146 | + | ID = TGME49_209590; | 2238 |
| | | | | length = 3274 | |
| TGME49_chrVIII | 294473 | 299452 | + | ID = TGME49_229490; | 2239 |
| | | | | length = 4979 | |
| TGME49_chrIV | 1996453 | 1998125 | + | ID = TGME49_210970; | 2240 |
| | | | | length = 1672 | |
| TGME49_chrVIII | 2608007 | 2611227 | + | ID = TGME49_233370; | 2241 |
| | | | | length = 3220 | |
| TGME49_chrVIIa | 3795393 | 3798765 | + | ID = TGME49_201775; | 2242 |
| | | | | length = 3372 | |
| TGME49_chrIa | 1293826 | 1295850 | + | ID = TGME49_294970; | 2243 |
| | | | | length = 2024 | |
| TGME49_chrIX | 4535750 | 4537308 | − | ID = TGME49_292070; | 2244 |
| | | | | length = 1558 | |
| TGME49_chrVIIa | 2279952 | 2283671 | − | ID = TGME49_203740; | 2245 |
| | | | | length = 3719 | |
| TGME49_chrVIIa | 485370 | 487434 | + | ID = TGME49_280380; | 2246 |
| | | | | length = 2064 | |
| TGME49_chrXI | 1095580 | 1099919 | + | ID = TGME49_310160; | 2247 |
| | | | | length = 4339 | |
| TGME49_chrVIIb | 2166762 | 2169888 | + | ID = TGME49_260540; | 2248 |
| | | | | length = 3126 | |
| TGME49_chrX | 5492381 | 5494853 | + | ID = TGME49_236780; | 2249 |
| | | | | length = 2472 | |
| TGME49_chrVIIa | 525141 | 528720 | − | ID = TGME49_304490; | 2250 |
| | | | | length = 3579 | |
| TGME49_chrXII | 1251462 | 1253195 | + | ID = TGME49_218840; | 2251 |
| | | | | length = 1733 | |
| TGME49_chrVIIb | 1044560 | 1046178 | − | ID = TGME49_262750; | 2252 |
| | | | | length = 1618 | |
| TGME49_chrXII | 4941426 | 4942964 | + | ID = TGME49_249920; | 2253 |
| | | | | length = 1538 | |
| TGME49_chrVIIb | 1995879 | 1997531 | − | ID = TGME49_260870; | 2254 |
| | | | | length = 1652 | |
| TGME49_chrXI | 4299258 | 4301184 | − | ID = TGME49_314780; | 2255 |
| | | | | length = 1926 | |
| TGME49_chrII | 1769905 | 1774752 | − | ID = TGME49_297420; | 2256 |
| | | | | length = 4847 | |
| TGME49_chrIb | 1320040 | 1321949 | − | ID = TGME49_209540; | 2257 |
| | | | | length = 1909 | |
| TGME49_chrIX | 6177117 | 6181474 | − | ID = TGME49_306550; | 2258 |
| | | | | length = 4357 | |
| TGME49_chrV | 1725092 | 1727430 | + | ID = TGME49_286680; | 2259 |
| | | | | length = 2338 | |
| TGME49_chrVI | 811913 | 814755 | + | ID = TGME49_239630; | 2260 |
| | | | | length = 2842 | |
| TGME49_chrIX | 3876282 | 3878405 | + | ID = TGME49_290840; | 2261 |
| | | | | length = 2123 | |
| TGME49_chrII | 1693029 | 1695406 | − | ID = TGME49_297330; | 2262 |
| | | | | length = 2377 | |
| TGME49_chrIb | 1214022 | 1218129 | + | ID = TGME49_209440; | 2263 |
| | | | | length = 4107 | |
| TGME49_chrVIII | 1574303 | 1578976 | + | ID = TGME49_231840; | 2264 |
| | | | | length = 4673 | |
| TGME49_chrVIIb | 4914243 | 4916993 | + | ID = TGME49_255300; | 2265 |
| | | | | length = 2750 | |
| TGME49_chrXI | 1745014 | 1749860 | − | ID = TGME49_311030; | 2266 |
| | | | | length = 4846 | |
| TGME49_chrVIII | 4131896 | 4134904 | − | ID = TGME49_272230; | 2267 |
| | | | | length = 3008 | |
| TGME49_chrXI | 186373 | 190635 | + | ID = TGME49_306910; | 2268 |
| | | | | length = 4262 | |
| TGME49_chrVIII | 4969459 | 4972682 | + | ID = TGME49_270820; | 2269 |
| | | | | length = 3223 | |
| TGME49_chrII | 252286 | 255240 | − | ID = TGME49_221320; | 2270 |
| | | | | length = 2954 | |
| TGME49_chrXII | 4665307 | 4667213 | + | ID = TGME49_249590; | 2271 |
| | | | | length = 1906 | |
| TGME49_chrXII | 183074 | 185954 | + | ID = TGME49_300140; | 2272 |
| | | | | length = 2880 | |
| TGME49_chrX | 2107642 | 2109483 | − | ID = TGME49_225730; | 2273 |
| | | | | length = 1841 | |
| TGME49_chrVIII | 5084209 | 5087859 | + | ID = TGME49_270670; | 2274 |
| | | | | length = 3650 | |
| TGME49_chrVI | 3141338 | 3146169 | − | ID = TGME49_244250; | 2275 |
| | | | | length = 4831 | |
| TGME49_chrIX | 1641728 | 1646063 | + | ID = TGME49_265260; | 2276 |
| | | | | length = 4335 | |
| TGME49_chrIb | 1625087 | 1627665 | − | ID = TGME49_321700; | 2277 |
| | | | | length = 2578 | |
| TGME49_chrII | 1708595 | 1711391 | + | ID = TGME49_297360; | 2278 |
| | | | | length = 2796 | |
| TGME49_chrXII | 2561570 | 2563897 | + | ID = TGME49_245770; | 2279 |
| | | | | length = 2327 | |
| TGME49_chrXI | 3662083 | 3664424 | − | ID = TGME49_313750; | 2280 |
| | | | | length = 2341 | |
| TGME49_chrIX | 2678976 | 2683389 | + | ID = TGME49_288700; | 2281 |
| | | | | length = 4413 | |
| TGME49_chrVIIa | 2452533 | 2454348 | − | ID = TGME49_203520; | 2282 |
| | | | | length = 1815 | |
| TGME49_chrVIII | 371670 | 372973 | − | ID = TGME49_229660; | 2283 |
| | | | | length = 1303 | |
| TGME49_chrVIII | 1338333 | 1339664 | − | ID = TGME49_231215; | 2284 |
| | | | | length = 1331 | |
| TGME49_chrXI | 2393435 | 2396761 | + | ID = TGME49_312050; | 2285 |
| | | | | length = 3326 | |
| TGME49_chrVIIb | 4834044 | 4836547 | − | ID = TGME49_255430; | 2286 |
| | | | | length = 2503 | |
| TGME49_chrIb | 454627 | 456429 | − | ID = TGME49_207940; | 2287 |
| | | | | length = 1802 | |
| TGME49_chrXII | 2364575 | 2368999 | + | ID = TGME49_245560; | 2288 |
| | | | | length = 4424 | |
| TGME49_chrIV | 290608 | 295448 | + | ID = TGME49_320500; | 2289 |
| | | | | length = 4840 | |
| TGME49_chrX | 2647792 | 2650609 | + | ID = TGME49_224940; | 2290 |
| | | | | length = 2817 | |
| TGME49_chrII | 595002 | 596475 | − | ID = TGME49_221720; | 2291 |
| | | | | length = 1473 | |
| TGME49_chrV | 6880 | 10388 | − | ID = TGME49_296121; | 2292 |
| | | | | length = 3508 | |
| TGME49_chrX | 4938563 | 4939819 | + | ID = TGME49_235550; | 2293 |
| | | | | length = 1256 | |
| TGME49_chrII | 24693 | 25319 | − | ID = TGME49_220850; | 2294 |
| | | | | length = 626 | |
| TGME49_chrXII | 6568190 | 6570515 | − | ID = TGME49_277700; | 2295 |
| | | | | length = 2325 | |
| TGME49_chrIV | 2058603 | 2061707 | + | ID = TGME49_210787; | 2296 |
| | | | | length = 3104 | |
| TGME49_chrX | 4451079 | 4454735 | − | ID = TGME49_234550; | 2297 |
| | | | | length = 3656 | |
| TGME49_chrX | 155871 | 160694 | − | ID = TGME49_228760; | 2298 |
| | | | | length = 4823 | |
| TGME49_chrX | 7041981 | 7044359 | − | ID = TGME49_215590; | 2299 |
| | | | | length = 2378 | |
| TGME49_chrVIIb | 1979166 | 1981300 | − | ID = TGME49_261010; | 2300 |
| | | | | length = 2134 | |
| TGME49_chrVIIa | 266318 | 267937 | + | ID = TGME49_280605; | 2301 |
| | | | | length = 1619 | |
| TGME49_chrVIII | 2855573 | 2856668 | + | ID = TGME49_233860; | 2302 |
| | | | | length = 1095 | |
| TGME49_chrIb | 609246 | 614107 | + | ID = TGME49_208340; | 2303 |
| | | | | length = 4861 | |
| TGME49_chrX | 6384134 | 6388240 | − | ID = TGME49_214580; | 2304 |
| | | | | length = 4106 | |
| TGME49_chrVI | 280442 | 282228 | + | ID = TGME49_238880; | 2305 |
| | | | | length = 1786 | |
| TGME49_chrIX | 1848942 | 1852708 | − | ID = TGME49_265005; | 2306 |
| | | | | length = 3766 | |
| TGME49_chrX | 5418981 | 5422356 | − | ID = TGME49_236550; | 2307 |
| | | | | length = 3375 | |
| TGME49_chrIa | 1274681 | 1276904 | + | ID = TGME49_294930; | 2308 |
| | | | | length = 2223 | |
| TGME49_chrIa | 665674 | 667870 | − | ID = TGME49_294050; | 2309 |
| | | | | length = 2196 | |
| TGME49_chrVIIb | 2761844 | 2763517 | + | ID = TGME49_259580; | 2310 |
| | | | | length = 1673 | |
| TGME49_chrIV | 1596497 | 1598239 | + | ID = TGME49_211695; | 2311 |
| | | | | length = 1742 | |
| TGME49_chrVIII | 2332258 | 2334583 | − | ID = TGME49_233000; | 2312 |
| | | | | length = 2325 | |
| TGME49_chrVIIb | 3451188 | 3453211 | − | ID = TGME49_258370; | 2313 |
| | | | | length = 2023 | |
| TGME49_chrIX | 5257875 | 5259734 | + | ID = TGME49_305160; | 2314 |
| | | | | length = 1859 | |
| TGME49_chrVIII | 5392733 | 5393889 | − | ID = TGME49_270130; | 2315 |
| | | | | length = 1156 | |
| TGME49_chrXI | 5688551 | 5689284 | − | ID = TGME49_217178; | 2316 |
| | | | | length = 733 | |
| TGME49_chrIa | 1150051 | 1152041 | − | ID = TGME49_294800; | 2317 |
| | | | | length = 1990 | |
| TGME49_chrVIIa | 691948 | 694230 | − | ID = TGME49_304755; | 2318 |
| | | | | length = 2282 | |
| TGME49_chrX | 4196707 | 4198737 | + | ID = TGME49_234220; | 2319 |
| | | | | length = 2030 | |
| TGME49_chrVI | 709612 | 711661 | − | ID = TGME49_239480; | 2320 |
| | | | | length = 2049 | |
| TGME49_chrXII | 2645668 | 2648078 | − | ID = TGME49_246070; | 2321 |
| | | | | length = 2410 | |
| TGME49_chrVIIb | 381484 | 385908 | + | ID = TGME49_263700; | 2322 |
| | | | | length = 4424 | |
| TGME49_chrXI | 3822805 | 3823979 | + | ID = TGME49_313940; | 2323 |
| | | | | length = 1174 | |
| TGME49_chrVIII | 5492973 | 5494998 | − | ID = TGME49_269970; | 2324 |
| | | | | length = 2025 | |
| TGME49_chrII | 1955364 | 1959181 | − | ID = TGME49_297725; | 2325 |
| | | | | length = 3817 | |
| TGME49_chrVIIa | 4402459 | 4404312 | + | ID = TGME49_282150; | 2326 |
| | | | | length = 1853 | |
| TGME49_chrX | 3723634 | 3724688 | − | ID = TGME49_223590; | 2327 |
| | | | | length = 1054 | |
| TGME49_chrX | 3023442 | 3025405 | − | ID = TGME49_224510; | 2328 |
| | | | | length = 1963 | |
| TGME49_chrVIII | 1956674 | 1958845 | − | ID = TGME49_232210; | 2329 |
| | | | | length = 2171 | |
| TGME49_chrIX | 2177881 | 2182679 | + | ID = TGME49_264600; | 2330 |
| | | | | length = 4798 | |
| TGME49_chrVI | 3228134 | 3231037 | − | ID = TGME49_244380; | 2331 |
| | | | | length = 2903 | |
| TGME49_chrXII | 161554 | 164207 | + | ID = TGME49_300190; | 2332 |
| | | | | length = 2653 | |
| TGME49_chrV | 2386955 | 2388910 | − | ID = TGME49_285490; | 2333 |
| | | | | length = 1955 | |
| TGME49_chrXI | 5923806 | 5928393 | − | ID = TGME49_216750; | 2334 |
| | | | | length = 4587 | |
| TGME49_chrVIII | 5218604 | 5220893 | + | ID = TGME49_270510; | 2335 |
| | | | | length = 2289 | |
| TGME49_chrXII | 448136 | 451773 | − | ID = TGME49_307850; | 2336 |
| | | | | length = 3637 | |
| TGME49_chrXI | 329830 | 333208 | + | ID = TGME49_308890; | 2337 |
| | | | | length = 3378 | |
| TGME49_chrVIIb | 4982223 | 4984936 | + | ID = TGME49_255230; | 2338 |
| | | | | length = 2713 | |
| TGME49_chrVI | 1338921 | 1340659 | + | ID = TGME49_240620; | 2339 |
| | | | | length = 1738 | |
| TGME49_chrVIIa | 2710672 | 2712535 | − | ID = TGME49_203175; | 2340 |
| | | | | length = 1863 | |
| TGME49_chrIa | 783634 | 786312 | + | ID = TGME49_294300; | 2341 |
| | | | | length = 2678 | |
| TGME49_chrVIIa | 2207067 | 2211546 | − | ID = TGME49_203820; | 2342 |
| | | | | length = 4479 | |
| TGME49_chrVIIb | 1410124 | 1411940 | + | ID = TGME49_262040; | 2343 |
| | | | | length = 1816 | |
| TGME49_chrV | 1762123 | 1764217 | − | ID = TGME49_286620; | 2344 |
| | | | | length = 2094 | |
| TGME49_chrXI | 2444171 | 2445480 | − | ID = TGME49_312120; | 2345 |
| | | | | length = 1309 | |
| TGME49_chrIX | 2304200 | 2309017 | + | ID = TGME49_288030; | 2346 |
| | | | | length = 4817 | |
| TGME49_chrXII | 3107046 | 3108961 | + | ID = TGME49_247020; | 2347 |
| | | | | length = 1915 | |
| TGME49_chrXII | 1088408 | 1090747 | − | ID = TGME49_219190; | 2348 |
| | | | | length = 2339 | |
| TGME49_chrVIII | 5243101 | 5244559 | − | ID = TGME49_270380; | 2349 |
| | | | | length = 1458 | |
| TGME49_chrIX | 3661389 | 3662897 | + | ID = TGME49_290240; | 2350 |
| | | | | length = 1508 | |
| TGME49_chrIb | 1465240 | 1466759 | − | ID = TGME49_209810; | 2351 |
| | | | | length = 1519 | |
| TGME49_chrVIIb | 4093997 | 4097159 | + | ID = TGME49_257360; | 2352 |
| | | | | length = 3162 | |
| TGME49_chrIX | 2730019 | 2732515 | − | ID = TGME49_288760; | 2353 |
| | | | | length = 2496 | |
| TGME49_chrXI | 1804715 | 1808023 | + | ID = TGME49_311100; | 2354 |
| | | | | length = 3308 | |
| TGME49_chrX | 4252113 | 4254822 | − | ID = TGME49_234250; | 2355 |
| | | | | length = 2709 | |
| TGME49_chrXI | 3602353 | 3604400 | − | ID = TGME49_313677; | 2356 |
| | | | | length = 2047 | |
| TGME49_chrVIII | 2912818 | 2914466 | + | ID = TGME49_233940; | 2357 |
| | | | | length = 1648 | |
| TGME49_chrX | 7000639 | 7004503 | + | ID = TGME49_215530; | 2358 |
| | | | | length = 3864 | |
| TGME49_chrVIII | 2289768 | 2291993 | − | ID = TGME49_232940; | 2359 |
| | | | | length = 2225 | |
| TGME49_chrX | 5258198 | 5260065 | − | ID = TGME49_236060; | 2360 |
| | | | | length = 1867 | |
| TGME49_chrVIII | 1884485 | 1889437 | + | ID = TGME49_232150; | 2361 |
| | | | | length = 4952 | |
| TGME49_chrXII | 1882976 | 1885676 | + | ID = TGME49_217510; | 2362 |
| | | | | length = 2700 | |
| TGME49_chrX | 1049905 | 1054351 | − | ID = TGME49_227280; | 2363 |
| | | | | length = 4446 | |
| TGME49_chrIa | 1246263 | 1247746 | − | ID = TGME49_294880; | 2364 |
| | | | | length = 1483 | |
| TGME49_chrXII | 5892198 | 5894986 | − | ID = TGME49_278770; | 2365 |
| | | | | length = 2788 | |
| TGME49_chrV | 160407 | 162730 | − | ID = TGME49_220132; | 2366 |
| | | | | length = 2323 | |
| TGME49_chrX | 3757076 | 3761771 | + | ID = TGME49_223520; | 2367 |
| | | | | length = 4695 | |
| TGME49_chrVIII | 3809166 | 3812131 | − | ID = TGME49_272670; | 2368 |
| | | | | length = 2965 | |
| TGME49_chrVI | 2816314 | 2820874 | − | ID = TGME49_243720; | 2369 |
| | | | | length = 4560 | |
| TGME49_chrX | 1866919 | 1870597 | + | ID = TGME49_226010; | 2370 |
| | | | | length = 3678 | |
| TGME49_chrIa | 1655906 | 1660726 | + | ID = TGME49_295640; | 2371 |
| | | | | length = 4820 | |
| TGME49_chrXII | 2497045 | 2499685 | + | ID = TGME49_245730; | 2372 |
| | | | | length = 2640 | |
| TGME49_chrIb | 1368907 | 1370576 | + | ID = TGME49_209640; | 2373 |
| | | | | length = 1669 | |
| TGME49_chrVIIa | 1055163 | 1058273 | − | ID = TGME49_206340; | 2374 |
| | | | | length = 3110 | |
| TGME49_chrX | 2106968 | 2108843 | + | ID = TGME49_225720; | 2375 |
| | | | | length = 1875 | |
| TGME49_chrVIIa | 647552 | 651135 | − | ID = TGME49_304710; | 2376 |
| | | | | length = 3583 | |
| TGME49_chrVIIb | 2433977 | 2435254 | + | ID = TGME49_260230; | 2377 |
| | | | | length = 1277 | |
| TGME49_chrVIII | 5093749 | 5096679 | + | ID = TGME49_270660; | 2378 |
| | | | | length = 2930 | |
| TGME49_chrIX | 4712512 | 4716695 | + | ID = TGME49_292375; | 2379 |
| | | | | length = 4183 | |
| TGME49_chrIX | 3824648 | 3829311 | + | ID = TGME49_290670; | 2380 |
| | | | | length = 4663 | |
| TGME49_chrVIIa | 2937184 | 2941974 | + | ID = TGME49_202930; | 2381 |
| | | | | length = 4790 | |
| TGME49_chrIb | 264375 | 266961 | + | ID = TGME49_207760; | 2382 |
| | | | | length = 2586 | |
| TGME49_chrX | 1064095 | 1066354 | + | ID = TGME49_227150; | 2383 |
| | | | | length = 2259 | |
| TGME49_chrVIIa | 2238651 | 2240842 | + | ID = TGME49_203780; | 2384 |
| | | | | length = 2191 | |
| TGME49_chrXII | 5511516 | 5514022 | + | ID = TGME49_251660; | 2385 |
| | | | | length = 2506 | |
| TGME49_chrIX | 2729523 | 2732515 | − | ID = TGME49_288755; | 2386 |
| | | | | length = 2992 | |
| TGME49_chrXI | 6523631 | 6524512 | − | ID = TGME49_215930; | 2387 |
| | | | | length = 881 | |
| TGME49_chrVIIa | 1477054 | 1478405 | + | ID = TGME49_205310; | 2388 |
| | | | | length = 1351 | |
| TGME49_chrIa | 1299896 | 1301681 | + | ID = TGME49_294980; | 2389 |
| | | | | length = 1785 | |
| TGME49_chrXII | 5478826 | 5481198 | + | ID = TGME49_251600; | 2390 |
| | | | | length = 2372 | |
| TGME49_chrIX | 195627 | 197977 | + | ID = TGME49_279410; | 2391 |
| | | | | length = 2350 | |
| TGME49_chrIX | 2585255 | 2587746 | − | ID = TGME49_288500; | 2392 |
| | | | | length = 2491 | |
| TGME49_chrX | 551024 | 553273 | + | ID = TGME49_228130; | 2393 |
| | | | | length = 2249 | |
| TGME49_chrVIII | 1246299 | 1247749 | − | ID = TGME49_231110; | 2394 |
| | | | | length = 1450 | |
| TGME49_chrIX | 6076772 | 6079949 | + | ID = TGME49_306440; | 2395 |
| | | | | length = 3177 | |
| TGME49_chrXI | 112403 | 113739 | + | ID = TGME49_307030; | 2396 |
| | | | | length = 1336 | |
| TGME49_chrVIIa | 1486724 | 1489206 | − | ID = TGME49_205300; | 2397 |
| | | | | length = 2482 | |
| TGME49_chrIX | 3901723 | 3904302 | + | ID = TGME49_290870; | 2398 |
| | | | | length = 2579 | |
| TGME49_chrIX | 3000871 | 3002525 | − | ID = TGME49_289110; | 2399 |
| | | | | length = 1654 | |
| TGME49_chrXII | 6457403 | 6459638 | − | ID = TGME49_277880; | 2400 |
| | | | | length = 2235 | |
| TGME49_chrXI | 1383113 | 1385121 | − | ID = TGME49_310490; | 2401 |
| | | | | length = 2008 | |
| TGME49_chrXII | 3586775 | 3589201 | + | ID = TGME49_247790; | 2402 |
| | | | | length = 2426 | |
| TGME49_chrVI | 2515479 | 2520512 | − | ID = TGME49_243290; | 2403 |
| | | | | length = 5033 | |
| TGME49_chrV | 2197440 | 2199492 | + | ID = TGME49_285825; | 2404 |
| | | | | length = 2052 | |
| TGME49_chrVIIb | 2639665 | 2642073 | − | ID = TGME49_259880; | 2405 |
| | | | | length = 2408 | |
| TGME49_chrIV | 431416 | 433165 | − | ID = TGME49_320220; | 2406 |
| | | | | length = 1749 | |
| TGME49_chrX | 5202475 | 5203919 | + | ID = TGME49_235960; | 2407 |
| | | | | length = 1444 | |
| TGME49_chrIa | 1716758 | 1718720 | − | ID = TGME49_295590; | 2408 |
| | | | | length = 1962 | |
| TGME49_chrXI | 5155486 | 5157169 | − | ID = TGME49_316140; | 2409 |
| | | | | length = 1683 | |
| TGME49_chrIX | 3156705 | 3158620 | + | ID = TGME49_289300; | 2410 |
| | | | | length = 1915 | |
| TGME49_chrXI | 1433031 | 1437316 | − | ID = TGME49_310530; | 2411 |
| | | | | length = 4285 | |
| TGME49_chrXII | 6860302 | 6862811 | + | ID = TGME49_276900; | 2412 |
| | | | | length = 2509 | |
| TGME49_chrXI | 4976219 | 4980235 | + | ID = TGME49_315780; | 2413 |
| | | | | length = 4016 | |
| TGME49_chrV | 2340890 | 2344008 | + | ID = TGME49_285530; | 2414 |
| | | | | length = 3118 | |
| TGME49_chrIX | 1539888 | 1543369 | − | ID = TGME49_265460; | 2415 |
| | | | | length = 3481 | |
| TGME49_chrX | 447801 | 449204 | + | ID = TGME49_228250; | 2416 |
| | | | | length = 1403 | |
| TGME49_chrVI | 3140054 | 3144151 | + | ID = TGME49_244260; | 2417 |
| | | | | length = 4097 | |
| TGME49_chrVIII | 1584008 | 1588110 | + | ID = TGME49_231850; | 2418 |
| | | | | length = 4102 | |
| TGME49_chrXII | 2862004 | 2863907 | − | ID = TGME49_246570; | 2419 |
| | | | | length = 1903 | |
| TGME49_chrXI | 2664415 | 2666362 | + | ID = TGME49_312410; | 2420 |
| | | | | length = 1947 | |
| TGME49_chrVIIb | 4219478 | 4221342 | − | ID = TGME49_257110; | 2421 |
| | | | | length = 1864 | |
| TGME49_chrVIIa | 771238 | 775785 | + | ID = TGME49_206620; | 2422 |
| | | | | length = 4547 | |
| TGME49_chrII | 1988671 | 1990219 | + | ID = TGME49_297780; | 2423 |
| | | | | length = 1548 | |
| TGME49_chrIX | 2205860 | 2206820 | + | ID = TGME49_264468; | 2424 |
| | | | | length = 960 | |
| TGME49_chrVIIb | 3575786 | 3577531 | − | ID = TGME49_258100; | 2425 |
| | | | | length = 1745 | |
| TGME49_chrIV | 2324732 | 2325789 | − | ID = TGME49_301218; | 2426 |
| | | | | length = 1057 | |
| TGME49_chrXII | 3033076 | 3037430 | + | ID = TGME49_246960; | 2427 |
| | | | | length = 4354 | |
| TGME49_chrXI | 6360743 | 6365335 | − | ID = TGME49_216180; | 2428 |
| | | | | length = 4592 | |
| TGME49_chrVIIa | 4364743 | 4368384 | − | ID = TGME49_282055; | 2429 |
| | | | | length = 3641 | |
| TGME49_chrVIII | 4265575 | 4269776 | + | ID = TGME49_271950; | 2430 |
| | | | | length = 4201 | |
| TGME49_chrIX | 327730 | 328648 | − | ID = TGME49_267830; | 2431 |
| | | | | length = 918 | |
| TGME49_chrII | 1381881 | 1383797 | − | ID = TGME49_223040; | 2432 |
| | | | | length = 1916 | |
| TGME49_chrVIIb | 3189128 | 3193873 | − | ID = TGME49_258780; | 2433 |
| | | | | length = 4745 | |
| TGME49_chrX | 6602519 | 6604937 | + | ID = TGME49_214940; | 2434 |
| | | | | length = 2418 | |
| TGME49_chrXII | 6221111 | 6222788 | + | ID = TGME49_278220; | 2435 |
| | | | | length = 1677 | |
| TGME49_chrIX | 2394576 | 2396348 | + | ID = TGME49_288220; | 2436 |
| | | | | length = 1772 | |
| TGME49_chrXI | 1696849 | 1700575 | − | ID = TGME49_310960; | 2437 |
| | | | | length = 3726 | |
| TGME49_chrX | 1788172 | 1791138 | + | ID = TGME49_226110; | 2438 |
| | | | | length = 2966 | |
| TGME49_chrXI | 2442282 | 2445480 | − | ID = TGME49_312110; | 2439 |
| | | | | length = 3198 | |
| TGME49_chrIX | 219922 | 222865 | + | ID = TGME49_279370; | 2440 |
| | | | | length = 2943 | |
| TGME49_chrXI | 4873358 | 4874729 | − | ID = TGME49_315650; | 2441 |
| | | | | length = 1371 | |
| TGME49_chrX | 7446398 | 7448098 | − | ID = TGME49_207200; | 2442 |
| | | | | length = 1700 | |
| TGME49_chrV | 2245097 | 2246666 | − | ID = TGME49_285780; | 2443 |
| | | | | length = 1569 | |
| TGME49_chrVIIa | 515933 | 519026 | + | ID = TGME49_304480; | 2444 |
| | | | | length = 3093 | |
| TGME49_chrIb | 1740080 | 1742565 | + | ID = TGME49_321540; | 2445 |
| | | | | length = 2485 | |
| TGME49_chrXI | 4257933 | 4259598 | + | ID = TGME49_314740; | 2446 |
| | | | | length = 1665 | |
| TGME49_chrIb | 761021 | 764259 | + | ID = TGME49_208540; | 2447 |
| | | | | length = 3238 | |
| TGME49_chrVI | 3450966 | 3453208 | − | ID = TGME49_244680; | 2448 |
| | | | | length = 2242 | |
| TGME49_chrXI | 4755042 | 4759341 | − | ID = TGME49_315490; | 2449 |
| | | | | length = 4299 | |
| TGME49_chrX | 7372773 | 7375242 | − | ID = TGME49_207070; | 2450 |
| | | | | length = 2469 | |
| TGME49_chrXI | 1587139 | 1588848 | − | ID = TGME49_310770; | 2451 |
| | | | | length = 1709 | |
| TGME49_chrVIII | 943428 | 945265 | − | ID = TGME49_230660; | 2452 |
| | | | | length = 1837 | |
| TGME49_chrX | 552123 | 553994 | − | ID = TGME49_228145; | 2453 |
| | | | | length = 1871 | |
| TGME49_chrIX | 3459714 | 3462359 | − | ID = TGME49_289790; | 2454 |
| | | | | length = 2645 | |
| TGME49_chrVIIa | 3339066 | 3342796 | + | ID = TGME49_202410; | 2455 |
| | | | | length = 3730 | |
| TGME49_chrXI | 6491504 | 6494435 | + | ID = TGME49_215980; | 2456 |
| | | | | length = 2931 | |
| TGME49_chrXII | 2583712 | 2585703 | − | ID = TGME49_245990; | 2457 |
| | | | | length = 1991 | |
| TGME49_chrVI | 2637439 | 2640089 | − | ID = TGME49_243440; | 2458 |
| | | | | length = 2650 | |
| TGME49_chrV | 2386130 | 2388506 | + | ID = TGME49_285480; | 2459 |
| | | | | length = 2376 | |
| TGME49_chrXII | 3015620 | 3017791 | − | ID = TGME49_246910; | 2460 |
| | | | | length = 2171 | |
| TGME49_chrVIII | 4302700 | 4305790 | − | ID = TGME49_271888; | 2461 |
| | | | | length = 3090 | |
| TGME49_chrVIIa | 1866251 | 1869833 | − | ID = TGME49_204350; | 2462 |
| | | | | length = 3582 | |
| TGME49_chrX | 5570013 | 5572759 | − | ID = TGME49_236910; | 2463 |
| | | | | length = 2746 | |
| TGME49_chrVIII | 3179578 | 3181888 | + | ID = TGME49_273905; | 2464 |
| | | | | length = 2310 | |
| TGME49_chrX | 6220314 | 6222244 | − | ID = TGME49_214295; | 2465 |
| | | | | length = 1930 | |
| TGME49_chrIX | 2323164 | 2325191 | − | ID = TGME49_288040; | 2466 |
| | | | | length = 2027 | |
| TGME49_chrX | 5603877 | 5606138 | − | ID = TGME49_236950; | 2467 |
| | | | | length = 2261 | |
| TGME49_chrVI | 3027874 | 3028418 | + | ID = TGME49_244105; | 2468 |
| | | | | length = 544 | |
| TGME49_chrVIIb | 2894337 | 2897600 | − | ID = TGME49_259200; | 2469 |
| | | | | length = 3263 | |
| TGME49_chrVIII | 5588163 | 5592490 | + | ID = TGME49_269800; | 2470 |
| | | | | length = 4327 | |
| TGME49_chrX | 2114298 | 2117359 | + | ID = TGME49_225690; | 2471 |
| | | | | length = 3061 | |
| TGME49_chrXII | 4806777 | 4808523 | + | ID = TGME49_249810; | 2472 |
| | | | | length = 1746 | |
| TGME49_chrIX | 199072 | 199671 | + | ID = TGME49_279405; | 2473 |
| | | | | length = 599 | |
| TGME49_chrX | 2768326 | 2773227 | − | ID = TGME49_224860; | 2474 |
| | | | | length = 4901 | |
| TGME49_chrIa | 1487388 | 1491082 | − | ID = TGME49_295920; | 2475 |
| | | | | length = 3694 | |
| TGME49_chrX | 2226755 | 2227625 | − | ID = TGME49_225460; | 2476 |
| | | | | length = 870 | |
| TGME49_chrVIIa | 4203574 | 4207561 | − | ID = TGME49_281575; | 2477 |
| | | | | length = 3987 | |
| TGME49_chrIX | 5143608 | 5146410 | + | ID = TGME49_304990; | 2478 |
| | | | | length = 2802 | |
| TGME49_chrII | 700644 | 704009 | + | ID = TGME49_221930; | 2479 |
| | | | | length = 3365 | |
| TGME49_chrVIII | 4887753 | 4889510 | + | ID = TGME49_270900; | 2480 |
| | | | | length = 1757 | |
| TGME49_chrVIIb | 238808 | 241001 | − | ID = TGME49_264010; | 2481 |
| | | | | length = 2193 | |
| TGME49_chrX | 6494458 | 6497510 | − | ID = TGME49_214780; | 2482 |
| | | | | length = 3052 | |
| TGME49_chrX | 3945025 | 3947454 | + | ID = TGME49_212275; | 2483 |
| | | | | length = 2429 | |
| TGME49_chrXI | 784810 | 787257 | + | ID = TGME49_309752; | 2484 |
| | | | | length = 2447 | |
| TGME49_chrVIIb | 654090 | 658976 | + | ID = TGME49_263280; | 2485 |
| | | | | length = 4886 | |
| TGME49_chrVI | 1116533 | 1119178 | + | ID = TGME49_240255; | 2486 |
| | | | | length = 2645 | |
| TGME49_chrVIII | 3232920 | 3235018 | − | ID = TGME49_273840; | 2487 |
| | | | | length = 2098 | |
| TGME49_chrX | 4499729 | 4502574 | + | ID = TGME49_234622; | 2488 |
| | | | | length = 2845 | |
| TGME49_chrV | 1439721 | 1442480 | − | ID = TGME49_213920; | 2489 |
| | | | | length = 2759 | |
| TGME49_chrVIIb | 3409366 | 3413789 | + | ID = TGME49_258450; | 2490 |
| | | | | length = 4423 | |
| TGME49_chrVIIb | 1424754 | 1426396 | + | ID = TGME49_262010; | 2491 |
| | | | | length = 1642 | |
| TGME49_chrIX | 371574 | 373882 | + | ID = TGME49_267760; | 2492 |
| | | | | length = 2308 | |
| TGME49_chrVIII | 5584328 | 5586338 | + | ID = TGME49_269830; | 2493 |
| | | | | length = 2010 | |
| TGME49_chrVI | 465237 | 466979 | + | ID = TGME49_239110; | 2494 |
| | | | | length = 1742 | |
| TGME49_chrX | 2669894 | 2671902 | − | ID = TGME49_224932; | 2495 |
| | | | | length = 2008 | |
| TGME49_chrVIIa | 4422201 | 4425705 | − | ID = TGME49_282170; | 2496 |
| | | | | length = 3504 | |
| TGME49_chrXI | 611994 | 614956 | − | ID = TGME49_309280; | 2497 |
| | | | | length = 2962 | |
| TGME49_chrIb | 717976 | 721681 | − | ID = TGME49_208460; | 2498 |
| | | | | length = 3705 | |
| TGME49_chrXII | 1423485 | 1426090 | − | ID = TGME49_218570; | 2499 |
| | | | | length = 2605 | |
| TGME49_chrXII | 230042 | 234619 | − | ID = TGME49_300080; | 2500 |
| | | | | length = 4577 | |
| TGME49_chrXII | 2457647 | 2459970 | − | ID = TGME49_245660; | 2501 |
| | | | | length = 2323 | |
| TGME49_chrVIII | 6761552 | 6766520 | − | ID = TGME49_200250; | 2502 |
| | | | | length = 4968 | |
| TGME49_chrXII | 2287999 | 2289797 | − | ID = TGME49_245460; | 2503 |
| | | | | length = 1798 | |
| TGME49_chrXII | 3767325 | 3771010 | + | ID = TGME49_248270; | 2504 |
| | | | | length = 3685 | |
| TGME49_chrVIIb | 4267062 | 4268545 | + | ID = TGME49_257040; | 2505 |
| | | | | length = 1483 | |
| TGME49_chrXI | 5739747 | 5741353 | + | ID = TGME49_216980; | 2506 |
| | | | | length = 1606 | |
| TGME49_chrVIIa | 3566006 | 3567436 | + | ID = TGME49_202160; | 2507 |
| | | | | length = 1430 | |
| TGME49_chrVIII | 321618 | 326501 | + | ID = TGME49_229630; | 2508 |
| | | | | length = 4883 | |
| TGME49_chrXI | 4518461 | 4520837 | − | ID = TGME49_315140; | 2509 |
| | | | | length = 2376 | |
| TGME49_chrX | 5949504 | 5953689 | + | ID = TGME49_237530; | 2510 |
| | | | | length = 4185 | |
| TGME49_chrX | 3780406 | 3782419 | + | ID = TGME49_223490; | 2511 |
| | | | | length = 2013 | |
| TGME49_chrII | 1156231 | 1160734 | + | ID = TGME49_222660; | 2512 |
| | | | | length = 4503 | |
| TGME49_chrVI | 2851748 | 2852954 | − | ID = TGME49_243770; | 2513 |
| | | | | length = 1206 | |
| TGME49_chrVI | 539374 | 541507 | + | ID = TGME49_239310; | 2514 |
| | | | | length = 2133 | |
| TGME49_chrXII | 2997764 | 3002544 | − | ID = TGME49_246780; | 2515 |
| | | | | length = 4780 | |
| TGME49_chrXII | 849594 | 852277 | − | ID = TGME49_219570; | 2516 |
| | | | | length = 2683 | |
| TGME49_chrX | 2240720 | 2242446 | + | ID = TGME49_225435; | 2517 |
| | | | | length = 1726 | |
| TGME49_chrVIII | 2005504 | 2007905 | − | ID = TGME49_232310; | 2518 |
| | | | | length = 2401 | |
| TGME49_chrVIIb | 82870 | 85185 | − | ID = TGME49_264210; | 2519 |
| | | | | length = 2315 | |
| TGME49_chrII | 267810 | 272793 | + | ID = TGME49_221340; | 2520 |
| | | | | length = 4983 | |
| TGME49_chrV | 2468810 | 2471121 | + | ID = TGME49_285268; | 2521 |
| | | | | length = 2311 | |
| TGME49_chrIX | 2445296 | 2446946 | − | ID = TGME49_288320; | 2522 |
| | | | | length = 1650 | |
| TGME49_chrVIIa | 133327 | 135436 | − | ID = TGME49_280740; | 2523 |
| | | | | length = 2109 | |
| TGME49_chrIb | 864047 | 867064 | − | ID = TGME49_208790; | 2524 |
| | | | | length = 3017 | |
| TGME49_chrX | 6764674 | 6769143 | + | ID = TGME49_215130; | 2525 |
| | | | | length = 4469 | |
| TGME49_chrX | 2306330 | 2309400 | − | ID = TGME49_225340; | 2526 |
| | | | | length = 3070 | |
| TGME49_chrVIII | 3300013 | 3302035 | − | ID = TGME49_273740; | 2527 |
| | | | | length = 2022 | |
| TGME49_chrIX | 2102213 | 2103786 | + | ID = TGME49_264700; | 2528 |
| | | | | length = 1573 | |
| TGME49_chrXI | 288223 | 289585 | − | ID = TGME49_308820; | 2529 |
| | | | | length = 1362 | |
| TGME49_chrX | 7191885 | 7195726 | − | ID = TGME49_275340; | 2530 |
| | | | | length = 3841 | |
| TGME49_chrIX | 3487672 | 3492693 | − | ID = TGME49_289850; | 2531 |
| | | | | length = 5021 | |
| TGME49_chrX | 7028124 | 7032199 | − | ID = TGME49_215570; | 2532 |
| | | | | length = 4075 | |
| TGME49_chrVIIa | 2186716 | 2190767 | + | ID = TGME49_203830; | 2533 |
| | | | | length = 4051 | |
| TGME49_chrVIII | 4251639 | 4253470 | − | ID = TGME49_271980; | 2534 |
| | | | | length = 1831 | |
| TGME49_chrIb | 1643069 | 1646070 | − | ID = TGME49_321680; | 2535 |
| | | | | length = 3001 | |
| TGME49_chrIX | 5602450 | 5604206 | + | ID = TGME49_305820; | 2536 |
| | | | | length = 1756 | |
| TGME49_chrVIII | 2991968 | 2993305 | − | ID = TGME49_274140; | 2537 |
| | | | | length = 1337 | |
| TGME49_chrVIII | 5299297 | 5301755 | − | ID = TGME49_270273; | 2538 |
| | | | | length = 2458 | |
| TGME49_chrX | 2150245 | 2152288 | − | ID = TGME49_225570; | 2539 |
| | | | | length = 2043 | |
| TGME49_chrVI | 394289 | 399092 | − | ID = TGME49_239010; | 2540 |
| | | | | length = 4803 | |
| TGME49_chrV | 1875620 | 1880133 | − | ID = TGME49_286270; | 2541 |
| | | | | length = 4513 | |
| TGME49_chrXI | 1366381 | 1368421 | − | ID = TGME49_310455; | 2542 |
| | | | | length = 2040 | |
| TGME49_chrXII | 4113710 | 4117497 | + | ID = TGME49_248720; | 2543 |
| | | | | length = 3787 | |
| TGME49_chrXII | 2653676 | 2656148 | − | ID = TGME49_246080; | 2544 |
| | | | | length = 2472 | |
| TGME49_chrV | 1349479 | 1353386 | − | ID = TGME49_213810; | 2545 |
| | | | | length = 3907 | |
| TGME49_chrVIIa | 2290516 | 2292314 | + | ID = TGME49_203720; | 2546 |
| | | | | length = 1798 | |
| TGME49_chrIV | 1101627 | 1104332 | − | ID = TGME49_318770; | 2547 |
| | | | | length = 2705 | |
| TGME49_chrVIIb | 428872 | 432171 | + | ID = TGME49_263610; | 2548 |
| | | | | length = 3299 | |
| TGME49_chrIX | 6094343 | 6098588 | − | ID = TGME49_306450; | 2549 |
| | | | | length = 4245 | |
| TGME49_chrVIIa | 945669 | 947912 | − | ID = TGME49_206480; | 2550 |
| | | | | length = 2243 | |
| TGME49_chrVI | 1061389 | 1062893 | + | ID = TGME49_240200; | 2551 |
| | | | | length = 1504 | |
| TGME49_chrX | 5276493 | 5278337 | − | ID = TGME49_236080; | 2552 |
| | | | | length = 1844 | |
| TGME49_chrIX | 4400803 | 4405615 | + | ID = TGME49_291930; | 2553 |
| | | | | length = 4812 | |
| TGME49_chrIV | 1830458 | 1834833 | + | ID = TGME49_211310; | 2554 |
| | | | | length = 4375 | |
| TGME49_chrIV | 800777 | 803054 | + | ID = TGME49_319658; | 2555 |
| | | | | length = 2277 | |
| TGME49_chrII | 355915 | 357775 | − | ID = TGME49_221440; | 2556 |
| | | | | length = 1860 | |
| TGME49_chrXI | 1857706 | 1859770 | − | ID = TGME49_311200; | 2557 |
| | | | | length = 2064 | |
| TGME49_chrIV | 173575 | 175464 | + | ID = TGME49_320640; | 2558 |
| | | | | length = 1889 | |
| TGME49_chrIX | 4981120 | 4983371 | − | ID = TGME49_307575; | 2559 |
| | | | | length = 2251 | |
| TGME49_chrII | 1514515 | 1516458 | − | ID = TGME49_297060; | 2560 |
| | | | | length = 1943 | |
| TGME49_chrVIIa | 3755368 | 3756835 | + | ID = TGME49_201830; | 2561 |
| | | | | length = 1467 | |
| TGME49_chrVI | 1484701 | 1486911 | − | ID = TGME49_240860; | 2562 |
| | | | | length = 2210 | |
| TGME49_chrXI | 451688 | 453382 | − | ID = TGME49_309030; | 2563 |
| | | | | length = 1694 | |
| TGME49_chrVIIb | 655477 | 659865 | − | ID = TGME49_263290; | 2564 |
| | | | | length = 4388 | |
| TGME49_chrX | 309061 | 310991 | + | ID = TGME49_228440; | 2565 |
| | | | | length = 1930 | |
| TGME49_chrVIIa | 4363284 | 4367705 | + | ID = TGME49_282070; | 2566 |
| | | | | length = 4421 | |
| TGME49_chrX | 3399177 | 3401893 | − | ID = TGME49_224000; | 2567 |
| | | | | length = 2716 | |
| TGME49_chrIX | 3110902 | 3114645 | − | ID = TGME49_289240; | 2568 |
| | | | | length = 3743 | |
| TGME49_chrX | 7149209 | 7152824 | + | ID = TGME49_215775; | 2569 |
| | | | | length = 3615 | |
| TGME49_chrIV | 566220 | 568593 | + | ID = TGME49_320030; | 2570 |
| | | | | length = 2373 | |
| TGME49_chrVIII | 4360273 | 4363025 | − | ID = TGME49_271800; | 2571 |
| | | | | length = 2752 | |
| TGME49_chrXII | 2149793 | 2150458 | − | ID = TGME49_217810; | 2572 |
| | | | | length = 665 | |
| TGME49_chrX | 1677412 | 1680531 | + | ID = TGME49_226370; | 2573 |
| | | | | length = 3119 | |
| TGME49_chrIX | 2009537 | 2012433 | − | ID = TGME49_264805; | 2574 |
| | | | | length = 2896 | |
| TGME49_chrXII | 898597 | 901257 | + | ID = TGME49_219500; | 2575 |
| | | | | length = 2660 | |
| TGME49_chrVIII | 5068704 | 5071169 | − | ID = TGME49_270700; | 2576 |
| | | | | length = 2465 | |
| TGME49_chrVIIa | 2027671 | 2030677 | + | ID = TGME49_204050; | 2577 |
| | | | | length = 3006 | |
| TGME49_chrVIII | 1649426 | 1651273 | − | ID = TGME49_231920; | 2578 |
| | | | | length = 1847 | |
| TGME49_chrXII | 5008120 | 5009885 | + | ID = TGME49_250060; | 2579 |
| | | | | length = 1765 | |
| TGME49_chrVIII | 388039 | 391218 | − | ID = TGME49_229690; | 2580 |
| | | | | length = 3179 | |
| TGME49_chrIX | 2452386 | 2456727 | + | ID = TGME49_288340; | 2581 |
| | | | | length = 4341 | |
| TGME49_chrVIII | 3821895 | 3824021 | − | ID = TGME49_272645; | 2582 |
| | | | | length = 2126 | |
| TGME49_chrXI | 1390231 | 1391395 | + | ID = TGME49_310515; | 2583 |
| | | | | length = 1164 | |
| TGME49_chrXI | 1151478 | 1152895 | − | ID = TGME49_310200; | 2584 |
| | | | | length = 1417 | |
| TGME49_chrVI | 3450042 | 3452022 | + | ID = TGME49_244690; | 2585 |
| | | | | length = 1980 | |
| TGME49_chrVI | 8252 | 9653 | + | ID = TGME49_238010; | 2586 |
| | | | | length = 1401 | |
| TGME49_chrVIIa | 1054453 | 1057137 | + | ID = TGME49_206330; | 2587 |
| | | | | length = 2684 | |
| TGME49_chrVIIb | 3985832 | 3987219 | + | ID = TGME49_257540; | 2588 |
| | | | | length = 1387 | |
| TGME49_chrIX | 797312 | 799366 | − | ID = TGME49_267070; | 2589 |
| | | | | length = 2054 | |
| TGME49_chrVIIa | 3113269 | 3117191 | + | ID = TGME49_202670; | 2590 |
| | | | | length = 3922 | |
| TGME49_chrIX | 1108922 | 1111021 | − | ID = TGME49_266480; | 2591 |
| | | | | length = 2099 | |
| TGME49_chrVIII | 6007557 | 6009244 | − | ID = TGME49_269190; | 2592 |
| | | | | length = 1687 | |
| TGME49_chrII | 1888623 | 1893021 | − | ID = TGME49_297647; | 2593 |
| | | | | length = 4398 | |
| TGME49_chrV | 871531 | 873751 | − | ID = TGME49_213240; | 2594 |
| | | | | length = 2220 | |
| TGME49_chrVIII | 63466 | 67252 | + | ID = TGME49_229170; | 2595 |
| | | | | length = 3786 | |
| TGME49_chrV | 1777822 | 1780056 | + | ID = TGME49_286570; | 2596 |
| | | | | length = 2234 | |
| TGME49_chrX | 2225100 | 2226843 | + | ID = TGME49_225450; | 2597 |
| | | | | length = 1743 | |
| TGME49_chrVIII | 561740 | 564177 | − | ID = TGME49_230030; | 2598 |
| | | | | length = 2437 | |
| TGME49_chrX | 1938993 | 1940952 | + | ID = TGME49_225910; | 2599 |
| | | | | length = 1959 | |
| TGME49_chrIb | 471344 | 476049 | + | ID = TGME49_207965; | 2600 |
| | | | | length = 4705 | |
| TGME49_chrIX | 4978916 | 4982404 | + | ID = TGME49_307580; | 2601 |
| | | | | length = 3488 | |
| TGME49_chrVIIa | 160728 | 162946 | − | ID = TGME49_280710; | 2602 |
| | | | | length = 2218 | |
| TGME49_chrVIIa | 275203 | 280157 | + | ID = TGME49_280590; | 2603 |
| | | | | length = 4954 | |
| TGME49_chrVIIb | 858403 | 859587 | + | ID = TGME49_263030; | 2604 |
| | | | | length = 1184 | |
| TGME49_chrVIII | 6600438 | 6602216 | + | ID = TGME49_268250; | 2605 |
| | | | | length = 1778 | |
| TGME49_chrVIIa | 4395894 | 4398590 | + | ID = TGME49_282140; | 2606 |
| | | | | length = 2696 | |
| TGME49_chrIa | 192097 | 195881 | + | ID = TGME49_293250; | 2607 |
| | | | | length = 3784 | |
| TGME49_chrV | 2252900 | 2254312 | + | ID = TGME49_285750; | 2608 |
| | | | | length = 1412 | |
| TGME49_chrXI | 1317160 | 1319239 | + | ID = TGME49_310400; | 2609 |
| | | | | length = 2079 | |
| TGME49_chrVIII | 1664718 | 1667016 | + | ID = TGME49_231950; | 2610 |
| | | | | length = 2298 | |
| TGME49_chrIX | 2899729 | 2901760 | − | ID = TGME49_288990; | 2611 |
| | | | | length = 2031 | |
| TGME49_chrX | 6972539 | 6973901 | + | ID = TGME49_215470; | 2612 |
| | | | | length = 1362 | |
| TGME49_chrIX | 4396776 | 4400328 | − | ID = TGME49_291890; | 2613 |
| | | | | length = 3552 | |
| TGME49_chrIX | 772170 | 775776 | − | ID = TGME49_267120; | 2614 |
| | | | | length = 3606 | |
| TGME49_chrXI | 1110455 | 1114100 | + | ID = TGME49_310173; | 2615 |
| | | | | length = 3645 | |
| TGME49_chrXII | 5711051 | 5713503 | − | ID = TGME49_278990; | 2616 |
| | | | | length = 2452 | |
| TGME49_chrIV | 1118559 | 1122425 | − | ID = TGME49_318730; | 2617 |
| | | | | length = 3866 | |
| TGME49_chrVIIa | 1259192 | 1261805 | − | ID = TGME49_205625; | 2618 |
| | | | | length = 2613 | |
| TGME49_chrX | 6941543 | 6942949 | − | ID = TGME49_215390; | 2619 |
| | | | | length = 1406 | |
| TGME49_chrX | 4385644 | 4390371 | + | ID = TGME49_234440; | 2620 |
| | | | | length = 4727 | |
| TGME49_chrX | 4525519 | 4528145 | + | ID = TGME49_234690; | 2621 |
| | | | | length = 2626 | |
| TGME49_chrXI | 3917090 | 3919270 | − | ID = TGME49_314090; | 2622 |
| | | | | length = 2180 | |
| TGME49_chrXI | 6370740 | 6375773 | + | ID = TGME49_216155; | 2623 |
| | | | | length = 5033 | |
| TGME49_chrV | 1925673 | 1927982 | − | ID = TGME49_286200; | 2624 |
| | | | | length = 2309 | |
| TGME49_chrXII | 6381841 | 6386433 | + | ID = TGME49_277950; | 2625 |
| | | | | length = 4592 | |
| TGME49_chrX | 804068 | 805942 | + | ID = TGME49_227810; | 2626 |
| | | | | length = 1874 | |
| TGME49_chrVIIb | 4668460 | 4670573 | + | ID = TGME49_255870; | 2627 |
| | | | | length = 2113 | |
| TGME49_chrVIII | 2292223 | 2295223 | + | ID = TGME49_232960; | 2628 |
| | | | | length = 3000 | |
| TGME49_chrVIII | 5310860 | 5313259 | − | ID = TGME49_270250; | 2629 |
| | | | | length = 2399 | |
| TGME49_chrXII | 802072 | 803527 | + | ID = TGME49_219630; | 2630 |
| | | | | length = 1455 | |
| TGME49_chrVIII | 4546700 | 4548626 | + | ID = TGME49_271360; | 2631 |
| | | | | length = 1926 | |
| TGME49_chrXI | 599056 | 600665 | + | ID = TGME49_309265; | 2632 |
| | | | | length = 1609 | |
| TGME49_chrVIII | 3924549 | 3926856 | − | ID = TGME49_272530; | 2633 |
| | | | | length = 2307 | |
| TGME49_chrXI | 1255766 | 1257660 | − | ID = TGME49_310310; | 2634 |
| | | | | length = 1894 | |
| TGME49_chrVIIb | 2762832 | 2764576 | − | ID = TGME49_259590; | 2635 |
| | | | | length = 1744 | |
| TGME49_chrX | 2456056 | 2459220 | − | ID = TGME49_225140; | 2636 |
| | | | | length = 3164 | |
| TGME49_chrVIII | 5775921 | 5778051 | + | ID = TGME49_269460; | 2637 |
| | | | | length = 2130 | |
| TGME49_chrVI | 3016532 | 3018964 | − | ID = TGME49_244090; | 2638 |
| | | | | length = 2432 | |
| TGME49_chrVIIa | 1677841 | 1681517 | + | ID = TGME49_205000; | 2639 |
| | | | | length = 3676 | |
| TGME49_chrXI | 3582351 | 3585505 | − | ID = TGME49_313650; | 2640 |
| | | | | length = 3154 | |
| TGME49_chrII | 1271109 | 1273811 | − | ID = TGME49_222860; | 2641 |
| | | | | length = 2702 | |
| TGME49_chrXII | 577408 | 579217 | − | ID = TGME49_308096; | 2642 |
| | | | | length = 1809 | |
| TGME49_chrXII | 3175514 | 3177639 | − | ID = TGME49_247195; | 2643 |
| | | | | length = 2125 | |
| TGME49_chrVIIa | 2571840 | 2574320 | − | ID = TGME49_203330; | 2644 |
| | | | | length = 2480 | |
| TGME49_chrVIIa | 2523240 | 2527928 | + | ID = TGME49_203380; | 2645 |
| | | | | length = 4688 | |
| TGME49_chrIV | 1941441 | 1942608 | + | ID = TGME49_211080; | 2646 |
| | | | | length = 1167 | |
| TGME49_chrXII | 6089434 | 6093280 | − | ID = TGME49_278460; | 2647 |
| | | | | length = 3846 | |
| TGME49_chrXII | 6081058 | 6083036 | − | ID = TGME49_278490; | 2648 |
| | | | | length = 1978 | |
| TGME49_chrXII | 2941137 | 2943790 | + | ID = TGME49_246720; | 2649 |
| | | | | length = 2653 | |
| TGME49_chrVI | 3196293 | 3199662 | − | ID = TGME49_244335; | 2650 |
| | | | | length = 3369 | |
| TGME49_chrVIIb | 1031571 | 1036168 | − | ID = TGME49_262780; | 2651 |
| | | | | length = 4597 | |
| TGME49_chrVI | 1303181 | 1305102 | − | ID = TGME49_240510; | 2652 |
| | | | | length = 1921 | |
| TGME49_chrIV | 2021658 | 2023438 | − | ID = TGME49_210840; | 2653 |
| | | | | length = 1780 | |
| TGME49_chrVIII | 3226422 | 3228068 | − | ID = TGME49_273850; | 2654 |
| | | | | length = 1646 | |
| TGME49_chrVIIb | 3101472 | 3103925 | − | ID = TGME49_258900; | 2655 |
| | | | | length = 2453 | |
| TGME49_chrXI | 1160835 | 1164143 | + | ID = TGME49_310220; | 2656 |
| | | | | length = 3308 | |
| TGME49_chrXI | 551152 | 552779 | + | ID = TGME49_309195; | 2657 |
| | | | | length = 1627 | |
| TGME49_chrXI | 2837821 | 2840040 | − | ID = TGME49_312622; | 2658 |
| | | | | length = 2219 | |
| TGME49_chrII | 1387041 | 1390571 | + | ID = TGME49_223060; | 2659 |
| | | | | length = 3530 | |
| TGME49_chrIV | 1941441 | 1943297 | + | ID = TGME49_211070; | 2660 |
| | | | | length = 1856 | |
| TGME49_chrXI | 785847 | 788515 | − | ID = TGME49_309740; | 2661 |
| | | | | length = 2668 | |
| TGME49_chrX | 3052243 | 3054585 | − | ID = TGME49_224470; | 2662 |
| | | | | length = 2342 | |
| TGME49_chrIX | 4277659 | 4279338 | − | ID = TGME49_291370; | 2663 |
| | | | | length = 1679 | |
| TGME49_chrXI | 826261 | 828335 | − | ID = TGME49_309800; | 2664 |
| | | | | length = 2074 | |
| TGME49_chrXII | 6840262 | 6842703 | + | ID = TGME49_276930; | 2665 |
| | | | | length = 2441 | |
| TGME49_chrIV | 346077 | 348428 | − | ID = TGME49_320450; | 2666 |
| | | | | length = 2351 | |
| TGME49_chrXII | 1649988 | 1651365 | − | ID = TGME49_218250; | 2667 |
| | | | | length = 1377 | |
| TGME49_chrXII | 5151010 | 5152773 | + | ID = TGME49_250730; | 2668 |
| | | | | length = 1763 | |
| TGME49_chrX | 4002470 | 4005528 | + | ID = TGME49_212160; | 2669 |
| | | | | length = 3058 | |
| TGME49_chrVIIb | 2126932 | 2129789 | + | ID = TGME49_260600; | 2670 |
| | | | | length = 2857 | |
| TGME49_chrXI | 4406805 | 4410963 | − | ID = TGME49_314910; | 2671 |
| | | | | length = 4158 | |
| TGME49_chrVIII | 6257556 | 6259358 | + | ID = TGME49_268835; | 2672 |
| | | | | length = 1802 | |
| TGME49_chrXII | 1875381 | 1876656 | + | ID = TGME49_217490; | 2673 |
| | | | | length = 1275 | |
| TGME49_chrIX | 3856756 | 3857919 | − | ID = TGME49_290710; | 2674 |
| | | | | length = 1163 | |
| TGME49_chrVIII | 470060 | 474349 | + | ID = TGME49_229930; | 2675 |
| | | | | length = 4289 | |
| TGME49_chrXI | 4025920 | 4030724 | + | ID = TGME49_314358; | 2676 |
| | | | | length = 4804 | |
| TGME49_chrIb | 460087 | 461835 | − | ID = TGME49_207955; | 2677 |
| | | | | length = 1748 | |
| TGME49_chrVIIa | 2490731 | 2493062 | − | ID = TGME49_203480; | 2678 |
| | | | | length = 2331 | |
| TGME49_chrII | 562040 | 565277 | + | ID = TGME49_221685; | 2679 |
| | | | | length = 3237 | |
| TGME49_chrV | 2462151 | 2465375 | − | ID = TGME49_285290; | 2680 |
| | | | | length = 3224 | |
| TGME49_chrV | 645279 | 647282 | + | ID = TGME49_212850; | 2681 |
| | | | | length = 2003 | |
| TGME49_chrVIII | 5331414 | 5333301 | + | ID = TGME49_270210; | 2682 |
| | | | | length = 1887 | |
| TGME49_chrVIIb | 912343 | 914333 | − | ID = TGME49_262935; | 2683 |
| | | | | length = 1990 | |
| TGME49_chrVIIa | 4126871 | 4128947 | + | ID = TGME49_281450; | 2684 |
| | | | | length = 2076 | |
| TGME49_chrVI | 2158909 | 2160846 | + | ID = TGME49_242650; | 2685 |
| | | | | length = 1937 | |
| TGME49_chrVIIb | 4129894 | 4131374 | − | ID = TGME49_257330; | 2686 |
| | | | | length = 1480 | |
| TGME49_chrXII | 1555009 | 1560065 | − | ID = TGME49_218380; | 2687 |
| | | | | length = 5056 | |
| TGME49_chrXII | 3798058 | 3802342 | − | ID = TGME49_248300; | 2688 |
| | | | | length = 4284 | |
| TGME49_chrX | 2773657 | 2776323 | + | ID = TGME49_224850; | 2689 |
| | | | | length = 2666 | |
| TGME49_chrXII | 859876 | 861462 | − | ID = TGME49_219550; | 2690 |
| | | | | length = 1586 | |
| TGME49_chrVIIb | 3133820 | 3137682 | + | ID = TGME49_258840; | 2691 |
| | | | | length = 3862 | |
| TGME49_chrIX | 4560778 | 4562922 | + | ID = TGME49_292120; | 2692 |
| | | | | length = 2144 | |
| TGME49_chrIX | 1317799 | 1319959 | + | ID = TGME49_266070; | 2693 |
| | | | | length = 2160 | |
| TGME49_chrVIIa | 58368 | 61406 | − | ID = TGME49_280810; | 2694 |
| | | | | length = 3038 | |
| TGME49_chrVIII | 6365189 | 6366539 | − | ID = TGME49_268690; | 2695 |
| | | | | length = 1350 | |
| TGME49_chrXI | 6058978 | 6060618 | − | ID = TGME49_216600; | 2696 |
| | | | | length = 1640 | |
| TGME49_chrVI | 1334799 | 1336826 | − | ID = TGME49_240590; | 2697 |
| | | | | length = 2027 | |
| TGME49_chrV | 1973489 | 1975650 | − | ID = TGME49_286130; | 2698 |
| | | | | length = 2161 | |
| TGME49_chrVIIb | 1101193 | 1106043 | − | ID = TGME49_262655; | 2699 |
| | | | | length = 4850 | |
| TGME49_chrII | 403605 | 405254 | + | ID = TGME49_221510; | 2700 |
| | | | | length = 1649 | |
| TGME49_chrIV | 1735322 | 1737748 | − | ID = TGME49_211420; | 2701 |
| | | | | length = 2426 | |
| TGME49_chrVIII | 4650985 | 4654271 | + | ID = TGME49_271182; | 2702 |
| | | | | length = 3286 | |
| TGME49_chrVIIb | 921322 | 925018 | − | ID = TGME49_262930; | 2703 |
| | | | | length = 3696 | |
| TGME49_chrVI | 2311797 | 2313889 | − | ID = TGME49_242800; | 2704 |
| | | | | length = 2092 | |
| TGME49_chrIX | 4820131 | 4821972 | + | ID = TGME49_210390; | 2705 |
| | | | | length = 1841 | |
| TGME49_chrII | 1626675 | 1629738 | − | ID = TGME49_297220; | 2706 |
| | | | | length = 3063 | |
| TGME49_chrXII | 3445460 | 3450482 | + | ID = TGME49_247630; | 2707 |
| | | | | length = 5022 | |
| TGME49_chrX | 4800098 | 4801840 | − | ID = TGME49_235350; | 2708 |
| | | | | length = 1742 | |
| TGME49_chrVIII | 651925 | 653885 | − | ID = TGME49_230160; | 2709 |
| | | | | length = 1960 | |
| TGME49_chrVIII | 6674933 | 6676585 | + | ID = TGME49_268035; | 2710 |
| | | | | length = 1652 | |
| TGME49_chrXI | 26464 | 30284 | − | ID = TGME49_307260; | 2711 |
| | | | | length = 3820 | |
| TGME49_chrVI | 3115170 | 3117323 | − | ID = TGME49_244200; | 2712 |
| | | | | length = 2153 | |
| TGME49_chrXII | 899075 | 901898 | − | ID = TGME49_219510; | 2713 |
| | | | | length = 2823 | |
| TGME49_chrX | 7169371 | 7172828 | + | ID = TGME49_275320; | 2714 |
| | | | | length = 3457 | |
| TGME49_chrXII | 2953442 | 2955259 | + | ID = TGME49_246740; | 2715 |
| | | | | length = 1817 | |
| TGME49_chrIa | 1445468 | 1449325 | + | ID = TGME49_295990; | 2716 |
| | | | | length = 3857 | |
| TGME49_chrVIIb | 4614055 | 4617990 | + | ID = TGME49_255940; | 2717 |
| | | | | length = 3935 | |
| TGME49_chrIb | 1471673 | 1474994 | − | ID = TGME49_209820; | 2718 |
| | | | | length = 3321 | |
| TGME49_chrVI | 918303 | 921331 | + | ID = TGME49_239795; | 2719 |
| | | | | length = 3028 | |
| TGME49_chrVIIa | 1343739 | 1346394 | + | ID = TGME49_205540; | 2720 |
| | | | | length = 2655 | |
| TGME49_chrXI | 3259153 | 3260521 | − | ID = TGME49_313305; | 2721 |
| | | | | length = 1368 | |
| TGME49_chrIX | 5461619 | 5466485 | + | ID = TGME49_305560; | 2722 |
| | | | | length = 4866 | |
| TGME49_chrV | 2997437 | 2999458 | + | ID = TGME49_283740; | 2723 |
| | | | | length = 2021 | |
| TGME49_chrIX | 4903736 | 4907468 | + | ID = TGME49_210270; | 2724 |
| | | | | length = 3732 | |
| TGME49_chrVIIa | 3323217 | 3327698 | − | ID = TGME49_202450; | 2725 |
| | | | | length = 4481 | |
| TGME49_chrX | 5306045 | 5306976 | + | ID = TGME49_236153; | 2726 |
| | | | | length = 931 | |
| TGME49_chrIV | 1166825 | 1168908 | + | ID = TGME49_318650; | 2727 |
| | | | | length = 2083 | |
| TGME49_chrVIIb | 982149 | 984168 | − | ID = TGME49_262840; | 2728 |
| | | | | length = 2019 | |
| TGME49_chrIX | 5435334 | 5438062 | + | ID = TGME49_305490; | 2729 |
| | | | | length = 2728 | |
| TGME49_chrXI | 2989152 | 2990445 | − | ID = TGME49_312930; | 2730 |
| | | | | length = 1293 | |
| TGME49_chrIX | 3632418 | 3634414 | − | ID = TGME49_290180; | 2731 |
| | | | | length = 1996 | |
| TGME49_chrVIIa | 1843982 | 1846698 | − | ID = TGME49_204380; | 2732 |
| | | | | length = 2716 | |
| TGME49_chrVIII | 1887186 | 1890535 | − | ID = TGME49_232140; | 2733 |
| | | | | length = 3349 | |
| TGME49_chrIV | 823132 | 825847 | − | ID = TGME49_319630; | 2734 |
| | | | | length = 2715 | |
| TGME49_chrVI | 2636729 | 2639733 | + | ID = TGME49_243450; | 2735 |
| | | | | length = 3004 | |
| TGME49_chrX | 3856731 | 3858953 | + | ID = TGME49_223410; | 2736 |
| | | | | length = 2222 | |
| TGME49_chrXII | 4678421 | 4682858 | − | ID = TGME49_249600; | 2737 |
| | | | | length = 4437 | |
| TGME49_chrXI | 4509922 | 4511567 | − | ID = TGME49_315130; | 2738 |
| | | | | length = 1645 | |
| TGME49_chrIa | 1153066 | 1154657 | + | ID = TGME49_294812; | 2739 |
| | | | | length = 1591 | |
| TGME49_chrIX | 706165 | 708319 | − | ID = TGME49_267350; | 2740 |
| | | | | length = 2154 | |
| TGME49_chrXII | 4392567 | 4397271 | + | ID = TGME49_249250; | 2741 |
| | | | | length = 4704 | |
| TGME49_chrVIII | 3620478 | 3622646 | + | ID = TGME49_273200; | 2742 |
| | | | | length = 2168 | |
| TGME49_chrIX | 3048775 | 3052445 | − | ID = TGME49_289180; | 2743 |
| | | | | length = 3670 | |
| TGME49_chrX | 5786435 | 5789375 | + | ID = TGME49_237220; | 2744 |
| | | | | length = 2940 | |
| TGME49_chrX | 3448596 | 3453595 | + | ID = TGME49_223920; | 2745 |
| | | | | length = 4999 | |
| TGME49_chrVI | 1618811 | 1622040 | + | ID = TGME49_241010; | 2746 |
| | | | | length = 3229 | |
| TGME49_chrXII | 2808694 | 2813152 | − | ID = TGME49_246500; | 2747 |
| | | | | length = 4458 | |
| TGME49_chrIX | 952354 | 954209 | − | ID = TGME49_266820; | 2748 |
| | | | | length = 1855 | |
| TGME49_chrX | 152090 | 154165 | − | ID = TGME49_228770; | 2749 |
| | | | | length = 2075 | |
| TGME49_chrXII | 3243448 | 3245120 | + | ID = TGME49_247305; | 2750 |
| | | | | length = 1672 | |
| TGME49_chrX | 1028684 | 1030566 | − | ID = TGME49_227320; | 2751 |
| | | | | length = 1882 | |
| TGME49_chrVI | 453972 | 456175 | + | ID = TGME49_239087; | 2752 |
| | | | | length = 2203 | |
| TGME49_chrVIII | 370373 | 371876 | + | ID = TGME49_229670; | 2753 |
| | | | | length = 1503 | |
| TGME49_chrXII | 2205095 | 2207381 | − | ID = TGME49_217890; | 2754 |
| | | | | length = 2286 | |
| TGME49_chrVIII | 1171719 | 1176344 | + | ID = TGME49_230990; | 2755 |
| | | | | length = 4625 | |
| TGME49_chrX | 6719697 | 6721912 | − | ID = TGME49_215040; | 2756 |
| | | | | length = 2215 | |
| TGME49_chrXII | 3623594 | 3625340 | − | ID = TGME49_247920; | 2757 |
| | | | | length = 1746 | |
| TGME49_chrIX | 5921208 | 5925102 | − | ID = TGME49_306290; | 2758 |
| | | | | length = 3894 | |
| TGME49_chrVIIb | 945683 | 947561 | + | ID = TGME49_262890; | 2759 |
| | | | | length = 1878 | |
| TGME49_chrVIII | 3793351 | 3798091 | − | ID = TGME49_272695; | 2760 |
| | | | | length = 4740 | |
| TGME49_chrVIIb | 283563 | 284791 | − | ID = TGME49_263870; | 2761 |
| | | | | length = 1228 | |
| TGME49_chrXI | 2898675 | 2900997 | + | ID = TGME49_312680; | 2762 |
| | | | | length = 2322 | |
| TGME49_chrXI | 4269493 | 4271271 | + | ID = TGME49_314760; | 2763 |
| | | | | length = 1778 | |
| TGME49_chrIV | 743496 | 746016 | − | ID = TGME49_319860; | 2764 |
| | | | | length = 2520 | |
| TGME49_chrXII | 5944752 | 5946781 | − | ID = TGME49_278670; | 2765 |
| | | | | length = 2029 | |
| TGME49_chrVIIb | 329609 | 331237 | + | ID = TGME49_263760; | 2766 |
| | | | | length = 1628 | |
| TGME49_chrVIIb | 3612696 | 3614760 | − | ID = TGME49_258070; | 2767 |
| | | | | length = 2064 | |
| TGME49_chrII | 446960 | 451815 | + | ID = TGME49_221580; | 2768 |
| | | | | length = 4855 | |
| TGME49_chrXII | 5142000 | 5143982 | + | ID = TGME49_250710; | 2769 |
| | | | | length = 1982 | |
| TGME49_chrVIIa | 348808 | 351228 | − | ID = TGME49_280500; | 2770 |
| | | | | length = 2420 | |
| TGME49_chrXII | 1626315 | 1628343 | + | ID = TGME49_218280; | 2771 |
| | | | | length = 2028 | |
| TGME49_chrVIII | 4982170 | 4987009 | − | ID = TGME49_270810; | 2772 |
| | | | | length = 4839 | |
| TGME49_chrXI | 5211986 | 5213771 | − | ID = TGME49_316250; | 2773 |
| | | | | length = 1785 | |
| TGME49_chrVIIa | 1419599 | 1424205 | + | ID = TGME49_205398; | 2774 |
| | | | | length = 4606 | |
| TGME49_chrXII | 736337 | 738273 | + | ID = TGME49_219678; | 2775 |
| | | | | length = 1936 | |
| TGME49_chrXII | 1969472 | 1971512 | − | ID = TGME49_217640; | 2776 |
| | | | | length = 2040 | |
| TGME49_chrX | 2158857 | 2163020 | − | ID = TGME49_225560; | 2777 |
| | | | | length = 4163 | |
| TGME49_chrV | 1527084 | 1529358 | − | ID = TGME49_287210; | 2778 |
| | | | | length = 2274 | |
| TGME49_chrXII | 2985681 | 2987023 | − | ID = TGME49_246763; | 2779 |
| | | | | length = 1342 | |
| TGME49_chrIV | 1188460 | 1192145 | + | ID = TGME49_318610; | 2780 |
| | | | | length = 3685 | |
| TGME49_chrVIIb | 3118623 | 3122518 | − | ID = TGME49_258870; | 2781 |
| | | | | length = 3895 | |
| TGME49_chrVIII | 4338895 | 4340907 | + | ID = TGME49_271830; | 2782 |
| | | | | length = 2012 | |
| TGME49_chrXI | 120398 | 121691 | + | ID = TGME49_307015; | 2783 |
| | | | | length = 1293 | |
| TGME49_chrVIIb | 4652230 | 4655422 | + | ID = TGME49_255880; | 2784 |
| | | | | length = 3192 | |
| TGME49_chrVIII | 2229753 | 2232098 | − | ID = TGME49_232680; | 2785 |
| | | | | length = 2345 | |
| TGME49_chrXII | 3201946 | 3205868 | − | ID = TGME49_247250; | 2786 |
| | | | | length = 3922 | |
| TGME49_chrVIII | 1995325 | 1996498 | + | ID = TGME49_232290; | 2787 |
| | | | | length = 1173 | |
| TGME49_chrXII | 2349495 | 2351982 | + | ID = TGME49_245530; | 2788 |
| | | | | length = 2487 | |
| TGME49_chrVIII | 5296820 | 5298844 | − | ID = TGME49_270277; | 2789 |
| | | | | length = 2024 | |
| TGME49_chrXII | 6474091 | 6476198 | − | ID = TGME49_277860; | 2790 |
| | | | | length = 2107 | |
| TGME49_chrXI | 1331785 | 1333925 | − | ID = TGME49_310420; | 2791 |
| | | | | length = 2140 | |
| TGME49_chrX | 6606599 | 6611152 | + | ID = TGME49_214950; | 2792 |
| | | | | length = 4553 | |
| TGME49_chrIb | 1838024 | 1840558 | + | ID = TGME49_321400; | 2793 |
| | | | | length = 2534 | |
| TGME49_chrX | 1867675 | 1871933 | − | ID = TGME49_226020; | 2794 |
| | | | | length = 4258 | |
| TGME49_chrVIII | 6812170 | 6815991 | + | ID = TGME49_200350; | 2795 |
| | | | | length = 3821 | |
| TGME49_chrXII | 4797395 | 4799343 | − | ID = TGME49_249780; | 2796 |
| | | | | length = 1948 | |
| TGME49_chrVIII | 5106894 | 5110114 | + | ID = TGME49_270640; | 2797 |
| | | | | length = 3220 | |
| TGME49_chrXI | 1856929 | 1859770 | − | ID = TGME49_311190; | 2798 |
| | | | | length = 2841 | |
| TGME49_chrVIIa | 3429130 | 3430859 | − | ID = TGME49_202320; | 2799 |
| | | | | length = 1729 | |
| TGME49_chrVIIb | 181366 | 185076 | + | ID = TGME49_264100; | 2800 |
| | | | | length = 3710 | |
| TGME49_chrVIIb | 3646582 | 3648630 | − | ID = TGME49_258020; | 2801 |
| | | | | length = 2048 | |
| TGME49_chrV | 2798448 | 2800018 | + | ID = TGME49_284160; | 2802 |
| | | | | length = 1570 | |
| TGME49_chrXII | 5430181 | 5431564 | + | ID = TGME49_251500; | 2803 |
| | | | | length = 1383 | |
| TGME49_chrIa | 684229 | 685834 | + | ID = TGME49_294190; | 2804 |
| | | | | length = 1605 | |
| TGME49_chrX | 4514799 | 4517679 | + | ID = TGME49_234670; | 2805 |
| | | | | length = 2880 | |
| TGME49_chrIb | 19922 | 22201 | − | ID = TGME49_207380; | 2806 |
| | | | | length = 2279 | |
| TGME49_chrXII | 2837852 | 2840190 | + | ID = TGME49_246540; | 2807 |
| | | | | length = 2338 | |
| TGME49_chrVIIa | 3259896 | 3262598 | + | ID = TGME49_202520; | 2808 |
| | | | | length = 2702 | |
| TGME49_chrXI | 2665525 | 2666765 | − | ID = TGME49_312400; | 2809 |
| | | | | length = 1240 | |
| TGME49_chrII | 355180 | 357222 | + | ID = TGME49_221450; | 2810 |
| | | | | length = 2042 | |
| TGME49_chrX | 2433230 | 2435647 | + | ID = TGME49_225190; | 2811 |
| | | | | length = 2417 | |
| TGME49_chrVIII | 57748 | 60111 | − | ID = TGME49_229150; | 2812 |
| | | | | length = 2363 | |
| TGME49_chrVIIb | 4885643 | 4888514 | + | ID = TGME49_255340; | 2813 |
| | | | | length = 2871 | |
| TGME49_chrV | 725744 | 726888 | + | ID = TGME49_212955; | 2814 |
| | | | | length = 1144 | |
| TGME49_chrVI | 1580744 | 1581416 | − | ID = TGME49_240940; | 2815 |
| | | | | length = 672 | |
| TGME49_chrVIII | 928298 | 930205 | − | ID = TGME49_230640; | 2816 |
| | | | | length = 1907 | |
| TGME49_chrXII | 2832742 | 2834747 | + | ID = TGME49_246530; | 2817 |
| | | | | length = 2005 | |
| TGME49_chrVIII | 56761 | 59366 | + | ID = TGME49_229160; | 2818 |
| | | | | length = 2605 | |
| TGME49_chrIX | 3666729 | 3669016 | + | ID = TGME49_290260; | 2819 |
| | | | | length = 2287 | |
| TGME49_chrVIII | 6374094 | 6376344 | − | ID = TGME49_268660; | 2820 |
| | | | | length = 2250 | |
| TGME49_chrIV | 1692110 | 1694217 | − | ID = TGME49_211480; | 2821 |
| | | | | length = 2107 | |
| TGME49_chrVIIb | 2272974 | 2275367 | − | ID = TGME49_260440; | 2822 |
| | | | | length = 2393 | |
| TGME49_chrVIII | 4880298 | 4882600 | + | ID = TGME49_270910; | 2823 |
| | | | | length = 2302 | |
| TGME49_chrXII | 985332 | 987309 | + | ID = TGME49_219300; | 2824 |
| | | | | length = 1977 | |
| TGME49_chrX | 5430041 | 5431958 | + | ID = TGME49_236570; | 2825 |
| | | | | length = 1917 | |
| TGME49_chrVIIa | 1847823 | 1850467 | + | ID = TGME49_204360; | 2826 |
| | | | | length = 2644 | |
| TGME49_chrXII | 3743680 | 3747903 | + | ID = TGME49_248225; | 2827 |
| | | | | length = 4223 | |
| TGME49_chrX | 3783781 | 3785405 | + | ID = TGME49_223485; | 2828 |
| | | | | length = 1624 | |
| TGME49_chrXI | 4270243 | 4271815 | − | ID = TGME49_314750; | 2829 |
| | | | | length = 1572 | |
| TGME49_chrX | 1078543 | 1080826 | + | ID = TGME49_227115; | 2830 |
| | | | | length = 2283 | |
| TGME49_chrXII | 4659619 | 4662247 | − | ID = TGME49_249575; | 2831 |
| | | | | length = 2628 | |
| TGME49_chrVIIb | 2023964 | 2026656 | − | ID = TGME49_260825; | 2832 |
| | | | | length = 2692 | |
| TGME49_chrIX | 4639418 | 4641832 | + | ID = TGME49_292245; | 2833 |
| | | | | length = 2414 | |
| TGME49_chrVIII | 5798086 | 5801508 | + | ID = TGME49_269430; | 2834 |
| | | | | length = 3422 | |
| TGME49_chrX | 5080892 | 5083213 | − | ID = TGME49_235730; | 2835 |
| | | | | length = 2321 | |
| TGME49_chrIX | 283315 | 284597 | − | ID = TGME49_279310; | 2836 |
| | | | | length = 1282 | |
| TGME49_chrXII | 919752 | 924441 | − | ID = TGME49_219485; | 2837 |
| | | | | length = 4689 | |
| TGME49_chrIX | 2544921 | 2548040 | + | ID = TGME49_288450; | 2838 |
| | | | | length = 3119 | |
| TGME49_chrXI | 5343323 | 5345659 | − | ID = TGME49_316480; | 2839 |
| | | | | length = 2336 | |
| TGME49_chrVI | 207532 | 210236 | + | ID = TGME49_238410; | 2840 |
| | | | | length = 2704 | |
| TGME49_chrXI | 216523 | 218588 | + | ID = TGME49_306880; | 2841 |
| | | | | length = 2065 | |
| TGME49_chrXI | 513332 | 516847 | + | ID = TGME49_309130; | 2842 |
| | | | | length = 3515 | |
| TGME49_chrIX | 5351945 | 5353735 | − | ID = TGME49_305310; | 2843 |
| | | | | length = 1790 | |
| TGME49_chrIX | 1260940 | 1263377 | + | ID = TGME49_266260; | 2844 |
| | | | | length = 2437 | |
| TGME49_chrVIII | 6773085 | 6775554 | + | ID = TGME49_200290; | 2845 |
| | | | | length = 2469 | |
| TGME49_chrII | 1859313 | 1862244 | − | ID = TGME49_297520; | 2846 |
| | | | | length = 2931 | |
| TGME49_chrVIIb | 4221737 | 4224344 | + | ID = TGME49_257090; | 2847 |
| | | | | length = 2607 | |
| TGME49_chrVIII | 2074694 | 2076558 | − | ID = TGME49_232400; | 2848 |
| | | | | length = 1864 | |
| TGME49_chrX | 5184565 | 5187267 | − | ID = TGME49_235920; | 2849 |
| | | | | length = 2702 | |
| TGME49_chrVIIb | 3862212 | 3863945 | + | ID = TGME49_257730; | 2850 |
| | | | | length = 1733 | |
| TGME49_chrIX | 3935623 | 3938663 | + | ID = TGME49_290920; | 2851 |
| | | | | length = 3040 | |
| TGME49_chrIb | 609246 | 611891 | + | ID = TGME49_208330; | 2852 |
| | | | | length = 2645 | |
| TGME49_chrX | 5569094 | 5572139 | + | ID = TGME49_236920; | 2853 |
| | | | | length = 3045 | |
| TGME49_chrVIIb | 4551227 | 4555100 | − | ID = TGME49_256040; | 2854 |
| | | | | length = 3873 | |
| TGME49_chrX | 753755 | 755679 | − | ID = TGME49_227890; | 2855 |
| | | | | length = 1924 | |
| TGME49_chrVI | 686164 | 689115 | − | ID = TGME49_239475; | 2856 |
| | | | | length = 2951 | |
| TGME49_chrXI | 3941340 | 3945803 | + | ID = TGME49_314240; | 2857 |
| | | | | length = 4463 | |
| TGME49_chrVIIb | 3175832 | 3180410 | − | ID = TGME49_258810; | 2858 |
| | | | | length = 4578 | |
| TGME49_chrVIII | 4081769 | 4082967 | + | ID = TGME49_272300; | 2859 |
| | | | | length = 1198 | |
| TGME49_chrVIIb | 1535057 | 1538674 | − | ID = TGME49_261780; | 2860 |
| | | | | length = 3617 | |
| TGME49_chrXI | 3345412 | 3347300 | − | ID = TGME49_313400; | 2861 |
| | | | | length = 1888 | |
| TGME49_chrVIII | 2239078 | 2241114 | + | ID = TGME49_232730; | 2862 |
| | | | | length = 2036 | |
| TGME49_chrX | 3985430 | 3987663 | + | ID = TGME49_212190; | 2863 |
| | | | | length = 2233 | |
| TGME49_chrXII | 6261861 | 6263784 | + | ID = TGME49_278160; | 2864 |
| | | | | length = 1923 | |
| TGME49_chrX | 1134133 | 1136564 | + | ID = TGME49_227015; | 2865 |
| | | | | length = 2431 | |
| TGME49_chrIX | 4927380 | 4929331 | − | ID = TGME49_210255; | 2866 |
| | | | | length = 1951 | |
| TGME49_chrVIII | 494173 | 497365 | − | ID = TGME49_229970; | 2867 |
| | | | | length = 3192 | |
| TGME49_chrXI | 4603674 | 4605166 | − | ID = TGME49_315250; | 2868 |
| | | | | length = 1492 | |
| TGME49_chrVIIa | 385701 | 390631 | − | ID = TGME49_280465; | 2869 |
| | | | | length = 4930 | |
| TGME49_chrXI | 5186674 | 5188422 | + | ID = TGME49_316210; | 2870 |
| | | | | length = 1748 | |
| TGME49_chrVIII | 2721138 | 2725943 | − | ID = TGME49_233610; | 2871 |
| | | | | length = 4805 | |
| TGME49_chrX | 3076450 | 3078386 | − | ID = TGME49_224340; | 2872 |
| | | | | length = 1936 | |
| TGME49_chrVIII | 1070714 | 1074839 | + | ID = TGME49_230880; | 2873 |
| | | | | length = 4125 | |
| TGME49_chrXI | 6120810 | 6122479 | + | ID = TGME49_216480; | 2874 |
| | | | | length = 1669 | |
| TGME49_chrXI | 1268350 | 1270276 | − | ID = TGME49_310330; | 2875 |
| | | | | length = 1926 | |
| TGME49_chrVIII | 3749856 | 3752478 | + | ID = TGME49_272740; | 2876 |
| | | | | length = 2622 | |
| TGME49_chrX | 1479988 | 1481931 | + | ID = TGME49_226620; | 2877 |
| | | | | length = 1943 | |
| TGME49_chrXI | 5886992 | 5889236 | + | ID = TGME49_216780; | 2878 |
| | | | | length = 2244 | |
| TGME49_chrX | 952154 | 954291 | − | ID = TGME49_227420; | 2879 |
| | | | | length = 2137 | |
| TGME49_chrVIIa | 1028911 | 1033633 | − | ID = TGME49_206390; | 2880 |
| | | | | length = 4722 | |
| TGME49_chrX | 4474277 | 4477145 | − | ID = TGME49_234570; | 2881 |
| | | | | length = 2868 | |
| TGME49_chrVIII | 1404701 | 1406518 | + | ID = TGME49_231410; | 2882 |
| | | | | length = 1817 | |
| TGME49_chrV | 374249 | 377042 | − | ID = TGME49_220430; | 2883 |
| | | | | length = 2793 | |
| TGME49_chrX | 3360958 | 3364401 | − | ID = TGME49_224060; | 2884 |
| | | | | length = 3443 | |
| TGME49_chrXII | 3454490 | 3456588 | + | ID = TGME49_247648; | 2885 |
| | | | | length = 2098 | |
| TGME49_chrVI | 2498549 | 2500123 | + | ID = TGME49_243280; | 2886 |
| | | | | length = 1574 | |
| TGME49_chrXI | 2440230 | 2444604 | + | ID = TGME49_312130; | 2887 |
| | | | | length = 4374 | |
| TGME49_chrIX | 652699 | 656532 | + | ID = TGME49_267430; | 2888 |
| | | | | length = 3833 | |
| TGME49_chrVIII | 5516858 | 5520480 | + | ID = TGME49_269930; | 2889 |
| | | | | length = 3622 | |
| TGME49_chrXII | 5130690 | 5133986 | + | ID = TGME49_250700; | 2890 |
| | | | | length = 3296 | |
| TGME49_chrX | 6943159 | 6945000 | + | ID = TGME49_215410; | 2891 |
| | | | | length = 1841 | |
| TGME49_chrIV | 2086998 | 2089481 | + | ID = TGME49_210760; | 2892 |
| | | | | length = 2483 | |
| TGME49_chrIX | 5323005 | 5326221 | + | ID = TGME49_305270; | 2893 |
| | | | | length = 3216 | |
| TGME49_chrVIII | 6235276 | 6239397 | + | ID = TGME49_268870; | 2894 |
| | | | | length = 4121 | |
| TGME49_chrVIII | 6571884 | 6573723 | − | ID = TGME49_268290; | 2895 |
| | | | | length = 1839 | |
| TGME49_chrX | 7064259 | 7067143 | + | ID = TGME49_215650; | 2896 |
| | | | | length = 2884 | |
| TGME49_chrVIIb | 736866 | 738425 | − | ID = TGME49_263190; | 2897 |
| | | | | length = 1559 | |
| TGME49_chrX | 3318080 | 3319616 | − | ID = TGME49_224120; | 2898 |
| | | | | length = 1536 | |
| TGME49_chrIV | 1113568 | 1114995 | − | ID = TGME49_318738; | 2899 |
| | | | | length = 1427 | |
| TGME49_chrX | 3417971 | 3419580 | + | ID = TGME49_223970; | 2900 |
| | | | | length = 1609 | |
| TGME49_chrII | 1643140 | 1646065 | + | ID = TGME49_297270; | 2901 |
| | | | | length = 2925 | |
| TGME49_chrIX | 2241950 | 2246458 | + | ID = TGME49_264430; | 2902 |
| | | | | length = 4508 | |
| TGME49_chrII | 892236 | 894195 | + | ID = TGME49_222130; | 2903 |
| | | | | length = 1959 | |
| TGME49_chrII | 775384 | 778953 | + | ID = TGME49_222040; | 2904 |
| | | | | length = 3569 | |
| TGME49_chrVIII | 6236000 | 6240061 | − | ID = TGME49_268880; | 2905 |
| | | | | length = 4061 | |
| TGME49_chrXI | 1487516 | 1489916 | + | ID = TGME49_310630; | 2906 |
| | | | | length = 2400 | |
| TGME49_chrXI | 4480297 | 4482368 | + | ID = TGME49_315120; | 2907 |
| | | | | length = 2071 | |
| TGME49_chrV | 651209 | 653981 | + | ID = TGME49_212860; | 2908 |
| | | | | length = 2772 | |
| TGME49_chrXII | 5634615 | 5636719 | − | ID = TGME49_251860; | 2909 |
| | | | | length = 2104 | |
| TGME49_chrIX | 5826709 | 5829287 | − | ID = TGME49_306195; | 2910 |
| | | | | length = 2578 | |
| TGME49_chrVIIb | 4025611 | 4030642 | + | ID = TGME49_257470; | 2911 |
| | | | | length = 5031 | |
| TGME49_chrIb | 726992 | 728777 | − | ID = TGME49_208490; | 2912 |
| | | | | length = 1785 | |
| TGME49_chrVIIb | 3639823 | 3643240 | − | ID = TGME49_258030; | 2913 |
| | | | | length = 3417 | |
| TGME49_chrX | 183654 | 185507 | + | ID = TGME49_228720; | 2914 |
| | | | | length = 1853 | |
| TGME49_chrX | 1104418 | 1106139 | + | ID = TGME49_227060; | 2915 |
| | | | | length = 1721 | |
| TGME49_chrVIII | 265034 | 267090 | − | ID = TGME49_229450; | 2916 |
| | | | | length = 2056 | |
| TGME49_chrXII | 2685283 | 2688777 | + | ID = TGME49_246160; | 2917 |
| | | | | length = 3494 | |
| TGME49_chrXII | 1493469 | 1496095 | − | ID = TGME49_218500; | 2918 |
| | | | | length = 2626 | |
| TGME49_chrX | 293471 | 295200 | + | ID = TGME49_228470; | 2919 |
| | | | | length = 1729 | |
| TGME49_chrIa | 1148681 | 1150982 | + | ID = TGME49_294805; | 2920 |
| | | | | length = 2301 | |
| TGME49_chrXII | 5149388 | 5150805 | − | ID = TGME49_250720; | 2921 |
| | | | | length = 1417 | |
| TGME49_chrIV | 2465302 | 2467886 | + | ID = TGME49_301420; | 2922 |
| | | | | length = 2584 | |
| TGME49_chrVI | 902188 | 906938 | + | ID = TGME49_239780; | 2923 |
| | | | | length = 4750 | |
| TGME49_chrVIIb | 511337 | 515116 | + | ID = TGME49_263505; | 2924 |
| | | | | length = 3779 | |
| TGME49_chrIa | 50386 | 52683 | − | ID = TGME49_292960; | 2925 |
| | | | | length = 2297 | |
| TGME49_chrIb | 1410398 | 1412319 | − | ID = TGME49_209710; | 2926 |
| | | | | length = 1921 | |
| TGME49_chrII | 60741 | 63309 | − | ID = TGME49_220910; | 2927 |
| | | | | length = 2568 | |
| TGME49_chrXI | 2502970 | 2504148 | + | ID = TGME49_312210; | 2928 |
| | | | | length = 1178 | |
| TGME49_chrIX | 979074 | 983263 | − | ID = TGME49_266760; | 2929 |
| | | | | length = 4189 | |
| TGME49_chrVIII | 5800277 | 5801876 | − | ID = TGME49_269438; | 2930 |
| | | | | length = 1599 | |
| TGME49_chrXI | 6434992 | 6437143 | − | ID = TGME49_216053; | 2931 |
| | | | | length = 2151 | |
| TGME49_chrXII | 1281017 | 1283487 | + | ID = TGME49_218810; | 2932 |
| | | | | length = 2470 | |
| TGME49_chrX | 6632419 | 6636375 | + | ID = TGME49_214970; | 2933 |
| | | | | length = 3956 | |
| TGME49_chrII | 2224182 | 2225712 | + | ID = TGME49_298050; | 2934 |
| | | | | length = 1530 | |
| TGME49_chrXII | 1252520 | 1254167 | − | ID = TGME49_218850; | 2935 |
| | | | | length = 1647 | |
| TGME49_chrXI | 201833 | 203587 | + | ID = TGME49_306900; | 2936 |
| | | | | length = 1754 | |
| TGME49_chrII | 1937751 | 1940101 | + | ID = TGME49_297720; | 2937 |
| | | | | length = 2350 | |
| TGME49_chrXI | 1643494 | 1645015 | − | ID = TGME49_310880; | 2938 |
| | | | | length = 1521 | |
| TGME49_chrIa | 1626000 | 1628841 | − | ID = TGME49_295662; | 2939 |
| | | | | length = 2841 | |
| TGME49_chrIb | 643892 | 647186 | − | ID = TGME49_208380; | 2940 |
| | | | | length = 3294 | |
| TGME49_chrX | 6495939 | 6497510 | − | ID = TGME49_214783; | 2941 |
| | | | | length = 1571 | |
| TGME49_chrX | 3324291 | 3327072 | + | ID = TGME49_224090; | 2942 |
| | | | | length = 2781 | |
| TGME49_chrII | 1010666 | 1012466 | − | ID = TGME49_222280; | 2943 |
| | | | | length = 1800 | |
| TGME49_chrIV | 2377638 | 2379502 | + | ID = TGME49_301300; | 2944 |
| | | | | length = 1864 | |
| TGME49_chrIV | 953527 | 955274 | + | ID = TGME49_319500; | 2945 |
| | | | | length = 1747 | |
| TGME49_chrX | 6767415 | 6769751 | − | ID = TGME49_215110; | 2946 |
| | | | | length = 2336 | |
| TGME49_chrVIIb | 2029278 | 2031836 | − | ID = TGME49_260820; | 2947 |
| | | | | length = 2558 | |
| TGME49_chrIX | 254786 | 256497 | − | ID = TGME49_279340; | 2948 |
| | | | | length = 1711 | |
| TGME49_chrXII | 1756941 | 1759557 | + | ID = TGME49_217340; | 2949 |
| | | | | length = 2616 | |
| TGME49_chrXI | 4121268 | 4122993 | + | ID = TGME49_314480; | 2950 |
| | | | | length = 1725 | |
| TGME49_chrIX | 3847198 | 3850189 | + | ID = TGME49_290700; | 2951 |
| | | | | length = 2991 | |
| TGME49_chrIX | 5199766 | 5203644 | + | ID = TGME49_305050; | 2952 |
| | | | | length = 3878 | |
| TGME49_chrVIIa | 969639 | 972289 | + | ID = TGME49_206440; | 2953 |
| | | | | length = 2650 | |
| TGME49_chrIb | 140290 | 142474 | + | ID = TGME49_207590; | 2954 |
| | | | | length = 2184 | |
| TGME49_chrIb | 1109164 | 1113311 | − | ID = TGME49_209190; | 2955 |
| | | | | length = 4147 | |
| TGME49_chrX | 2374165 | 2376239 | + | ID = TGME49_225250; | 2956 |
| | | | | length = 2074 | |
| TGME49_chrVI | 2345044 | 2347093 | + | ID = TGME49_242840; | 2957 |
| | | | | length = 2049 | |
| TGME49_chrIX | 1613783 | 1618496 | + | ID = TGME49_265320; | 2958 |
| | | | | length = 4713 | |
| TGME49_chrXI | 3994405 | 3998830 | + | ID = TGME49_314320; | 2959 |
| | | | | length = 4425 | |
| TGME49_chrV | 1686358 | 1689982 | − | ID = TGME49_286760; | 2960 |
| | | | | length = 3624 | |
| TGME49_chrXI | 2907482 | 2911745 | − | ID = TGME49_312690; | 2961 |
| | | | | length = 4263 | |
| TGME49_chrVI | 883138 | 887371 | + | ID = TGME49_239748; | 2962 |
| | | | | length = 4233 | |
| TGME49_chrX | 2183300 | 2187485 | + | ID = TGME49_225520; | 2963 |
| | | | | length = 4185 | |
| TGME49_chrXI | 5574723 | 5577030 | + | ID = TGME49_316770; | 2964 |
| | | | | length = 2307 | |
| TGME49_chrII | 531485 | 533086 | + | ID = TGME49_221665; | 2965 |
| | | | | length = 1601 | |
| TGME49_chrIX | 3510218 | 3512191 | + | ID = TGME49_289900; | 2966 |
| | | | | length = 1973 | |
| TGME49_chrX | 6214945 | 6217062 | + | ID = TGME49_214290; | 2967 |
| | | | | length = 2117 | |
| TGME49_chrVIIb | 2983618 | 2984755 | − | ID = TGME49_259080; | 2968 |
| | | | | length = 1137 | |
| TGME49_chrVIIb | 157650 | 161052 | − | ID = TGME49_264140; | 2969 |
| | | | | length = 3402 | |
| TGME49_chrXII | 353508 | 355474 | − | ID = TGME49_299780; | 2970 |
| | | | | length = 1966 | |
| TGME49_chrX | 3193336 | 3197198 | + | ID = TGME49_224235; | 2971 |
| | | | | length = 3862 | |
| TGME49_chrXII | 351854 | 354229 | + | ID = TGME49_299670; | 2972 |
| | | | | length = 2375 | |
| TGME49_chrVIIb | 4691742 | 4696076 | + | ID = TGME49_255730; | 2973 |
| | | | | length = 4334 | |
| TGME49_chrVIII | 2314750 | 2316635 | − | ID = TGME49_232980; | 2974 |
| | | | | length = 1885 | |
| TGME49_chrIb | 1053747 | 1054786 | − | ID = TGME49_209112; | 2975 |
| | | | | length = 1039 | |
| TGME49_chrVI | 1271088 | 1275407 | − | ID = TGME49_240410; | 2976 |
| | | | | length = 4319 | |
| TGME49_chrIX | 1913750 | 1916033 | − | ID = TGME49_264900; | 2977 |
| | | | | length = 2283 | |
| TGME49_chrX | 691619 | 694702 | + | ID = TGME49_227980; | 2978 |
| | | | | length = 3083 | |
| TGME49_chrVIII | 5629048 | 5630894 | + | ID = TGME49_269740; | 2979 |
| | | | | length = 1846 | |
| TGME49_chrVIIb | 3410289 | 3414291 | − | ID = TGME49_258458; | 2980 |
| | | | | length = 4002 | |
| TGME49_chrVIII | 6430030 | 6432264 | − | ID = TGME49_268570; | 2981 |
| | | | | length = 2234 | |
| TGME49_chrIV | 1221132 | 1223825 | − | ID = TGME49_318570; | 2982 |
| | | | | length = 2693 | |
| TGME49_chrVIII | 2137156 | 2141623 | − | ID = TGME49_232520; | 2983 |
| | | | | length = 4467 | |
| TGME49_chrIb | 928521 | 933382 | − | ID = TGME49_208970; | 2984 |
| | | | | length = 4861 | |
| TGME49_chrVIIa | 89778 | 91426 | − | ID = TGME49_280790; | 2985 |
| | | | | length = 1648 | |
| TGME49_chrIX | 2800240 | 2802305 | + | ID = TGME49_288910; | 2986 |
| | | | | length = 2065 | |
| TGME49_chrV | 584166 | 587344 | − | ID = TGME49_212760; | 2987 |
| | | | | length = 3178 | |
| TGME49_chrVIII | 5602273 | 5604583 | + | ID = TGME49_269770; | 2988 |
| | | | | length = 2310 | |
| TGME49_chrX | 4428749 | 4429928 | + | ID = TGME49_234507; | 2989 |
| | | | | length = 1179 | |
| TGME49_chrXII | 1198382 | 1200277 | − | ID = TGME49_218950; | 2990 |
| | | | | length = 1895 | |
| TGME49_chrX | 274179 | 278462 | − | ID = TGME49_228620; | 2991 |
| | | | | length = 4283 | |
| TGME49_chrIV | 1177760 | 1179793 | + | ID = TGME49_318620; | 2992 |
| | | | | length = 2033 | |
| TGME49_chrIa | 547592 | 550266 | + | ID = TGME49_293770; | 2993 |
| | | | | length = 2674 | |
| TGME49_chrXI | 6518085 | 6519956 | | ID = TGME49_215940; | 2994 |
| | | | | length = 1871 | |
| TGME49_chrVI | 1400236 | 1402037 | + | ID = TGME49_240710; | 2995 |
| | | | | length = 1801 | |
| TGME49_chrXII | 3705841 | 3707649 | − | ID = TGME49_248150; | 2996 |
| | | | | length = 1808 | |
| TGME49_chrX | 6868965 | 6872314 | − | ID = TGME49_215260; | 2997 |
| | | | | length = 3349 | |
| TGME49_chrIX | 4980085 | 4983371 | − | ID = TGME49_307570; | 2998 |
| | | | | length = 3286 | |
| TGME49_chrIX | 6241762 | 6243674 | − | ID = TGME49_306650; | 2999 |
| | | | | length = 1912 | |
| TGME49_chrX | 7014609 | 7017444 | + | ID = TGME49_215560; | 3000 |
| | | | | length = 2835 | |
| TGME49_chrXI | 3686860 | 3689632 | − | ID = TGME49_313770; | 3001 |
| | | | | length = 2772 | |
| TGME49_chrIX | 2632220 | 2636771 | − | ID = TGME49_288600; | 3002 |
| | | | | length = 4551 | |
| TGME49_chrII | 83969 | 86643 | + | ID = TGME49_220950; | 3003 |
| | | | | length = 2674 | |
| TGME49_chrVIIb | 4483832 | 4488559 | + | ID = TGME49_256700; | 3004 |
| | | | | length = 4727 | |
| TGME49_chrVIIb | 920403 | 922803 | + | ID = TGME49_262920; | 3005 |
| | | | | length = 2400 | |
| TGME49_chrIX | 3726863 | 3728579 | − | ID = TGME49_290340; | 3006 |
| | | | | length = 1716 | |
| TGME49_chrIV | 2265513 | 2268004 | − | ID = TGME49_301000; | 3007 |
| | | | | length = 2491 | |
| TGME49_chrVIII | 4617442 | 4619870 | − | ID = TGME49_271270; | 3008 |
| | | | | length = 2428 | |
| TGME49_chrVIII | 4916184 | 4918619 | − | ID = TGME49_270880; | 3009 |
| | | | | length = 2435 | |
| TGME49_chrXI | 541082 | 545032 | − | ID = TGME49_309180; | 3010 |
| | | | | length = 3950 | |
| TGME49_chrVI | 1421170 | 1423356 | − | ID = TGME49_240730; | 3011 |
| | | | | length = 2186 | |
| TGME49_chrX | 5311235 | 5312787 | + | ID = TGME49_236190; | 3012 |
| | | | | length = 1552 | |
| TGME49_chrVIIa | 1934090 | 1936122 | − | ID = TGME49_204270; | 3013 |
| | | | | length = 2032 | |
| TGME49_chrX | 3689921 | 3692588 | + | ID = TGME49_223620; | 3014 |
| | | | | length = 2667 | |
| TGME49_chrIV | 666975 | 669700 | − | ID = TGME49_319920; | 3015 |
| | | | | length = 2725 | |
| TGME49_chrVIII | 2702317 | 2704841 | + | ID = TGME49_233540; | 3016 |
| | | | | length = 2524 | |
| TGME49_chrXII | 4230314 | 4232511 | − | ID = TGME49_248860; | 3017 |
| | | | | length = 2197 | |
| TGME49_chrXI | 2675685 | 2678516 | + | ID = TGME49_312430; | 3018 |
| | | | | length = 2831 | |
| TGME49_chrXII | 4242327 | 4243685 | − | ID = TGME49_248880; | 3019 |
| | | | | length = 1358 | |
| TGME49_chrVIIa | 3478649 | 3480506 | − | ID = TGME49_202255; | 3020 |
| | | | | length = 1857 | |
| TGME49_chrXII | 157841 | 160945 | − | ID = TGME49_300220; | 3021 |
| | | | | length = 3104 | |
| TGME49_chrIX | 1858908 | 1862051 | + | ID = TGME49_264990; | 3022 |
| | | | | length = 3143 | |
| TGME49_chrIV | 1126774 | 1128732 | − | ID = TGME49_318720; | 3023 |
| | | | | length = 1958 | |
| TGME49_chrVIIb | 342230 | 347024 | − | ID = TGME49_263750; | 3024 |
| | | | | length = 4794 | |
| TGME49_chrVIIa | 3431716 | 3434599 | + | ID = TGME49_202300; | 3025 |
| | | | | length = 2883 | |
| TGME49_chrIX | 3364029 | 3366093 | − | ID = TGME49_289640; | 3026 |
| | | | | length = 2064 | |
| TGME49_chrIV | 1846118 | 1847509 | + | ID = TGME49_211300; | 3027 |
| | | | | length = 1391 | |
| TGME49_chrVI | 1939321 | 1941969 | + | ID = TGME49_242290; | 3028 |
| | | | | length = 2648 | |
| TGME49_chrIb | 1838024 | 1841751 | + | ID = TGME49_321390; | 3029 |
| | | | | length = 3727 | |
| TGME49_chrXII | 3025443 | 3028262 | − | ID = TGME49_246930; | 3030 |
| | | | | length = 2819 | |
| TGME49_chrIb | 982520 | 984651 | − | ID = TGME49_209005; | 3031 |
| | | | | length = 2131 | |
| TGME49_chrIX | 5440014 | 5444552 | + | ID = TGME49_305510; | 3032 |
| | | | | length = 4538 | |
| TGME49_chrIb | 1785634 | 1787380 | − | ID = TGME49_321460; | 3033 |
| | | | | length = 1746 | |
| TGME49_chrIX | 1269529 | 1271869 | − | ID = TGME49_266150; | 3034 |
| | | | | length = 2340 | |
| TGME49_chrIV | 136530 | 141115 | + | ID = TGME49_320680; | 3035 |
| | | | | length = 4585 | |
| TGME49_chrII | 2129147 | 2131563 | − | ID = TGME49_297940; | 3036 |
| | | | | length = 2416 | |
| TGME49_chrX | 5311706 | 5313875 | − | ID = TGME49_236160; | 3037 |
| | | | | length = 2169 | |
| TGME49_chrIX | 1175142 | 1176935 | − | ID = TGME49_266390; | 3038 |
| | | | | length = 1793 | |
| TGME49_chrXII | 3270428 | 3272692 | + | ID = TGME49_247340; | 3039 |
| | | | | length = 2264 | |
| TGME49_chrVIIa | 4386523 | 4390549 | − | ID = TGME49_282110; | 3040 |
| | | | | length = 4026 | |
| TGME49_chrXI | 5712542 | 5714427 | + | ID = TGME49_217020; | 3041 |
| | | | | length = 1885 | |
| TGME49_chrIb | 508930 | 511554 | − | ID = TGME49_207990; | 3042 |
| | | | | length = 2624 | |
| TGME49_chrIV | 509090 | 514052 | + | ID = TGME49_320090; | 3043 |
| | | | | length = 4962 | |
| TGME49_chrXII | 2323596 | 2325670 | − | ID = TGME49_245500; | 3044 |
| | | | | length = 2074 | |
| TGME49_chrII | 1838793 | 1840776 | − | ID = TGME49_297500; | 3045 |
| | | | | length = 1983 | |
| TGME49_chrIa | 1848076 | 1849826 | + | ID = TGME49_295310; | 3046 |
| | | | | length = 1750 | |
| TGME49_chrVIIa | 118366 | 123372 | + | ID = TGME49_280750; | 3047 |
| | | | | length = 5006 | |
| TGME49_chrIV | 2323619 | 2324963 | + | ID = TGME49_301222; | 3048 |
| | | | | length = 1344 | |
| TGME49_chrVIIb | 2525803 | 2527506 | + | ID = TGME49_260010; | 3049 |
| | | | | length = 1703 | |
| TGME49_chrVIII | 2604789 | 2607085 | − | ID = TGME49_233340; | 3050 |
| | | | | length = 2296 | |
| TGME49_chrVIIb | 629441 | 632828 | − | ID = TGME49_263327; | 3051 |
| | | | | length = 3387 | |
| TGME49_chrVI | 718257 | 722058 | − | ID = TGME49_239490; | 3052 |
| | | | | length = 3801 | |
| TGME49_chrVIII | 1219171 | 1224214 | − | ID = TGME49_231060; | 3053 |
| | | | | length = 5043 | |
| TGME49_chrX | 7366485 | 7369133 | − | ID = TGME49_207060; | 3054 |
| | | | | length = 2648 | |
| TGME49_chrIX | 326465 | 328648 | − | ID = TGME49_267840; | 3055 |
| | | | | length = 2183 | |
| TGME49_chrVIIb | 3400841 | 3404561 | + | ID = TGME49_258470; | 3056 |
| | | | | length = 3720 | |
| TGME49_chrVIII | 3674014 | 3677250 | + | ID = TGME49_273075; | 3057 |
| | | | | length = 3236 | |
| TGME49_chrVIIa | 2121339 | 2125267 | − | ID = TGME49_203940; | 3058 |
| | | | | length = 3928 | |
| TGME49_chrXII | 2197081 | 2199723 | + | ID = TGME49_217875; | 3059 |
| | | | | length = 2642 | |
| TGME49_chrXI | 569487 | 571481 | + | ID = TGME49_309230; | 3060 |
| | | | | length = 1994 | |
| TGME49_chrX | 660185 | 662395 | − | ID = TGME49_228040; | 3061 |
| | | | | length = 2210 | |
| TGME49_chrVIII | 2294089 | 2295780 | − | ID = TGME49_232955; | 3062 |
| | | | | length = 1691 | |
| TGME49_chrXII | 5476685 | 5478806 | − | ID = TGME49_251590; | 3063 |
| | | | | length = 2121 | |
| TGME49_chrIb | 633161 | 636374 | + | ID = TGME49_208370; | 3064 |
| | | | | length = 3213 | |
| TGME49_chrXII | 6262592 | 6264233 | − | ID = TGME49_278170; | 3065 |
| | | | | length = 1641 | |
| TGME49_chrXII | 6259327 | 6260911 | − | ID = TGME49_278180; | 3066 |
| | | | | length = 1584 | |
| TGME49_chrVIIb | 2848299 | 2850481 | + | ID = TGME49_259230; | 3067 |
| | | | | length = 2182 | |
| TGME49_chrIV | 1768003 | 1771226 | + | ID = TGME49_211385; | 3068 |
| | | | | length = 3223 | |
| TGME49_chrVIII | 1720655 | 1723473 | − | ID = TGME49_231994; | 3069 |
| | | | | length = 2818 | |
| TGME49_chrIX | 4080078 | 4082079 | + | ID = TGME49_291040; | 3070 |
| | | | | length = 2001 | |
| TGME49_chrVI | 1317414 | 1319297 | − | ID = TGME49_240540; | 3071 |
| | | | | length = 1883 | |
| TGME49_chrV | 1652865 | 1654841 | + | ID = TGME49_286810; | 3072 |
| | | | | length = 1976 | |
| TGME49_chrVIIb | 3251619 | 3253665 | − | ID = TGME49_258700; | 3073 |
| | | | | length = 2046 | |
| TGME49_chrVIIb | 1370354 | 1372539 | + | ID = TGME49_262110; | 3074 |
| | | | | length = 2185 | |
| TGME49_chrVIIb | 1449509 | 1451279 | + | ID = TGME49_261970; | 3075 |
| | | | | length = 1770 | |
| TGME49_chrXI | 781501 | 783875 | − | ID = TGME49_309730; | 3076 |
| | | | | length = 2374 | |
| TGME49_chrVIIb | 1649346 | 1654154 | − | ID = TGME49_261580; | 3077 |
| | | | | length = 4808 | |
| TGME49_chrVIII | 181487 | 183193 | − | ID = TGME49_229340; | 3078 |
| | | | | length = 1706 | |
| TGME49_chrX | 2911649 | 2913447 | − | ID = TGME49_224650; | 3079 |
| | | | | length = 1798 | |
| TGME49_chrIb | 306500 | 307968 | + | ID = TGME49_207810; | 3080 |
| | | | | length = 1468 | |
| TGME49_chrXII | 951504 | 953111 | − | ID = TGME49_219440; | 3081 |
| | | | | length = 1607 | |
| TGME49_chrX | 6921384 | 6924980 | + | ID = TGME49_215360; | 3082 |
| | | | | length = 3596 | |
| TGME49_chrIa | 387758 | 391767 | − | ID = TGME49_293510; | 3083 |
| | | | | length = 4009 | |
| TGME49_chrVIIb | 2729364 | 2731606 | + | ID = TGME49_259650; | 3084 |
| | | | | length = 2242 | |
| TGME49_chrX | 592859 | 595829 | − | ID = TGME49_228100; | 3085 |
| | | | | length = 2970 | |
| TGME49_chrX | 7029939 | 7032199 | − | ID = TGME49_215580; | 3086 |
| | | | | length = 2260 | |
| TGME49_chrIb | 1191601 | 1193002 | − | ID = TGME49_209290; | 3087 |
| | | | | length = 1401 | |
| TGME49_chrX | 3027268 | 3029865 | − | ID = TGME49_224500; | 3088 |
| | | | | length = 2597 | |
| TGME49_chrXII | 6897732 | 6900123 | + | ID = TGME49_276830; | 3089 |
| | | | | length = 2391 | |
| TGME49_chrXII | 6809802 | 6813303 | + | ID = TGME49_276980; | 3090 |
| | | | | length = 3501 | |
| TGME49_chrV | 1851350 | 1853522 | − | ID = TGME49_286410; | 3091 |
| | | | | length = 2172 | |
| TGME49_chrXI | 4946164 | 4950718 | + | ID = TGME49_315760; | 3092 |
| | | | | length = 4554 | |
| TGME49_chrIV | 1996453 | 2000862 | + | ID = TGME49_210960; | 3093 |
| | | | | length = 4409 | |
| TGME49_chrX | 7087474 | 7089312 | + | ID = TGME49_215690; | 3094 |
| | | | | length = 1838 | |
| TGME49_chrXI | 2289637 | 2291430 | − | ID = TGME49_311780; | 3095 |
| | | | | length = 1793 | |
| TGME49_chrVIII | 2627341 | 2629242 | − | ID = TGME49_233400; | 3096 |
| | | | | length = 1901 | |
| TGME49_chrX | 6836429 | 6838321 | + | ID = TGME49_215250; | 3097 |
| | | | | length = 1892 | |
| TGME49_chrX | 5400481 | 5403238 | + | ID = TGME49_236530; | 3098 |
| | | | | length = 2757 | |
| TGME49_chrV | 2938627 | 2941078 | + | ID = TGME49_283820; | 3099 |
| | | | | length = 2451 | |
| TGME49_chrVIIa | 1810563 | 1815332 | + | ID = TGME49_204400; | 3100 |
| | | | | length = 4769 | |
| TGME49_chrXII | 5747706 | 5751318 | + | ID = TGME49_278930; | 3101 |
| | | | | length = 3612 | |
| TGME49_chrXII | 6168265 | 6171686 | − | ID = TGME49_278290; | 3102 |
| | | | | length = 3421 | |
| TGME49_chrV | 1344460 | 1347471 | − | ID = TGME49_213800; | 3103 |
| | | | | length = 3011 | |
| TGME49_chrII | 41471 | 44914 | − | ID = TGME49_220890; | 3104 |
| | | | | length = 3443 | |
| TGME49_chrIb | 709441 | 711471 | − | ID = TGME49_208430; | 3105 |
| | | | | length = 2030 | |
| TGME49_chrXII | 5633131 | 5634774 | + | ID = TGME49_251870; | 3106 |
| | | | | length = 1643 | |
| TGME49_chrVIIa | 1364199 | 1366359 | + | ID = TGME49_205500; | 3107 |
| | | | | length = 2160 | |
| TGME49_chrVIIb | 2204527 | 2206884 | + | ID = TGME49_260490; | 3108 |
| | | | | length = 2357 | |
| TGME49_chrX | 4374032 | 4376202 | − | ID = TGME49_234420; | 3109 |
| | | | | length = 2170 | |
| TGME49_chrVIII | 5008760 | 5011510 | − | ID = TGME49_270770; | 3110 |
| | | | | length = 2750 | |
| TGME49_chrV | 1237226 | 1239000 | + | ID = TGME49_213690; | 3111 |
| | | | | length = 1774 | |
| TGME49_chrV | 955818 | 959487 | − | ID = TGME49_213360; | 3112 |
| | | | | length = 3669 | |
| TGME49_chrVIII | 2206818 | 2209210 | + | ID = TGME49_232655; | 3113 |
| | | | | length = 2392 | |
| TGME49_chrX | 3635680 | 3638226 | − | ID = TGME49_223725; | 3114 |
| | | | | length = 2546 | |
| TGME49_chrVI | 1734581 | 1739230 | − | ID = TGME49_241830; | 3115 |
| | | | | length = 4649 | |
| TGME49_chrIV | 1832476 | 1835918 | − | ID = TGME49_211320; | 3116 |
| | | | | length = 3442 | |
| TGME49_chrX | 1197026 | 1200743 | − | ID = TGME49_226960; | 3117 |
| | | | | length = 3717 | |
| TGME49_chrVIII | 5603298 | 5605973 | − | ID = TGME49_269775; | 3118 |
| | | | | length = 2675 | |
| TGME49_chrVIIb | 3587693 | 3590070 | − | ID = TGME49_258090; | 3119 |
| | | | | length = 2377 | |
| TGME49_chrX | 6305337 | 6307575 | − | ID = TGME49_214470; | 3120 |
| | | | | length = 2238 | |
| TGME49_chrX | 2389500 | 2393945 | − | ID = TGME49_225230; | 3121 |
| | | | | length = 4445 | |
| TGME49_chrX | 968991 | 973953 | + | ID = TGME49_227380; | 3122 |
| | | | | length = 4962 | |
| TGME49_chrII | 1194300 | 1198358 | + | ID = TGME49_222700; | 3123 |
| | | | | length = 4058 | |
| TGME49_chrXII | 5594326 | 5596456 | − | ID = TGME49_251800; | 3124 |
| | | | | length = 2130 | |
| TGME49_chrV | 2700214 | 2702822 | − | ID = TGME49_284590; | 3125 |
| | | | | length = 2608 | |
| TGME49_chrVIII | 6385919 | 6387483 | + | ID = TGME49_268630; | 3126 |
| | | | | length = 1564 | |
| TGME49_chrVIIa | 2542159 | 2544885 | − | ID = TGME49_203370; | 3127 |
| | | | | length = 2726 | |
| TGME49_chrIX | 4954974 | 4957346 | − | ID = TGME49_210230; | 3128 |
| | | | | length = 2372 | |
| TGME49_chrIa | 1011312 | 1015928 | − | ID = TGME49_294620; | 3129 |
| | | | | length = 4616 | |
| TGME49_chrVIII | 3319333 | 3323273 | − | ID = TGME49_273690; | 3130 |
| | | | | length = 3940 | |
| TGME49_chrIa | 1089755 | 1093766 | − | ID = TGME49_294710; | 3131 |
| | | | | length = 4011 | |
| TGME49_chrII | 683949 | 685295 | + | ID = TGME49_221905; | 3132 |
| | | | | length = 1346 | |
| TGME49_chrX | 5344224 | 5344882 | − | ID = TGME49_236230; | 3133 |
| | | | | length = 658 | |
| TGME49_chrVIII | 6137141 | 6141591 | − | ID = TGME49_269015; | 3134 |
| | | | | length = 4450 | |
| TGME49_chrVIII | 3855036 | 3855734 | + | ID = TGME49_272593; | 3135 |
| | | | | length = 698 | |
| TGME49_chrVI | 2498990 | 2500814 | − | ID = TGME49_243265; | 3136 |
| | | | | length = 1824 | |
| TGME49_chrVI | 1383916 | 1388756 | − | ID = TGME49_240680; | 3137 |
| | | | | length = 4840 | |
| TGME49_chrX | 1826751 | 1828019 | − | ID = TGME49_226072; | 3138 |
| | | | | length = 1268 | |
| TGME49_chrXII | 4263605 | 4265733 | − | ID = TGME49_248940; | 3139 |
| | | | | length = 2128 | |
| TGME49_chrX | 4833704 | 4835258 | − | ID = TGME49_235390; | 3140 |
| | | | | length = 1554 | |
| TGME49_chrIX | 5492734 | 5495529 | + | ID = TGME49_305600; | 3141 |
| | | | | length = 2795 | |
| TGME49_chrIV | 1597207 | 1599157 | − | ID = TGME49_211700; | 3142 |
| | | | | length = 1950 | |
| TGME49_chrVIIb | 2200394 | 2201672 | − | ID = TGME49_260510; | 3143 |
| | | | | length = 1278 | |
| TGME49_chrX | 6491939 | 6496460 | + | ID = TGME49_214790; | 3144 |
| | | | | length = 4521 | |
| TGME49_chrXII | 929521 | 931802 | + | ID = TGME49_219450; | 3145 |
| | | | | length = 2281 | |
| TGME49_chrXII | 1474197 | 1475820 | − | ID = TGME49_218540; | 3146 |
| | | | | length = 1623 | |
| TGME49_chrX | 2406861 | 2409830 | − | ID = TGME49_225220; | 3147 |
| | | | | length = 2969 | |
| TGME49_chrX | 1658166 | 1660752 | − | ID = TGME49_226410; | 3148 |
| | | | | length = 2586 | |
| TGME49_chrIV | 2117702 | 2122018 | − | ID = TGME49_210730; | 3149 |
| | | | | length = 4316 | |
| TGME49_chrVI | 2322359 | 2326694 | − | ID = TGME49_242820; | 3150 |
| | | | | length = 4335 | |
| TGME49_chrX | 6720390 | 6721912 | − | ID = TGME49_215050; | 3151 |
| | | | | length = 1522 | |
| TGME49_chrXII | 3330336 | 3332740 | − | ID = TGME49_247410; | 3152 |
| | | | | length = 2404 | |
| TGME49_chrX | 4799828 | 4801328 | + | ID = TGME49_235360; | 3153 |
| | | | | length = 1500 | |
| TGME49_chrX | 1080206 | 1081448 | − | ID = TGME49_227130; | 3154 |
| | | | | length = 1242 | |
| TGME49_chrXII | 1529034 | 1531895 | − | ID = TGME49_218420; | 3155 |
| | | | | length = 2861 | |
| TGME49_chrXI | 4761956 | 4764431 | + | ID = TGME49_315510; | 3156 |
| | | | | length = 2475 | |
| TGME49_chrXII | 4506382 | 4509664 | + | ID = TGME49_249390; | 3157 |
| | | | | length = 3282 | |
| TGME49_chrX | 1539018 | 1541043 | + | ID = TGME49_226550; | 3158 |
| | | | | length = 2025 | |
| TGME49_chrX | 676709 | 678567 | + | ID = TGME49_228000; | 3159 |
| | | | | length = 1858 | |
| TGME49_chrXII | 6040410 | 6044218 | + | ID = TGME49_278518; | 3160 |
| | | | | length = 3808 | |
| TGME49_chrVIIa | 2053467 | 2056236 | | ID = TGME49_204000; | 3161 |
| | | | | length = 2769 | |
| TGME49_chrIX | 674942 | 676609 | − | ID = TGME49_267400; | 3162 |
| | | | | length = 1667 | |
| TGME49_chrV | 1174251 | 1179266 | + | ID = TGME49_213620; | 3163 |
| | | | | length = 5015 | |
| TGME49_chrIb | 1074486 | 1077281 | − | ID = TGME49_209140; | 3164 |
| | | | | length = 2795 | |
| TGME49_chrXI | 3475816 | 3477674 | − | ID = TGME49_313560; | 3165 |
| | | | | length = 1858 | |
| TGME49_chrXI | 293500 | 294822 | + | ID = TGME49_308840; | 3166 |
| | | | | length = 1322 | |
| TGME49_chrXI | 2557571 | 2561791 | − | ID = TGME49_312270; | 3167 |
| | | | | length = 4220 | |
| TGME49_chrVIII | 4531960 | 4533762 | + | ID = TGME49_271375; | 3168 |
| | | | | length = 1802 | |
| TGME49_chrXI | 3875153 | 3877145 | − | ID = TGME49_314000; | 3169 |
| | | | | length = 1992 | |
| TGME49_chrVIIb | 214816 | 216778 | + | ID = TGME49_264050; | 3170 |
| | | | | length = 1962 | |
| TGME49_chrXII | 3488810 | 3491174 | + | ID = TGME49_247690; | 3171 |
| | | | | length = 2364 | |
| TGME49_chrXI | 156674 | 158998 | − | ID = TGME49_306960; | 3172 |
| | | | | length = 2324 | |
| TGME49_chrVI | 1295147 | 1297637 | − | ID = TGME49_240490; | 3173 |
| | | | | length = 2490 | |
| TGME49_chrXI | 5342954 | 5345109 | + | ID = TGME49_316490; | 3174 |
| | | | | length = 2155 | |
| TGME49_chrVIIb | 3590265 | 3592441 | + | ID = TGME49_258080; | 3175 |
| | | | | length = 2176 | |
| TGME49_chrXI | 1590207 | 1593920 | − | ID = TGME49_310780; | 3176 |
| | | | | length = 3713 | |
| TGME49_chrX | 5240808 | 5243220 | − | ID = TGME49_236010; | 3177 |
| | | | | length = 2412 | |
| TGME49_chrIX | 2095104 | 2097103 | − | ID = TGME49_264720; | 3178 |
| | | | | length = 1999 | |
| TGME49_chrXI | 2343071 | 2344870 | − | ID = TGME49_311870; | 3179 |
| | | | | length = 1799 | |
| TGME49_chrVIII | 6268529 | 6273255 | + | ID = TGME49_268820; | 3180 |
| | | | | length = 4726 | |
| TGME49_chrX | 5004448 | 5006565 | + | ID = TGME49_235640; | 3181 |
| | | | | length = 2117 | |
| TGME49_chrXI | 1373831 | 1375397 | + | ID = TGME49_310470; | 3182 |
| | | | | length = 1566 | |
| TGME49_chrIX | 5257875 | 5261530 | + | ID = TGME49_305170; | 3183 |
| | | | | length = 3655 | |
| TGME49_chrXII | 1897106 | 1899724 | + | ID = TGME49_217550; | 3184 |
| | | | | length = 2618 | |
| TGME49_chrXII | 6036700 | 6038574 | + | ID = TGME49_278530; | 3185 |
| | | | | length = 1874 | |
| TGME49_chrVIIa | 3793013 | 3794469 | − | ID = TGME49_201785; | 3186 |
| | | | | length = 1456 | |
| TGME49_chrVIIa | 4025422 | 4029337 | + | ID = TGME49_201120; | 3187 |
| | | | | length = 3915 | |
| TGME49_chrV | 581559 | 583050 | − | ID = TGME49_212750; | 3188 |
| | | | | length = 1491 | |
| TGME49_chrXII | 5992156 | 5994337 | + | ID = TGME49_278620; | 3189 |
| | | | | length = 2181 | |
| TGME49_chrVI | 554234 | 557286 | + | ID = TGME49_239340; | 3190 |
| | | | | length = 3052 | |
| TGME49_chrXI | 6472869 | 6475497 | + | ID = TGME49_216000; | 3191 |
| | | | | length = 2628 | |
| TGME49_chrIX | 3637783 | 3640204 | − | ID = TGME49_290190; | 3192 |
| | | | | length = 2421 | |
| TGME49_chrVI | 2669369 | 2670449 | + | ID = TGME49_243490; | 3193 |
| | | | | length = 1080 | |
| TGME49_chrXII | 3820580 | 3822334 | + | ID = TGME49_248350; | 3194 |
| | | | | length = 1754 | |
| TGME49_chrV | 695402 | 700329 | − | ID = TGME49_212900; | 3195 |
| | | | | length = 4927 | |
| TGME49_chrXI | 3960715 | 3962825 | + | ID = TGME49_314250; | 3196 |
| | | | | length = 2110 | |
| TGME49_chrVIIb | 3619190 | 3621196 | + | ID = TGME49_258050; | 3197 |
| | | | | length = 2006 | |
| TGME49_chrIX | 2493133 | 2494671 | − | ID = TGME49_288390; | 3198 |
| | | | | length = 1538 | |
| TGME49_chrX | 3691463 | 3693211 | − | ID = TGME49_223630; | 3199 |
| | | | | length = 1748 | |
| TGME49_chrX | 2407746 | 2409830 | − | ID = TGME49_225210; | 3200 |
| | | | | length = 2084 | |
| TGME49_chrVIIa | 1171935 | 1174196 | − | ID = TGME49_205760; | 3201 |
| | | | | length = 2261 | |
| TGME49_chrX | 5661881 | 5663299 | − | ID = TGME49_237000; | 3202 |
| | | | | length = 1418 | |
| TGME49_chrX | 6515604 | 6517875 | + | ID = TGME49_214830; | 3203 |
| | | | | length = 2271 | |
| TGME49_chrII | 364035 | 366572 | + | ID = TGME49_221460; | 3204 |
| | | | | length = 2537 | |
| TGME49_chrVIII | 3181451 | 3182748 | − | ID = TGME49_273915; | 3205 |
| | | | | length = 1297 | |
| TGME49_chrXI | 2990969 | 2994121 | + | ID = TGME49_312950; | 3206 |
| | | | | length = 3152 | |
| TGME49_chrXI | 3807555 | 3811116 | + | ID = TGME49_313930; | 3207 |
| | | | | length = 3561 | |
| TGME49_chrVIIb | 3951522 | 3953639 | + | ID = TGME49_257595; | 3208 |
| | | | | length = 2117 | |
| TGME49_chrX | 4325394 | 4329853 | + | ID = TGME49_234380; | 3209 |
| | | | | length = 4459 | |
| TGME49_chrVIII | 6386810 | 6388130 | − | ID = TGME49_268640; | 3210 |
| | | | | length = 1320 | |
| TGME49_chrVIIa | 1076863 | 1079600 | + | ID = TGME49_206290; | 3211 |
| | | | | length = 2737 | |
| TGME49_chrIX | 1261687 | 1263721 | − | ID = TGME49_266270; | 3212 |
| | | | | length = 2034 | |
| TGME49_chrV | 160175 | 161766 | + | ID = TGME49_220140; | 3213 |
| | | | | length = 1591 | |
| TGME49_chrVIII | 5945676 | 5948163 | + | ID = TGME49_269280; | 3214 |
| | | | | length = 2487 | |
| TGME49_chrXI | 3960715 | 3965719 | + | ID = TGME49_314260; | 3215 |
| | | | | length = 5004 | |
| TGME49_chrXII | 2765307 | 2768904 | + | ID = TGME49_246340; | 3216 |
| | | | | length = 3597 | |
| TGME49_chrVI | 2079734 | 2081710 | + | ID = TGME49_242590; | 3217 |
| | | | | length = 1976 | |
| TGME49_chrIV | 2078838 | 2080697 | + | ID = TGME49_210778; | 3218 |
| | | | | length = 1859 | |
| TGME49_chrVIIa | 717178 | 721171 | + | ID = TGME49_206695; | 3219 |
| | | | | length = 3993 | |
| TGME49_chrXII | 440948 | 443883 | − | ID = TGME49_307840; | 3220 |
| | | | | length = 2935 | |
| TGME49_chrXI | 3698435 | 3702023 | + | ID = TGME49_313810; | 3221 |
| | | | | length = 3588 | |
| TGME49_chrVIII | 3942775 | 3945251 | − | ID = TGME49_272490; | 3222 |
| | | | | length = 2476 | |
| TGME49_chrVIIa | 609399 | 611880 | − | ID = TGME49_304650; | 3223 |
| | | | | length = 2481 | |
| TGME49_chrVIII | 759334 | 761144 | − | ID = TGME49_230410; | 3224 |
| | | | | length = 1810 | |
| TGME49_chrX | 6801459 | 6804369 | + | ID = TGME49_215180; | 3225 |
| | | | | length = 2910 | |
| TGME49_chrXI | 2039625 | 2043830 | + | ID = TGME49_311390; | 3226 |
| | | | | length = 4205 | |
| TGME49_chrXII | 4548008 | 4550577 | − | ID = TGME49_249450; | 3227 |
| | | | | length = 2569 | |
| TGME49_chrXII | 3071741 | 3075581 | + | ID = TGME49_246990; | 3228 |
| | | | | length = 3840 | |
| TGME49_chrVIII | 555529 | 558130 | − | ID = TGME49_230020; | 3229 |
| | | | | length = 2601 | |
| TGME49_chrIX | 2625217 | 2629487 | − | ID = TGME49_288570; | 3230 |
| | | | | length = 4270 | |
| TGME49_chrVIII | 4338895 | 4341797 | + | ID = TGME49_271820; | 3231 |
| | | | | length = 2902 | |
| TGME49_chrXI | 5023123 | 5027594 | − | ID = TGME49_315845; | 3232 |
| | | | | length = 4471 | |
| TGME49_chrXI | 3894915 | 3895467 | + | ID = TGME49_314038; | 3233 |
| | | | | length = 552 | |
| TGME49_chrX | 592274 | 594953 | + | ID = TGME49_228080; | 3234 |
| | | | | length = 2679 | |
| TGME49_chrVIIa | 790922 | 794038 | − | ID = TGME49_206605; | 3235 |
| | | | | length = 3116 | |
| TGME49_chrX | 12618 | 17436 | − | ID = TGME49_200700; | 3236 |
| | | | | length = 4818 | |
| TGME49_chrII | 113565 | 116395 | + | ID = TGME49_221190; | 3237 |
| | | | | length = 2830 | |
| TGME49_chrXI | 1603620 | 1606558 | + | ID = TGME49_310810; | 3238 |
| | | | | length = 2938 | |
| TGME49_chrXII | 5728540 | 5730511 | − | ID = TGME49_278960; | 3239 |
| | | | | length = 1971 | |
| TGME49_chrVIII | 2113265 | 2117768 | − | ID = TGME49_232450; | 3240 |
| | | | | length = 4503 | |
| TGME49_chrVI | 2693010 | 2694809 | − | ID = TGME49_243510; | 3241 |
| | | | | length = 1799 | |
| TGME49_chrXII | 2133547 | 2135173 | − | ID = TGME49_217790; | 3242 |
| | | | | length = 1626 | |
| TGME49_chrX | 439688 | 443866 | − | ID = TGME49_228290; | 3243 |
| | | | | length = 4178 | |
| TGME49_chrXI | 838551 | 840380 | − | ID = TGME49_309840; | 3244 |
| | | | | length = 1829 | |
| TGME49_chrVI | 910173 | 911950 | + | ID = TGME49_239790; | 3245 |
| | | | | length = 1777 | |
| TGME49_chrXI | 5861035 | 5863057 | − | ID = TGME49_216830; | 3246 |
| | | | | length = 2022 | |
| TGME49_chrVIII | 2085152 | 2087343 | − | ID = TGME49_232420; | 3247 |
| | | | | length = 2191 | |
| TGME49_chrXI | 6457120 | 6462057 | + | ID = TGME49_216020; | 3248 |
| | | | | length = 4937 | |
| TGME49_chrXI | 4837616 | 4841215 | + | ID = TGME49_315600; | 3249 |
| | | | | length = 3599 | |
| TGME49_chrVIIb | 696220 | 698492 | + | ID = TGME49_263220; | 3250 |
| | | | | length = 2272 | |
| TGME49_chrXI | 5253011 | 5255174 | − | ID = TGME49_316350; | 3251 |
| | | | | length = 2163 | |
| TGME49_chrXI | 6203760 | 6205467 | + | ID = TGME49_216370; | 3252 |
| | | | | length = 1707 | |
| TGME49_chrVIII | 5584745 | 5587000 | − | ID = TGME49_269840; | 3253 |
| | | | | length = 2255 | |
| TGME49_chrVIIa | 546593 | 549758 | + | ID = TGME49_304630; | 3254 |
| | | | | length = 3165 | |
| TGME49_chrIb | 1563716 | 1566724 | + | ID = TGME49_209945; | 3255 |
| | | | | length = 3008 | |
| TGME49_chrVI | 16939 | 19862 | − | ID = TGME49_238020; | 3256 |
| | | | | length = 2923 | |
| TGME49_chrVIII | 4444950 | 4446452 | − | ID = TGME49_271625; | 3257 |
| | | | | length = 1502 | |
| TGME49_chrVIIa | 4276998 | 4281215 | − | ID = TGME49_281920; | 3258 |
| | | | | length = 4217 | |
| TGME49_chrIa | 512763 | 514787 | − | ID = TGME49_293690; | 3259 |
| | | | | length = 2024 | |
| TGME49_chrXII | 54016 | 56494 | − | ID = TGME49_300360; | 3260 |
| | | | | length = 2478 | |
| TGME49_chrVIII | 5238119 | 5240134 | − | ID = TGME49_270450; | 3261 |
| | | | | length = 2015 | |
| TGME49_chrX | 3660096 | 3662573 | + | ID = TGME49_223672; | 3262 |
| | | | | length = 2477 | |
| TGME49_chrIV | 1137830 | 1140106 | + | ID = TGME49_318700; | 3263 |
| | | | | length = 2276 | |
| TGME49_chrVIII | 5285859 | 5288814 | + | ID = TGME49_270300; | 3264 |
| | | | | length = 2955 | |
| TGME49_chrVI | 546954 | 551539 | + | ID = TGME49_239330; | 3265 |
| | | | | length = 4585 | |
| TGME49_chrVI | 94162 | 97062 | − | ID = TGME49_238165; | 3266 |
| | | | | length = 2900 | |
| TGME49_chrXII | 5675187 | 5677936 | + | ID = TGME49_251940; | 3267 |
| | | | | length = 2749 | |
| TGME49_chrVIII | 6560093 | 6561570 | − | ID = TGME49_268300; | 3268 |
| | | | | length = 1477 | |
| TGME49_chrXII | 5992982 | 5995016 | − | ID = TGME49_278630; | 3269 |
| | | | | length = 2034 | |
| TGME49_chrXI | 2203975 | 2206339 | − | ID = TGME49_311680; | 3270 |
| | | | | length = 2364 | |
| TGME49_chrXII | 2855036 | 2857439 | − | ID = TGME49_246555; | 3271 |
| | | | | length = 2403 | |
| TGME49_chrVIII | 5713358 | 5716949 | + | ID = TGME49_269650; | 3272 |
| | | | | length = 3591 | |
| TGME49_chrVIIb | 1063168 | 1067088 | − | ID = TGME49_262720; | 3273 |
| | | | | length = 3920 | |
| TGME49_chrX | 4603574 | 4605486 | − | ID = TGME49_235010; | 3274 |
| | | | | length = 1912 | |
| TGME49_chrII | 1076568 | 1079158 | + | ID = TGME49_222370; | 3275 |
| | | | | length = 2590 | |
| TGME49_chrVIII | 367389 | 369573 | − | ID = TGME49_229650; | 3276 |
| | | | | length = 2184 | |
| TGME49_chrXII | 3099886 | 3101996 | + | ID = TGME49_247010; | 3277 |
| | | | | length = 2110 | |
| TGME49_chrVIIb | 1127048 | 1129656 | + | ID = TGME49_262610; | 3278 |
| | | | | length = 2608 | |
| TGME49_chrVIII | 3232358 | 3234398 | + | ID = TGME49_273830; | 3279 |
| | | | | length = 2040 | |
| TGME49_chrVIII | 3923611 | 3925862 | + | ID = TGME49_272520; | 3280 |
| | | | | length = 2251 | |
| TGME49_chrIV | 278199 | 282008 | − | ID = TGME49_320540; | 3281 |
| | | | | length = 3809 | |
| TGME49_chrX | 493321 | 495081 | − | ID = TGME49_228210; | 3282 |
| | | | | length = 1760 | |
| TGME49_chrVIII | 1768528 | 1773014 | + | ID = TGME49_232030; | 3283 |
| | | | | length = 4486 | |
| TGME49_chrVIII | 5272156 | 5276079 | − | ID = TGME49_270330; | 3284 |
| | | | | length = 3923 | |
| TGME49_chrVIII | 6183118 | 6185406 | − | ID = TGME49_268960; | 3285 |
| | | | | length = 2288 | |
| TGME49_chrIV | 758992 | 760757 | − | ID = TGME49_319730; | 3286 |
| | | | | length = 1765 | |
| TGME49_chrIV | 948350 | 951893 | − | ID = TGME49_319520; | 3287 |
| | | | | length = 3543 | |
| TGME49_chrIX | 2438866 | 2442135 | + | ID = TGME49_288300; | 3288 |
| | | | | length = 3269 | |
| TGME49_chrVIIb | 4640463 | 4643361 | − | ID = TGME49_255895; | 3289 |
| | | | | length = 2898 | |
| TGME49_chrX | 5206510 | 5208863 | + | ID = TGME49_235970; | 3290 |
| | | | | length = 2353 | |
| TGME49_chrVIIb | 4570661 | 4571741 | − | ID = TGME49_256010; | 3291 |
| | | | | length = 1080 | |
| TGME49_chrX | 1627981 | 1632602 | − | ID = TGME49_226450; | 3292 |
| | | | | length = 4621 | |
| TGME49_chrXI | 615166 | 617797 | + | ID = TGME49_309300; | 3293 |
| | | | | length = 2631 | |
| TGME49_chrVIII | 3318828 | 3322791 | + | ID = TGME49_273670; | 3294 |
| | | | | length = 3963 | |
| TGME49_chrVIIb | 856438 | 857983 | − | ID = TGME49_263050; | 3295 |
| | | | | length = 1545 | |
| TGME49_chrIX | 4005052 | 4007328 | − | ID = TGME49_290970; | 3296 |
| | | | | length = 2276 | |
| TGME49_chrXI | 2645045 | 2647433 | + | ID = TGME49_312380; | 3297 |
| | | | | length = 2388 | |
| TGME49_chrIb | 927952 | 932691 | + | ID = TGME49_208980; | 3298 |
| | | | | length = 4739 | |
| TGME49_chrX | 1515798 | 1517465 | + | ID = TGME49_226590; | 3299 |
| | | | | length = 1667 | |
| TGME49_chrX | 1285743 | 1290308 | − | ID = TGME49_226860; | 3300 |
| | | | | length = 4565 | |
| TGME49_chrVIII | 6167383 | 6169354 | − | ID = TGME49_268985; | 3301 |
| | | | | length = 1971 | |
| TGME49_chrX | 3025485 | 3029064 | + | ID = TGME49_224490; | 3302 |
| | | | | length = 3579 | |
| TGME49_chrIV | 2047627 | 2048983 | − | ID = TGME49_210800; | 3303 |
| | | | | length = 1356 | |
| TGME49_chrIX | 998733 | 1003398 | + | ID = TGME49_266710; | 3304 |
| | | | | length = 4665 | |
| TGME49_chrX | 4396194 | 4397204 | + | ID = TGME49_234450; | 3305 |
| | | | | length = 1010 | |
| TGME49_chrII | 1112777 | 1115543 | − | ID = TGME49_222390; | 3306 |
| | | | | length = 2766 | |
| TGME49_chrIV | 812222 | 814651 | + | ID = TGME49_319640; | 3307 |
| | | | | length = 2429 | |
| TGME49_chrV | 1460170 | 1461527 | + | ID = TGME49_213960; | 3308 |
| | | | | length = 1357 | |
| TGME49_chrIa | 182514 | 184547 | − | ID = TGME49_293230; | 3309 |
| | | | | length = 2033 | |
| TGME49_chrVIIb | 2271547 | 2274550 | + | ID = TGME49_260430; | 3310 |
| | | | | length = 3003 | |
| TGME49_chrII | 924486 | 928859 | + | ID = TGME49_222170; | 3311 |
| | | | | length = 4373 | |
| TGME49_chrX | 1874663 | 1877819 | | ID = TGME49_226000; | 3312 |
| | | | | length = 3156 | |
| TGME49_chrIX | 3289012 | 3292661 | + | ID = TGME49_289540; | 3313 |
| | | | | length = 3649 | |
| TGME49_chrXI | 4923699 | 4926214 | + | ID = TGME49_315720; | 3314 |
| | | | | length = 2515 | |
| TGME49_chrXII | 2633358 | 2636013 | − | ID = TGME49_246050; | 3315 |
| | | | | length = 2655 | |
| TGME49_chrVIIb | 3442643 | 3444853 | − | ID = TGME49_258390; | 3316 |
| | | | | length = 2210 | |
| TGME49_chrIb | 1471114 | 1474353 | + | ID = TGME49_209830; | 3317 |
| | | | | length = 3239 | |
| TGME49_chrXII | 6529058 | 6534063 | − | ID = TGME49_277770; | 3318 |
| | | | | length = 5005 | |
| TGME49_chrV | 423922 | 426714 | + | ID = TGME49_220510; | 3319 |
| | | | | length = 2792 | |
| TGME49_chrVIIb | 1746391 | 1751219 | − | ID = TGME49_261450; | 3320 |
| | | | | length = 4828 | |
| TGME49_chrIV | 1632693 | 1634603 | − | ID = TGME49_211670; | 3321 |
| | | | | length = 1910 | |
| TGME49_chrVIII | 3963511 | 3965457 | + | ID = TGME49_272440; | 3322 |
| | | | | length = 1946 | |
| TGME49_chrIX | 5666236 | 5668173 | + | ID = TGME49_305920; | 3323 |
| | | | | length = 1937 | |
| TGME49_chrXII | 5902655 | 5905896 | − | ID = TGME49_278753; | 3324 |
| | | | | length = 3241 | |
| TGME49_chrXI | 1574116 | 1575491 | + | ID = TGME49_310760; | 3325 |
| | | | | length = 1375 | |
| TGME49_chrVI | 1692909 | 1695468 | + | ID = TGME49_241300; | 3326 |
| | | | | length = 2559 | |
| TGME49_chrIb | 601374 | 605206 | − | ID = TGME49_208200; | 3327 |
| | | | | length = 3832 | |
| TGME49_chrXI | 5520848 | 5523439 | + | ID = TGME49_316730; | 3328 |
| | | | | length = 2591 | |
| TGME49_chrXII | 3127172 | 3130041 | − | ID = TGME49_247040; | 3329 |
| | | | | length = 2869 | |
| TGME49_chrIb | 1399838 | 1402434 | + | ID = TGME49_209690; | 3330 |
| | | | | length = 2596 | |
| TGME49_chrX | 5779951 | 5782510 | − | ID = TGME49_237200; | 3331 |
| | | | | length = 2559 | |
| TGME49_chrXII | 5724237 | 5726426 | − | ID = TGME49_278965; | 3332 |
| | | | | length = 2189 | |
| TGME49_chrXI | 3466374 | 3470440 | + | ID = TGME49_313550; | 3333 |
| | | | | length = 4066 | |
| TGME49_chrVIIb | 4749722 | 4752553 | + | ID = TGME49_255650; | 3334 |
| | | | | length = 2831 | |
| TGME49_chrIX | 5611490 | 5613721 | + | ID = TGME49_305840; | 3335 |
| | | | | length = 2231 | |
| TGME49_chrIX | 4291304 | 4293908 | − | ID = TGME49_291600; | 3336 |
| | | | | length = 2604 | |
| TGME49_chrXI | 3453849 | 3456185 | + | ID = TGME49_313520; | 3337 |
| | | | | length = 2336 | |
| TGME49_chrXII | 4749942 | 4752741 | + | ID = TGME49_249710; | 3338 |
| | | | | length = 2799 | |
| TGME49_chrIa | 1782761 | 1785919 | + | ID = TGME49_295390; | 3339 |
| | | | | length = 3158 | |
| TGME49_chrXI | 732325 | 734891 | + | ID = TGME49_309580; | 3340 |
| | | | | length = 2566 | |
| TGME49_chrX | 6496294 | 6497510 | − | ID = TGME49_214787; | 3341 |
| | | | | length = 1216 | |
| TGME49_chrX | 3655540 | 3656902 | − | ID = TGME49_223690; | 3342 |
| | | | | length = 1362 | |
| TGME49_chrVIIb | 583138 | 585745 | − | ID = TGME49_263400; | 3343 |
| | | | | length = 2607 | |
| TGME49_chrXI | 175012 | 177263 | − | ID = TGME49_306940; | 3344 |
| | | | | length = 2251 | |
| TGME49_chrX | 6253503 | 6255193 | − | ID = TGME49_214330; | 3345 |
| | | | | length = 1690 | |
| TGME49_chrVIII | 2174546 | 2176594 | − | ID = TGME49_232580; | 3346 |
| | | | | length = 2048 | |
| TGME49_chrXI | 5840587 | 5844665 | + | ID = TGME49_216860; | 3347 |
| | | | | length = 4078 | |
| TGME49_chrIb | 1543519 | 1546904 | + | ID = TGME49_209910; | 3348 |
| | | | | length = 3385 | |
| TGME49_chrX | 3769236 | 3773701 | + | ID = TGME49_223500; | 3349 |
| | | | | length = 4465 | |
| TGME49_chrVI | 1585973 | 1590736 | − | ID = TGME49_240960; | 3350 |
| | | | | length = 4763 | |
| TGME49_chrV | 609849 | 613843 | + | ID = TGME49_212810; | 3351 |
| | | | | length = 3994 | |
| TGME49_chrII | 1315546 | 1319755 | + | ID = TGME49_222940; | 3352 |
| | | | | length = 4209 | |
| TGME49_chrXI | 2932469 | 2934408 | + | ID = TGME49_312830; | 3353 |
| | | | | length = 1939 | |
| TGME49_chrXII | 5198502 | 5201968 | − | ID = TGME49_250770; | 3354 |
| | | | | length = 3466 | |
| TGME49_chrVIII | 3444778 | 3446250 | + | ID = TGME49_273490; | 3355 |
| | | | | length = 1472 | |
| TGME49_chrV | 1399034 | 1402700 | − | ID = TGME49_213870; | 3356 |
| | | | | length = 3666 | |
| TGME49_chrXII | 2256968 | 2259255 | − | ID = TGME49_245432; | 3357 |
| | | | | length = 2287 | |
| TGME49_chrIa | 1423949 | 1426873 | − | ID = TGME49_296015; | 3358 |
| | | | | length = 2924 | |
| TGME49_chrVIIb | 4379347 | 4381247 | − | ID = TGME49_256900; | 3359 |
| | | | | length = 1900 | |
| TGME49_chrIX | 3193824 | 3196200 | + | ID = TGME49_289330; | 3360 |
| | | | | length = 2376 | |
| TGME49_chrXII | 2463875 | 2465663 | + | ID = TGME49_245680; | 3361 |
| | | | | length = 1788 | |
| TGME49_chrXI | 308195 | 311017 | − | ID = TGME49_308860; | 3362 |
| | | | | length = 2822 | |
| TGME49_chrXI | 6078723 | 6081550 | − | ID = TGME49_216580; | 3363 |
| | | | | length = 2827 | |
| TGME49_chrVIII | 609952 | 611492 | − | ID = TGME49_230110; | 3364 |
| | | | | length = 1540 | |
| TGME49_chrXI | 378842 | 382347 | + | ID = TGME49_308950; | 3365 |
| | | | | length = 3505 | |
| TGME49_chrXII | 5499356 | 5500559 | + | ID = TGME49_251630; | 3366 |
| | | | | length = 1203 | |
| TGME49_chrVI | 3641420 | 3643484 | + | ID = TGME49_292610; | 3367 |
| | | | | length = 2064 | |
| TGME49_chrII | 1468746 | 1470751 | − | ID = TGME49_223130; | 3368 |
| | | | | length = 2005 | |
| TGME49_chrV | 1397770 | 1400442 | + | ID = TGME49_213880; | 3369 |
| | | | | length = 2672 | |
| TGME49_chrXI | 1041192 | 1043750 | − | ID = TGME49_310070; | 3370 |
| | | | | length = 2558 | |
| TGME49_chrIa | 837889 | 840906 | + | ID = TGME49_294360; | 3371 |
| | | | | length = 3017 | |
| TGME49_chrV | 2173738 | 2175720 | − | ID = TGME49_285850; | 3372 |
| | | | | length = 1982 | |
| TGME49_chrX | 6414014 | 6416110 | − | ID = TGME49_214600; | 3373 |
| | | | | length = 2096 | |
| TGME49_chrVIII | 6252860 | 6255582 | − | ID = TGME49_268850; | 3374 |
| | | | | length = 2722 | |
| TGME49_chrX | 1713807 | 1716377 | − | ID = TGME49_226330; | 3375 |
| | | | | length = 2570 | |
| TGME49_chrX | 6206363 | 6211100 | − | ID = TGME49_214270; | 3376 |
| | | | | length = 4737 | |
| TGME49_chrXII | 5579562 | 5582287 | − | ID = TGME49_251770; | 3377 |
| | | | | length = 2725 | |
| TGME49_chrIV | 2065253 | 2067243 | − | ID = TGME49_210783; | 3378 |
| | | | | length = 1990 | |
| TGME49_chrVIIb | 4008596 | 4011217 | + | ID = TGME49_257500; | 3379 |
| | | | | length = 2621 | |
| TGME49_chrII | 1545348 | 1549822 | + | ID = TGME49_297120; | 3380 |
| | | | | length = 4474 | |
| TGME49_chrXII | 3676372 | 3680205 | − | ID = TGME49_248120; | 3381 |
| | | | | length = 3833 | |
| TGME49_chrVIIa | 1331384 | 1334559 | + | ID = TGME49_205558; | 3382 |
| | | | | length = 3175 | |
| TGME49_chrIX | 2596471 | 2598483 | + | ID = TGME49_288530; | 3383 |
| | | | | length = 2012 | |
| TGME49_chrXI | 2103770 | 2107867 | − | ID = TGME49_311470; | 3384 |
| | | | | length = 4097 | |
| TGME49_chrXII | 1911601 | 1912822 | + | ID = TGME49_217570; | 3385 |
| | | | | length = 1221 | |
| TGME49_chrVIII | 3216368 | 3219488 | + | ID = TGME49_273860; | 3386 |
| | | | | length = 3120 | |
| TGME49_chrVIII | 4616470 | 4619161 | + | ID = TGME49_271260; | 3387 |
| | | | | length = 2691 | |
| TGME49_chrIX | 6203119 | 6204949 | − | ID = TGME49_306590; | 3388 |
| | | | | length = 1830 | |
| TGME49_chrX | 865963 | 867849 | − | ID = TGME49_227640; | 3389 |
| | | | | length = 1886 | |
| TGME49_chrIX | 3016565 | 3020010 | + | ID = TGME49_289130; | 3390 |
| | | | | length = 3445 | |
| TGME49_chrIb | 498140 | 499444 | − | ID = TGME49_207980; | 3391 |
| | | | | length = 1304 | |
| TGME49_chrX | 5674742 | 5676571 | − | ID = TGME49_237015; | 3392 |
| | | | | length = 1829 | |
| TGME49_chrX | 1645346 | 1649764 | − | ID = TGME49_226430; | 3393 |
| | | | | length = 4418 | |
| TGME49_chrVI | 3181640 | 3183599 | − | ID = TGME49_244300; | 3394 |
| | | | | length = 1959 | |
| TGME49_chrIV | 132847 | 135011 | − | ID = TGME49_320700; | 3395 |
| | | | | length = 2164 | |
| TGME49_chrIX | 4534068 | 4536660 | + | ID = TGME49_292080; | 3396 |
| | | | | length = 2592 | |
| TGME49_chrIX | 2631176 | 2636201 | + | ID = TGME49_288610; | 3397 |
| | | | | length = 5025 | |
| TGME49_chrVIII | 3309949 | 3314650 | − | ID = TGME49_273720; | 3398 |
| | | | | length = 4701 | |
| TGME49_chrXI | 6373312 | 6376490 | − | ID = TGME49_216160; | 3399 |
| | | | | length = 3178 | |
| TGME49_chrVI | 2847279 | 2852109 | + | ID = TGME49_243780; | 3400 |
| | | | | length = 4830 | |
| TGME49_chrX | 6937876 | 6940165 | − | ID = TGME49_215380; | 3401 |
| | | | | length = 2289 | |
| TGME49_chrIX | 2722000 | 2725631 | − | ID = TGME49_288740; | 3402 |
| | | | | length = 3631 | |
| TGME49_chrXI | 5792072 | 5794118 | + | ID = TGME49_216910; | 3403 |
| | | | | length = 2046 | |
| TGME49_chrVIII | 1385211 | 1389924 | + | ID = TGME49_231380; | 3404 |
| | | | | length = 4713 | |
| TGME49_chrXI | 3986515 | 3988412 | + | ID = TGME49_314295; | 3405 |
| | | | | length = 1897 | |
| TGME49_chrXII | 2003898 | 2008672 | − | ID = TGME49_217680; | 3406 |
| | | | | length = 4774 | |
| TGME49_chrIX | 530467 | 532341 | − | ID = TGME49_267600; | 3407 |
| | | | | length = 1874 | |
| TGME49_chrXI | 4606041 | 4607359 | + | ID = TGME49_315260; | 3408 |
| | | | | length = 1318 | |
| TGME49_chrVIII | 3576863 | 3580229 | + | ID = TGME49_273350; | 3409 |
| | | | | length = 3366 | |
| TGME49_chrII | 233786 | 235666 | − | ID = TGME49_221310; | 3410 |
| | | | | length = 1880 | |
| TGME49_chrXII | 4287010 | 4288915 | + | ID = TGME49_248990; | 3411 |
| | | | | length = 1905 | |
| TGME49_chrII | 695953 | 698239 | − | ID = TGME49_221818; | 3412 |
| | | | | length = 2286 | |
| TGME49_chrX | 6983149 | 6985034 | + | ID = TGME49_215500; | 3413 |
| | | | | length = 1885 | |
| TGME49_chrV | 799775 | 804114 | − | ID = TGME49_213020; | 3414 |
| | | | | length = 4339 | |
| TGME49_chrVIIb | 5061398 | 5064594 | + | ID = TGME49_255160; | 3415 |
| | | | | length = 3196 | |
| TGME49_chrVI | 3417882 | 3420561 | + | ID = TGME49_244645; | 3416 |
| | | | | length = 2679 | |
| TGME49_chrXII | 3073064 | 3076076 | − | ID = TGME49_246982; | 3417 |
| | | | | length = 3012 | |
| TGME49_chrVIIa | 1500269 | 1505002 | + | ID = TGME49_205265; | 3418 |
| | | | | length = 4733 | |
| TGME49_chrVIII | 2112448 | 2114445 | + | ID = TGME49_232475; | 3419 |
| | | | | length = 1997 | |
| TGME49_chrXII | 1187769 | 1192566 | − | ID = TGME49_218960; | 3420 |
| | | | | length = 4797 | |
| TGME49_chrVI | 1800045 | 1804730 | − | ID = TGME49_241880; | 3421 |
| | | | | length = 4685 | |
| TGME49_chrIX | 5505937 | 5508990 | − | ID = TGME49_305610; | 3422 |
| | | | | length = 3053 | |
| TGME49_chrVI | 253436 | 258317 | − | ID = TGME49_238500; | 3423 |
| | | | | length = 4881 | |
| TGME49_chrVIIb | 3933802 | 3935262 | − | ID = TGME49_257650; | 3424 |
| | | | | length = 1460 | |
| TGME49_chrVIII | 6330739 | 6334570 | − | ID = TGME49_268760; | 3425 |
| | | | | length = 3831 | |
| TGME49_chrVIII | 793083 | 797090 | − | ID = TGME49_230440; | 3426 |
| | | | | length = 4007 | |
| TGME49_chrVIIa | 186501 | 187589 | + | ID = TGME49_280680; | 3427 |
| | | | | length = 1088 | |
| TGME49_chrXII | 6705701 | 6707565 | − | ID = TGME49_277220; | 3428 |
| | | | | length = 1864 | |
| TGME49_chrII | 2003854 | 2005661 | − | ID = TGME49_297790; | 3429 |
| | | | | length = 1807 | |
| TGME49_chrVI | 2742265 | 2744014 | − | ID = TGME49_243590; | 3430 |
| | | | | length = 1749 | |
| TGME49_chrX | 7067044 | 7071859 | − | ID = TGME49_215640; | 3431 |
| | | | | length = 4815 | |
| TGME49_chrVIIa | 1741358 | 1742899 | + | ID = TGME49_204505; | 3432 |
| | | | | length = 1541 | |
| TGME49_chrXI | 1843155 | 1846445 | + | ID = TGME49_311180; | 3433 |
| | | | | length = 3290 | |
| TGME49_chrVI | 948026 | 952595 | − | ID = TGME49_239820; | 3434 |
| | | | | length = 4569 | |
| TGME49_chrXII | 1834934 | 1837076 | − | ID = TGME49_217430; | 3435 |
| | | | | length = 2142 | |
| TGME49_chrXI | 3142479 | 3147503 | + | ID = TGME49_313160; | 3436 |
| | | | | length = 5024 | |
| TGME49_chrX | 7130359 | 7132487 | + | ID = TGME49_215730; | 3437 |
| | | | | length = 2128 | |
| TGME49_chrVIII | 2286666 | 2287451 | − | ID = TGME49_232840; | 3438 |
| | | | | length = 785 | |
| TGME49_chrXI | 1636892 | 1638984 | − | ID = TGME49_310860; | 3439 |
| | | | | length = 2092 | |
| TGME49_chrVIIa | 4276229 | 4277993 | + | ID = TGME49_281930; | 3440 |
| | | | | length = 1764 | |
| TGME49_chrVIII | 6329519 | 6334023 | + | ID = TGME49_268750; | 3441 |
| | | | | length = 4504 | |
| TGME49_chrVI | 528450 | 531729 | − | ID = TGME49_239290; | 3442 |
| | | | | length = 3279 | |
| TGME49_chrVIIa | 1355067 | 1359343 | − | ID = TGME49_205530; | 3443 |
| | | | | length = 4276 | |
| TGME49_chrXI | 5877907 | 5880229 | − | ID = TGME49_216800; | 3444 |
| | | | | length = 2322 | |
| TGME49_chrVIIb | 2679663 | 2683799 | − | ID = TGME49_259835; | 3445 |
| | | | | length = 4136 | |
| TGME49_chrIX | 5598442 | 5601226 | − | ID = TGME49_305800; | 3446 |
| | | | | length = 2784 | |
| TGME49_chrIa | 676197 | 678509 | − | ID = TGME49_294100; | 3447 |
| | | | | length = 2312 | |
| TGME49_chrXII | 4807452 | 4810501 | − | ID = TGME49_249800; | 3448 |
| | | | | length = 3049 | |
| TGME49_chrXI | 2952334 | 2953239 | − | ID = TGME49_312850; | 3449 |
| | | | | length = 905 | |
| TGME49_chrVI | 85967 | 88465 | + | ID = TGME49_238150; | 3450 |
| | | | | length = 2498 | |
| TGME49_chrVI | 1774870 | 1776217 | + | ID = TGME49_241870; | 3451 |
| | | | | length = 1347 | |
| TGME49_chrX | 2443820 | 2445343 | + | ID = TGME49_225160; | 3452 |
| | | | | length = 1523 | |
| TGME49_chrV | 2256865 | 2258465 | + | ID = TGME49_285740; | 3453 |
| | | | | length = 1600 | |
| TGME49_chrVIIa | 3055087 | 3057294 | − | ID = TGME49_202760; | 3454 |
| | | | | length = 2207 | |
| TGME49_chrXI | 5215999 | 5218760 | + | ID = TGME49_316270; | 3455 |
| | | | | length = 2761 | |
| TGME49_chrIV | 1641289 | 1644518 | − | ID = TGME49_211650; | 3456 |
| | | | | length = 3229 | |
| TGME49_chrX | 5720126 | 5723099 | + | ID = TGME49_237110; | 3457 |
| | | | | length = 2973 | |
| TGME49_chrXII | 2748458 | 2750074 | + | ID = TGME49_246210; | 3458 |
| | | | | length = 1616 | |
| TGME49_chrVIII | 5322899 | 5326644 | + | ID = TGME49_270220; | 3459 |
| | | | | length = 3745 | |
| TGME49_chrXII | 889364 | 891927 | − | ID = TGME49_219520; | 3460 |
| | | | | length = 2563 | |
| TGME49_chrVI | 1379941 | 1381383 | + | ID = TGME49_240670; | 3461 |
| | | | | length = 1442 | |
| TGME49_chrXI | 1373831 | 1378479 | + | ID = TGME49_310480; | 3462 |
| | | | | length = 4648 | |
| TGME49_chrXII | 1208189 | 1212694 | − | ID = TGME49_218930; | 3463 |
| | | | | length = 4505 | |
| TGME49_chrXII | 3616444 | 3617866 | − | ID = TGME49_247850; | 3464 |
| | | | | length = 1422 | |
| TGME49_chrV | 1485948 | 1487275 | + | ID = TGME49_287270; | 3465 |
| | | | | length = 1327 | |
| TGME49_chrV | 1321800 | 1325747 | − | ID = TGME49_213780; | 3466 |
| | | | | length = 3947 | |
| TGME49_chrIV | 1216840 | 1218366 | − | ID = TGME49_318580; | 3467 |
| | | | | length = 1526 | |
| TGME49_chrVIIa | 3969642 | 3972217 | − | ID = TGME49_201220; | 3468 |
| | | | | length = 2575 | |
| TGME49_chrX | 4930960 | 4934578 | − | ID = TGME49_235515; | 3469 |
| | | | | length = 3618 | |
| TGME49_chrX | 1848514 | 1851776 | + | ID = TGME49_226040; | 3470 |
| | | | | length = 3262 | |
| TGME49_chrIa | 1201664 | 1204376 | − | ID = TGME49_294830; | 3471 |
| | | | | length = 2712 | |
| TGME49_chrVIII | 4210000 | 4212465 | − | ID = TGME49_272030; | 3472 |
| | | | | length = 2465 | |
| TGME49_chrXII | 511743 | 514831 | − | ID = TGME49_308020; | 3473 |
| | | | | length = 3088 | |
| TGME49_chrVIIb | 2608548 | 2610923 | + | ID = TGME49_259920; | 3474 |
| | | | | length = 2375 | |
| TGME49_chrX | 5290611 | 5294071 | − | ID = TGME49_236120; | 3475 |
| | | | | length = 3460 | |
| TGME49_chrVIIa | 3849344 | 3854159 | + | ID = TGME49_201680; | 3476 |
| | | | | length = 4815 | |
| TGME49_chrVIII | 6557517 | 6561570 | − | ID = TGME49_268310; | 3477 |
| | | | | length = 4053 | |
| TGME49_chrX | 5806926 | 5808940 | − | ID = TGME49_237240; | 3478 |
| | | | | length = 2014 | |
| TGME49_chrX | 922178 | 924766 | + | ID = TGME49_227450; | 3479 |
| | | | | length = 2588 | |
| TGME49_chrIX | 2659018 | 2661986 | − | ID = TGME49_288650; | 3480 |
| | | | | length = 2968 | |
| TGME49_chrVI | 2759019 | 2762419 | − | ID = TGME49_243620; | 3481 |
| | | | | length = 3400 | |
| TGME49_chrX | 6474784 | 6479194 | + | ID = TGME49_214760; | 3482 |
| | | | | length = 4410 | |
| TGME49_chrVIIb | 1670163 | 1672456 | − | ID = TGME49_261530; | 3483 |
| | | | | length = 2293 | |
| TGME49_chrXI | 5801565 | 5802917 | − | ID = TGME49_216900; | 3484 |
| | | | | length = 1352 | |
| TGME49_chrX | 6979927 | 6981500 | − | ID = TGME49_215480; | 3485 |
| | | | | length = 1573 | |
| TGME49_chrXII | 4078485 | 4082874 | + | ID = TGME49_248677; | 3486 |
| | | | | length = 4389 | |
| TGME49_chrX | 153327 | 1537059 | − | ID = TGME49_226570; | 3487 |
| | | | | length = 3782 | |
| TGME49_chrIX | 1670658 | 1673385 | + | ID = TGME49_265240; | 3488 |
| | | | | length = 2727 | |
| TGME49_chrX | 5351130 | 5352320 | + | ID = TGME49_236250; | 3489 |
| | | | | length = 1190 | |
| TGME49_chrXII | 302852 | 304279 | − | ID = TGME49_299980; | 3490 |
| | | | | length = 1427 | |
| TGME49_chrIb | 1403953 | 1405251 | + | ID = TGME49_209700; | 3491 |
| | | | | length = 1298 | |
| TGME49_chrX | 3003705 | 3007325 | + | ID = TGME49_224520; | 3492 |
| | | | | length = 3620 | |
| TGME49_chrIV | 194285 | 196070 | + | ID = TGME49_320620; | 3493 |
| | | | | length = 1785 | |
| TGME49_chrVIII | 5189323 | 5191091 | − | ID = TGME49_270570; | 3494 |
| | | | | length = 1768 | |
| TGME49_chrX | 971149 | 975816 | − | ID = TGME49_227390; | 3495 |
| | | | | length = 4667 | |
| TGME49_chrV | 1145386 | 1146565 | + | ID = TGME49_213560; | 3496 |
| | | | | length = 1179 | |
| TGME49_chrXII | 5661190 | 5663297 | − | ID = TGME49_251910; | 3497 |
| | | | | length = 2107 | |
| TGME49_chrIb | 1685989 | 1690920 | − | ID = TGME49_321630; | 3498 |
| | | | | length = 4931 | |
| TGME49_chrIa | 662350 | 666276 | + | ID = TGME49_294060; | 3499 |
| | | | | length = 3926 | |
| TGME49_chrXI | 3347499 | 3350293 | + | ID = TGME49_313410; | 3500 |
| | | | | length = 2794 | |
| TGME49_chrXI | 611336 | 614210 | + | ID = TGME49_309290; | 3501 |
| | | | | length = 2874 | |
| TGME49_chrIX | 4385909 | 4387593 | − | ID = TGME49_291860; | 3502 |
| | | | | length = 1684 | |
| TGME49_chrXII | 2671176 | 2675189 | − | ID = TGME49_246110; | 3503 |
| | | | | length = 4013 | |
| TGME49_chrXII | 565309 | 566062 | − | ID = TGME49_308075; | 3504 |
| | | | | length = 753 | |
| TGME49_chrXII | 4727155 | 4729832 | − | ID = TGME49_249670; | 3505 |
| | | | | length = 2677 | |
| TGME49_chrVI | 447757 | 449748 | − | ID = TGME49_239070; | 3506 |
| | | | | length = 1991 | |
| TGME49_chrII | 287426 | 290540 | − | ID = TGME49_221360; | 3507 |
| | | | | length = 3114 | |
| TGME49_chrVIIb | 1873350 | 1876420 | + | ID = TGME49_261070; | 3508 |
| | | | | length = 3070 | |
| TGME49_chrVIII | 4011550 | 4016029 | − | ID = TGME49_272390; | 3509 |
| | | | | length = 4479 | |
| TGME49_chrVIII | 2610522 | 2615562 | − | ID = TGME49_233360; | 3510 |
| | | | | length = 5040 | |
| TGME49_chrVIII | 5437065 | 5439034 | − | ID = TGME49_270070; | 3511 |
| | | | | length = 1969 | |
| TGME49_chrVI | 75690 | 77850 | − | ID = TGME49_238130; | 3512 |
| | | | | length = 2160 | |
| TGME49_chrVIIa | 1530903 | 1532616 | − | ID = TGME49_205230; | 3513 |
| | | | | length = 1713 | |
| TGME49_chrVIIb | 2754602 | 2756634 | − | ID = TGME49_259610; | 3514 |
| | | | | length = 2032 | |
| TGME49_chrXI | 1158079 | 1160818 | − | ID = TGME49_310210; | 3515 |
| | | | | length = 2739 | |
| TGME49_chrVIII | 530520 | 533240 | − | ID = TGME49_230000; | 3516 |
| | | | | length = 2720 | |
| TGME49_chrIX | 5528569 | 5530025 | + | ID = TGME49_305635; | 3517 |
| | | | | length = 1456 | |
| TGME49_chrXII | 1633375 | 1637998 | + | ID = TGME49_218260; | 3518 |
| | | | | length = 4623 | |
| TGME49_chrVIII | 3530338 | 3532583 | − | ID = TGME49_273400; | 3519 |
| | | | | length = 2245 | |
| TGME49_chrXI | 2200480 | 2202879 | − | ID = TGME49_311670; | 3520 |
| | | | | length = 2399 | |
| TGME49_chrIX | 4305726 | 4310108 | − | ID = TGME49_291630; | 3521 |
| | | | | length = 4382 | |
| TGME49_chrIa | 1266145 | 1267436 | − | ID = TGME49_294902; | 3522 |
| | | | | length = 1291 | |
| TGME49_chrIb | 209955 | 214235 | + | ID = TGME49_207690; | 3523 |
| | | | | length = 4280 | |
| TGME49_chrXII | 2858847 | 2863310 | + | ID = TGME49_246580; | 3524 |
| | | | | length = 4463 | |
| TGME49_chrXII | 823067 | 826469 | + | ID = TGME49_219610; | 3525 |
| | | | | length = 3402 | |
| TGME49_chrVIIa | 3833493 | 3834672 | + | ID = TGME49_201710; | 3526 |
| | | | | length = 1179 | |
| TGME49_chrVIIb | 3296060 | 3297939 | + | ID = TGME49_258625; | 3527 |
| | | | | length = 1879 | |
| TGME49_chrVI | 867209 | 869418 | − | ID = TGME49_239710; | 3528 |
| | | | | length = 2209 | |
| TGME49_chrVIIa | 1275423 | 1276455 | − | ID = TGME49_205615; | 3529 |
| | | | | length = 1032 | |
| TGME49_chrXII | 4708702 | 4710344 | − | ID = TGME49_249630; | 3530 |
| | | | | length = 1642 | |
| TGME49_chrX | 4171748 | 4175262 | − | ID = TGME49_234165; | 3531 |
| | | | | length = 3514 | |
| TGME49_chrXII | 120499 | 122563 | + | ID = TGME49_300260; | 3532 |
| | | | | length = 2064 | |
| TGME49_chrVI | 498397 | 501660 | − | ID = TGME49_239260; | 3533 |
| | | | | length = 3263 | |
| TGME49_chrVIII | 493816 | 497365 | − | ID = TGME49_229960; | 3534 |
| | | | | length = 3549 | |
| TGME49_chrVIIa | 3616280 | 3620711 | − | ID = TGME49_202090; | 3535 |
| | | | | length = 4431 | |
| TGME49_chrX | 6973684 | 6974864 | − | ID = TGME49_215460; | 3536 |
| | | | | length = 1180 | |
| TGME49_chrX | 6725890 | 6729429 | − | ID = TGME49_215060; | 3537 |
| | | | | length = 3539 | |
| TGME49_chrXI | 2762805 | 2765415 | − | ID = TGME49_312520; | 3538 |
| | | | | length = 2610 | |
| TGME49_chrVIIa | 989384 | 994150 | + | ID = TGME49_206415; | 3539 |
| | | | | length = 4766 | |
| TGME49_chrIb | 1033057 | 1035956 | − | ID = TGME49_209080; | 3540 |
| | | | | length = 2899 | |
| TGME49_chrVIIb | 363934 | 367739 | + | ID = TGME49_263720; | 3541 |
| | | | | length = 3805 | |
| TGME49_chrIX | 3679329 | 3681333 | + | ID = TGME49_290290; | 3542 |
| | | | | length = 2004 | |
| TGME49_chrXI | 1327241 | 1328715 | − | ID = TGME49_310410; | 3543 |
| | | | | length = 1474 | |
| TGME49_chrIb | 162965 | 165017 | + | ID = TGME49_207630; | 3544 |
| | | | | length = 2052 | |
| TGME49_chrVIII | 3411630 | 3413948 | − | ID = TGME49_273550; | 3545 |
| | | | | length = 2318 | |
| TGME49_chrIX | 4237613 | 4239542 | − | ID = TGME49_291310; | 3546 |
| | | | | length = 1929 | |
| TGME49_chrV | 2711277 | 2713061 | + | ID = TGME49_284560; | 3547 |
| | | | | length = 1784 | |
| TGME49_chrVI | 66661 | 71093 | − | ID = TGME49_238100; | 3548 |
| | | | | length = 4432 | |
| TGME49_chrIb | 1108181 | 1112225 | + | ID = TGME49_209200; | 3549 |
| | | | | length = 4044 | |
| TGME49_chrX | 1125018 | 1129103 | + | ID = TGME49_227030; | 3550 |
| | | | | length = 4085 | |
| TGME49_chrXII | 1476720 | 1480771 | + | ID = TGME49_218510; | 3551 |
| | | | | length = 4051 | |
| TGME49_chrVIII | 3028294 | 3030583 | − | ID = TGME49_274110; | 3552 |
| | | | | length = 2289 | |
| TGME49_chrIX | 727730 | 732199 | − | ID = TGME49_267312; | 3553 |
| | | | | length = 4469 | |
| TGME49_chrVI | 1723775 | 1727714 | + | ID = TGME49_241820; | 3554 |
| | | | | length = 3939 | |
| TGME49_chrVIII | 560930 | 562293 | + | ID = TGME49_230040; | 3555 |
| | | | | length = 1363 | |
| TGME49_chrII | 1419626 | 1421332 | + | ID = TGME49_223070; | 3556 |
| | | | | length = 1706 | |
| TGME49_chrXI | 2816725 | 2818748 | + | ID = TGME49_312600; | 3557 |
| | | | | length = 2023 | |
| TGME49_chrX | 7085873 | 7087326 | − | ID = TGME49_215680; | 3558 |
| | | | | length = 1453 | |
| TGME49_chrIV | 1162958 | 1165755 | − | ID = TGME49_318675; | 3559 |
| | | | | length = 2797 | |
| TGME49_chrIV | 1932608 | 1935398 | − | ID = TGME49_211150; | 3560 |
| | | | | length = 2790 | |
| TGME49_chrXII | 3024176 | 3027111 | + | ID = TGME49_246940; | 3561 |
| | | | | length = 2935 | |
| TGME49_chrVIIb | 1718394 | 1720099 | + | ID = TGME49_261475; | 3562 |
| | | | | length = 1705 | |
| TGME49_chrVIII | 5188589 | 5190591 | + | ID = TGME49_270560; | 3563 |
| | | | | length = 2002 | |
| TGME49_chrX | 6922474 | 6926889 | − | ID = TGME49_215350; | 3564 |
| | | | | length = 4415 | |
| TGME49_chrIX | 2114633 | 2116655 | + | ID = TGME49_264670; | 3565 |
| | | | | length = 2022 | |
| TGME49_chrIX | 5302620 | 5305770 | + | ID = TGME49_305240; | 3566 |
| | | | | length = 3150 | |
| TGME49_chrXI | 3722265 | 3724229 | + | ID = TGME49_313840; | 3567 |
| | | | | length = 1964 | |
| TGME49_chrX | 3679396 | 3681487 | + | ID = TGME49_223650; | 3568 |
| | | | | length = 2091 | |
| TGME49_chrXI | 1612255 | 1614074 | + | ID = TGME49_310820; | 3569 |
| | | | | length = 1819 | |
| TGME49_chrXI | 4303663 | 4305739 | − | ID = TGME49_314790; | 3570 |
| | | | | length = 2076 | |
| TGME49_chrVIIa | 3037960 | 3042664 | − | ID = TGME49_202780; | 3571 |
| | | | | length = 4704 | |
| TGME49_chrVIII | 5353669 | 5354773 | + | ID = TGME49_270180; | 3572 |
| | | | | length = 1104 | |
| TGME49_chrXI | 5186674 | 5188879 | + | ID = TGME49_316220; | 3573 |
| | | | | length = 2205 | |
| TGME49_chrXII | 6491430 | 6491855 | − | ID = TGME49_277830; | 3574 |
| | | | | length = 425 | |
| TGME49_chrIV | 1178360 | 1180121 | − | ID = TGME49_318640; | 3575 |
| | | | | length = 1761 | |
| TGME49_chrIb | 1391208 | 1393087 | + | ID = TGME49_209670; | 3576 |
| | | | | length = 1879 | |
| TGME49_chrIb | 801471 | 804370 | + | ID = TGME49_208590; | 3577 |
| | | | | length = 2899 | |
| TGME49_chrVIII | 415461 | 417463 | − | ID = TGME49_229740; | 3578 |
| | | | | length = 2002 | |
| TGME49_chrII | 1274986 | 1276921 | + | ID = TGME49_222880; | 3579 |
| | | | | length = 1935 | |
| TGME49_chrX | 2466640 | 2469050 | + | ID = TGME49_225125; | 3580 |
| | | | | length = 2410 | |
| TGME49_chrVIIb | 3277596 | 3280720 | − | ID = TGME49_258660; | 3581 |
| | | | | length = 3124 | |
| TGME49_chrVIIb | 1395785 | 1399179 | − | ID = TGME49_262070; | 3582 |
| | | | | length = 3394 | |
| TGME49_chrXII | 6597047 | 6599362 | + | ID = TGME49_277560; | 3583 |
| | | | | length = 2315 | |
| TGME49_chrX | 7215853 | 7217846 | − | ID = TGME49_275380; | 3584 |
| | | | | length = 1993 | |
| TGME49_chrX | 6766166 | 6769751 | − | ID = TGME49_215100; | 3585 |
| | | | | length = 3585 | |
| TGME49_chrX | 5386834 | 5389094 | − | ID = TGME49_236400; | 3586 |
| | | | | length = 2260 | |
| TGME49_chrII | 1531544 | 1535065 | − | ID = TGME49_297100; | 3587 |
| | | | | length = 3521 | |
| TGME49_chrXI | 2073091 | 2077650 | − | ID = TGME49_311440; | 3588 |
| | | | | length = 4559 | |
| TGME49_chrVIIa | 3216124 | 3218042 | − | ID = TGME49_202572; | 3589 |
| | | | | length = 1918 | |
| TGME49_chrIa | 1388041 | 1391447 | + | ID = TGME49_295090; | 3590 |
| | | | | length = 3406 | |
| TGME49_chrX | 896541 | 897868 | − | ID = TGME49_227600; | 3591 |
| | | | | length = 1327 | |
| TGME49_chrXII | 6222021 | 6223691 | − | ID = TGME49_278230; | 3592 |
| | | | | length = 1670 | |
| TGME49_chrIX | 5825997 | 5828317 | + | ID = TGME49_306210; | 3593 |
| | | | | length = 2320 | |
| TGME49_chrX | 3282886 | 3284073 | + | ID = TGME49_224170; | 3594 |
| | | | | length = 1187 | |
| TGME49_chrVIII | 377418 | 380433 | − | ID = TGME49_229680; | 3595 |
| | | | | length = 3015 | |
| TGME49_chrV | 3104191 | 3107086 | + | ID = TGME49_283510; | 3596 |
| | | | | length = 2895 | |
| TGME49_chrV | 2202009 | 2203415 | − | ID = TGME49_285820; | 3597 |
| | | | | length = 1406 | |
| TGME49_chrIV | 1970430 | 1971908 | − | ID = TGME49_211015; | 3598 |
| | | | | length = 1478 | |
| TGME49_chrVI | 1052919 | 1057698 | + | ID = TGME49_240090; | 3599 |
| | | | | length = 4779 | |
| TGME49_chrVI | 1330533 | 1332686 | − | ID = TGME49_240580; | 3600 |
| | | | | length = 2153 | |
| TGME49_chrX | 5296360 | 5298183 | + | ID = TGME49_236140; | 3601 |
| | | | | length = 1823 | |
| TGME49_chrVIIa | 1575851 | 1578088 | + | ID = TGME49_205150; | 3602 |
| | | | | length = 2237 | |
| TGME49_chrVIIb | 3668995 | 3670754 | + | ID = TGME49_257990; | 3603 |
| | | | | length = 1759 | |
| TGME49_chrIb | 27811 | 29823 | + | ID = TGME49_207400; | 3604 |
| | | | | length = 2012 | |
| TGME49_chrVIII | 3674014 | 3678518 | + | ID = TGME49_273070; | 3605 |
| | | | | length = 4504 | |
| TGME49_chrIV | 2020728 | 2022776 | + | ID = TGME49_210830; | 3606 |
| | | | | length = 2048 | |
| TGME49_chrIa | 501242 | 504308 | + | ID = TGME49_293680; | 3607 |
| | | | | length = 3066 | |
| TGME49_chrVIII | 4188294 | 4190240 | + | ID = TGME49_272040; | 3608 |
| | | | | length = 1946 | |
| TGME49_chrVIIb | 1593274 | 1595045 | + | ID = TGME49_261670; | 3609 |
| | | | | length = 1771 | |
| TGME49_chrVI | 2345044 | 2347765 | + | ID = TGME49_242845; | 3610 |
| | | | | length = 2721 | |
| TGME49_chrVIIb | 892798 | 896825 | + | ID = TGME49_262960; | 3611 |
| | | | | length = 4027 | |
| TGME49_chrVIIb | 4576535 | 4578100 | − | ID = TGME49_255990; | 3612 |
| | | | | length = 1565 | |
| TGME49_chrVIIb | 3564269 | 3567431 | − | ID = TGME49_258120; | 3613 |
| | | | | length = 3162 | |
| TGME49_chrV | 841156 | 844040 | − | ID = TGME49_213067; | 3614 |
| | | | | length = 2884 | |
| TGME49_chrVIIb | 400077 | 401984 | − | ID = TGME49_263680; | 3615 |
| | | | | length = 1907 | |
| TGME49_chrVIII | 5651257 | 5654273 | − | ID = TGME49_269720; | 3616 |
| | | | | length = 3016 | |
| TGME49_chrXI | 5824519 | 5825439 | − | ID = TGME49_216875; | 3617 |
| | | | | length = 920 | |
| TGME49_chrIa | 289525 | 291377 | − | ID = TGME49_293370; | 3618 |
| | | | | length = 1852 | |
| TGME49_chrVIIb | 340984 | 345618 | + | ID = TGME49_263740; | 3619 |
| | | | | length = 4634 | |
| TGME49_chrVI | 3334624 | 3336932 | − | ID = TGME49_244515; | 3620 |
| | | | | length = 2308 | |
| TGME49_chrVIII | 6462178 | 6464044 | + | ID = TGME49_268390; | 3621 |
| | | | | length = 1866 | |
| TGME49_chrII | 1825535 | 1830439 | − | ID = TGME49_297495; | 3622 |
| | | | | length = 4904 | |
| TGME49_chrVI | 151812 | 155358 | + | ID = TGME49_238250; | 3623 |
| | | | | length = 3546 | |
| TGME49_chrX | 4153234 | 4155867 | + | ID = TGME49_211870; | 3624 |
| | | | | length = 2633 | |
| TGME49_chrVIIa | 3118368 | 3121954 | − | ID = TGME49_202660; | 3625 |
| | | | | length = 3586 | |
| TGME49_chrXII | 3689537 | 3692256 | − | ID = TGME49_248140; | 3626 |
| | | | | length = 2719 | |
| TGME49_chrXI | 3279967 | 3283134 | − | ID = TGME49_313330; | 3627 |
| | | | | length = 3167 | |
| TGME49_chrVIII | 3960669 | 3963072 | − | ID = TGME49_272460; | 3628 |
| | | | | length = 2403 | |
| TGME49_chrX | 5463469 | 5465206 | − | ID = TGME49_236635; | 3629 |
| | | | | length = 1737 | |
| TGME49_chrV | 1402650 | 1404500 | + | ID = TGME49_213890; | 3630 |
| | | | | length = 1850 | |
| TGME49_chrX | 4153234 | 4155275 | + | ID = TGME49_211880; | 3631 |
| | | | | length = 2041 | |
| TGME49_chrX | 1266993 | 1269615 | + | ID = TGME49_226880; | 3632 |
| | | | | length = 2622 | |
| TGME49_chrIX | 1528778 | 1530786 | + | ID = TGME49_265480; | 3633 |
| | | | | length = 2008 | |
| TGME49_chrIX | 1745845 | 1747343 | − | ID = TGME49_265150; | 3634 |
| | | | | length = 1498 | |
| TGME49_chrVI | 884386 | 888183 | − | ID = TGME49_239740; | 3635 |
| | | | | length = 3797 | |
| TGME49_chrXI | 5317194 | 5320938 | + | ID = TGME49_316460; | 3636 |
| | | | | length = 3744 | |
| TGME49_chrVIIb | 776365 | 780112 | + | ID = TGME49_263130; | 3637 |
| | | | | length = 3747 | |
| TGME49_chrXI | 6442825 | 6444555 | − | ID = TGME49_216050; | 3638 |
| | | | | length = 1730 | |
| TGME49_chrX | 2318525 | 2320515 | + | ID = TGME49_225310; | 3639 |
| | | | | length = 1990 | |
| TGME49_chrVIII | 4296304 | 4298540 | − | ID = TGME49_271892; | 3640 |
| | | | | length = 2236 | |
| TGME49_chrVIII | 3611438 | 3613139 | + | ID = TGME49_273280; | 3641 |
| | | | | length = 1701 | |
| TGME49_chrV | 2172830 | 2174806 | + | ID = TGME49_285840; | 3642 |
| | | | | length = 1976 | |
| TGME49_chrIa | 271448 | 273727 | − | ID = TGME49_293340; | 3643 |
| | | | | length = 2279 | |
| TGME49_chrVIIb | 2660463 | 2662578 | + | ID = TGME49_259850; | 3644 |
| | | | | length = 2115 | |
| TGME49_chrVIIb | 2924755 | 2925875 | − | ID = TGME49_259168; | 3645 |
| | | | | length = 1120 | |
| TGME49_chrXII | 6094335 | 6096858 | + | ID = TGME49_278440; | 3646 |
| | | | | length = 2523 | |
| TGME49_chrIX | 5146130 | 5146913 | − | ID = TGME49_304980; | 3647 |
| | | | | length = 783 | |
| TGME49_chrXI | 3600688 | 3604400 | − | ID = TGME49_313673; | 3648 |
| | | | | length = 3712 | |
| TGME49_chrVIIb | 1802206 | 1804702 | − | ID = TGME49_261260; | 3649 |
| | | | | length = 2496 | |
| TGME49_chrXI | 6116659 | 6118655 | − | ID = TGME49_216500; | 3650 |
| | | | | length = 1996 | |
| TGME49_chrXII | 1854971 | 1859523 | + | ID = TGME49_217470; | 3651 |
| | | | | length = 4552 | |
| TGME49_chrX | 293996 | 296317 | − | ID = TGME49_228490; | 3652 |
| | | | | length = 2321 | |
| TGME49_chrIX | 5318345 | 5320794 | + | ID = TGME49_305260; | 3653 |
| | | | | length = 2449 | |
| TGME49_chrVI | 2399019 | 2400763 | + | ID = TGME49_242900; | 3654 |
| | | | | length = 1744 | |
| TGME49_chrVIIa | 1642474 | 1645461 | − | ID = TGME49_205080; | 3655 |
| | | | | length = 2987 | |
| TGME49_chrVIII | 6123971 | 6127883 | − | ID = TGME49_269035; | 3656 |
| | | | | length = 3912 | |
| TGME49_chrV | 2543184 | 2545309 | − | ID = TGME49_285200; | 3657 |
| | | | | length = 2125 | |
| TGME49_chrXII | 4492697 | 4496623 | + | ID = TGME49_249365; | 3658 |
| | | | | length = 3926 | |
| TGME49_chrVI | 303372 | 308255 | + | ID = TGME49_238915; | 3659 |
| | | | | length = 4883 | |
| TGME49_chrII | 179710 | 182938 | + | ID = TGME49_221260; | 3660 |
| | | | | length = 3228 | |
| TGME49_chrXII | 4294888 | 4296930 | − | ID = TGME49_249000; | 3661 |
| | | | | length = 2042 | |
| TGME49_chrIX | 3505245 | 3508638 | − | ID = TGME49_289880; | 3662 |
| | | | | length = 3393 | |
| TGME49_chrVIIb | 2869299 | 2871159 | + | ID = TGME49_259210; | 3663 |
| | | | | length = 1860 | |
| TGME49_chrVIIa | 3777648 | 3779712 | + | ID = TGME49_201800; | 3664 |
| | | | | length = 2064 | |
| TGME49_chrXI | 3072074 | 3074339 | − | ID = TGME49_313055; | 3665 |
| | | | | length = 2265 | |
| TGME49_chrVIIa | 4157220 | 4159151 | − | ID = TGME49_281500; | 3666 |
| | | | | length = 1931 | |
| TGME49_chrVIIb | 57559 | 61364 | − | ID = TGME49_264225; | 3667 |
| | | | | length = 3805 | |
| TGME49_chrXI | 1876735 | 1880862 | + | ID = TGME49_311230; | 3668 |
| | | | | length = 4127 | |
| TGME49_chrVIIb | 4440597 | 4442145 | + | ID = TGME49_256810; | 3669 |
| | | | | length = 1548 | |
| TGME49_chrVIIa | 3072309 | 3074641 | + | ID = TGME49_202730; | 3670 |
| | | | | length = 2332 | |
| TGME49_chrVIII | 295302 | 299523 | − | ID = TGME49_229480; | 3671 |
| | | | | length = 4221 | |
| TGME49_chrXI | 3700842 | 3703550 | − | ID = TGME49_313800; | 3672 |
| | | | | length = 2708 | |
| TGME49_chrIb | 783599 | 787408 | − | ID = TGME49_208560; | 3673 |
| | | | | length = 3809 | |
| TGME49_chrVIII | 6337954 | 6339540 | + | ID = TGME49_268730; | 3674 |
| | | | | length = 1586 | |
| TGME49_chrXI | 2630045 | 2632405 | + | ID = TGME49_312360; | 3675 |
| | | | | length = 2360 | |
| TGME49_chrIX | 1235277 | 1239596 | − | ID = TGME49_266300; | 3676 |
| | | | | length = 4319 | |
| TGME49_chrIX | 894353 | 898324 | + | ID = TGME49_266920; | 3677 |
| | | | | length = 3971 | |
| TGME49_chrVIII | 4158964 | 4160790 | + | ID = TGME49_272180; | 3678 |
| | | | | length = 1826 | |
| TGME49_chrX | 2443820 | 2448305 | + | ID = TGME49_225150; | 3679 |
| | | | | length = 4485 | |
| TGME49_chrIa | 236822 | 238568 | + | ID = TGME49_293290; | 3680 |
| | | | | length = 1746 | |
| TGME49_chrIX | 5825997 | 5827653 | + | ID = TGME49_306200; | 3681 |
| | | | | length = 1656 | |
| TGME49_chrIX | 2354796 | 2356195 | − | ID = TGME49_288050; | 3682 |
| | | | | length = 1399 | |
| TGME49_chrVIII | 3128353 | 3129861 | − | ID = TGME49_273995; | 3683 |
| | | | | length = 1508 | |
| TGME49_chrVIIb | 282534 | 283983 | + | ID = TGME49_263860; | 3684 |
| | | | | length = 1449 | |
| TGME49_chrV | 1285449 | 1287602 | − | ID = TGME49_213748; | 3685 |
| | | | | length = 2153 | |
| TGME49_chrIX | 4127078 | 4130241 | + | ID = TGME49_291120; | 3686 |
| | | | | length = 3163 | |
| TGME49_chrVIII | 2747263 | 2749263 | + | ID = TGME49_233720; | 3687 |
| | | | | length = 2000 | |
| TGME49_chrXII | 3414639 | 3417680 | − | ID = TGME49_247550; | 3688 |
| | | | | length = 3041 | |
| TGME49_chrX | 6010344 | 6014213 | + | ID = TGME49_214080; | 3689 |
| | | | | length = 3869 | |
| TGME49_chrXI | 763150 | 767129 | + | ID = TGME49_309720; | 3690 |
| | | | | length = 3979 | |
| TGME49_chrVI | 118877 | 121839 | + | ID = TGME49_238200; | 3691 |
| | | | | length = 2962 | |
| TGME49_chrXI | 829867 | 831550 | − | ID = TGME49_309810; | 3692 |
| | | | | length = 1683 | |
| TGME49_chrVI | 2360228 | 2365079 | − | ID = TGME49_242860; | 3693 |
| | | | | length = 4851 | |
| TGME49_chrX | 3978545 | 3981345 | + | ID = TGME49_212200; | 3694 |
| | | | | length = 2800 | |
| TGME49_chrXII | 6852419 | 6855685 | − | ID = TGME49_276920; | 3695 |
| | | | | length = 3266 | |
| TGME49_chrVIIb | 4943943 | 4948498 | + | ID = TGME49_255260; | 3696 |
| | | | | length = 4555 | |
| TGME49_chrXII | 4707577 | 4709680 | + | ID = TGME49_249650; | 3697 |
| | | | | length = 2103 | |
| TGME49_chrVIIb | 4709972 | 4711447 | − | ID = TGME49_255710; | 3698 |
| | | | | length = 1475 | |
| TGME49_chrIX | 2083440 | 2086073 | − | ID = TGME49_264740; | 3699 |
| | | | | length = 2633 | |
| TGME49_chrV | 2850906 | 2853929 | − | ID = TGME49_284040; | 3700 |
| | | | | length = 3023 | |
| TGME49_chrX | 5951513 | 5954484 | − | ID = TGME49_237520; | 3701 |
| | | | | length = 2971 | |
| TGME49_chrVIII | 5113899 | 5115543 | + | ID = TGME49_270630; | 3702 |
| | | | | length = 1644 | |
| TGME49_chrIb | 781751 | 786180 | + | ID = TGME49_208570; | 3703 |
| | | | | length = 4429 | |
| TGME49_chrX | 2377395 | 2379215 | + | ID = TGME49_225240; | 3704 |
| | | | | length = 1820 | |
| TGME49_chrX | 3134556 | 3137082 | + | ID = TGME49_224275; | 3705 |
| | | | | length = 2526 | |
| TGME49_chrV | 1005836 | 1007767 | + | ID = TGME49_213410; | 3706 |
| | | | | length = 1931 | |
| TGME49_chrXI | 3469048 | 3470899 | − | ID = TGME49_313540; | 3707 |
| | | | | length = 1851 | |
| TGME49_chrVIII | 1049473 | 1053414 | − | ID = TGME49_230830; | 3708 |
| | | | | length = 3941 | |
| TGME49_chrVI | 3300769 | 3304052 | − | ID = TGME49_244470; | 3709 |
| | | | | length = 3283 | |
| TGME49_chrXI | 793193 | 797745 | − | ID = TGME49_309760; | 3710 |
| | | | | length = 4552 | |
| TGME49_chrXII | 736911 | 739042 | − | ID = TGME49_219682; | 3711 |
| | | | | length = 2131 | |
| TGME49_chrV | 1764292 | 1768196 | + | ID = TGME49_286595; | 3712 |
| | | | | length = 3904 | |
| TGME49_chrVI | 2678544 | 2680887 | + | ID = TGME49_243500; | 3713 |
| | | | | length = 2343 | |
| TGME49_chrVI | 2944414 | 2946280 | + | ID = TGME49_244000; | 3714 |
| | | | | length = 1866 | |
| TGME49_chrVI | 3253287 | 3255288 | + | ID = TGME49_244430; | 3715 |
| | | | | length = 2001 | |
| TGME49_chrX | 6205595 | 6210365 | + | ID = TGME49_214280; | 3716 |
| | | | | length = 4770 | |
| TGME49_chrIX | 4037286 | 4041660 | − | ID = TGME49_291005; | 3717 |
| | | | | length = 4374 | |
| TGME49_chrIX | 4585284 | 4586943 | − | ID = TGME49_292160; | 3718 |
| | | | | length = 1659 | |
| TGME49_chrIa | 1088361 | 1093316 | + | ID = TGME49_294720; | 3719 |
| | | | | length = 4955 | |
| TGME49_chrVIII | 2805898 | 2808434 | + | ID = TGME49_233810; | 3720 |
| | | | | length = 2536 | |
| TGME49_chrV | 860119 | 861470 | + | ID = TGME49_213115; | 3721 |
| | | | | length = 1351 | |
| TGME49_chrIa | 1560221 | 1563486 | + | ID = TGME49_295720; | 3722 |
| | | | | length = 3265 | |
| TGME49_chrIV | 2667136 | 2669610 | + | ID = TGME49_317720; | 3723 |
| | | | | length = 2474 | |
| TGME49_chrVI | 1655341 | 1658987 | + | ID = TGME49_241155; | 3724 |
| | | | | length = 3646 | |
| TGME49_chrVIIb | 430148 | 433668 | − | ID = TGME49_263630; | 3725 |
| | | | | length = 3520 | |
| TGME49_chrIX | 4677697 | 4679657 | − | ID = TGME49_292300; | 3726 |
| | | | | length = 1960 | |
| TGME49_chrX | 3531731 | 3534835 | + | ID = TGME49_223845; | 3727 |
| | | | | length = 3104 | |
| TGME49_chrX | 6552144 | 6552859 | + | ID = TGME49_214860; | 3728 |
| | | | | length = 715 | |
| TGME49_chrVIII | 1928635 | 1933235 | + | ID = TGME49_232190; | 3729 |
| | | | | length = 4600 | |
| TGME49_chrVIIb | 4963848 | 4965565 | + | ID = TGME49_255245; | 3730 |
| | | | | length = 1717 | |
| TGME49_chrXI | 2272267 | 2276540 | − | ID = TGME49_311765; | 3731 |
| | | | | length = 4273 | |
| TGME49_chrXI | 3206386 | 3210859 | − | ID = TGME49_313235; | 3732 |
| | | | | length = 4473 | |
| TGME49_chrVIII | 1149159 | 1152853 | + | ID = TGME49_230970; | 3733 |
| | | | | length = 3694 | |
| TGME49_chrII | 447679 | 452475 | − | ID = TGME49_221570; | 3734 |
| | | | | length = 4796 | |
| TGME49_chrXII | 386080 | 388449 | − | ID = TGME49_307760; | 3735 |
| | | | | length = 2369 | |
| TGME49_chrVIII | 676375 | 678638 | + | ID = TGME49_230200; | 3736 |
| | | | | length = 2263 | |
| TGME49_chrXII | 3180527 | 3182528 | − | ID = TGME49_247220; | 3737 |
| | | | | length = 2001 | |
| TGME49_chrVIII | 5945676 | 5950322 | + | ID = TGME49_269270; | 3738 |
| | | | | length = 4646 | |
| TGME49_chrVIII | 451670 | 454022 | + | ID = TGME49_229900; | 3739 |
| | | | | length = 2352 | |
| TGME49_chrXII | 2632703 | 2633950 | + | ID = TGME49_246060; | 3740 |
| | | | | length = 1247 | |
| TGME49_chrXI | 2930147 | 2932129 | − | ID = TGME49_312820; | 3741 |
| | | | | length = 1982 | |
| TGME49_chrIX | 4590678 | 4593804 | + | ID = TGME49_292180; | 3742 |
| | | | | length = 3126 | |
| TGME49_chrV | 2650784 | 2654467 | − | ID = TGME49_284630; | 3743 |
| | | | | length = 3683 | |
| TGME49_chrX | 2024148 | 2027899 | + | ID = TGME49_225810; | 3744 |
| | | | | length = 3751 | |
| TGME49_chrVIIa | 4226184 | 4229009 | + | ID = TGME49_281630; | 3745 |
| | | | | length = 2825 | |
| TGME49_chrXII | 4960618 | 4964965 | − | ID = TGME49_249960; | 3746 |
| | | | | length = 4347 | |
| TGME49_chrXII | 1134635 | 1136707 | − | ID = TGME49_219100; | 3747 |
| | | | | length = 2072 | |
| TGME49_chrVIII | 684588 | 686890 | − | ID = TGME49_230205; | 3748 |
| | | | | length = 2302 | |
| TGME49_chrIV | 1209441 | 1210630 | − | ID = TGME49_318590; | 3749 |
| | | | | length = 1189 | |
| TGME49_chrVI | 2692449 | 2693266 | + | ID = TGME49_243520; | 3750 |
| | | | | length = 817 | |
| TGME49_chrV | 1838282 | 1841112 | − | ID = TGME49_286420; | 3751 |
| | | | | length = 2830 | |
| TGME49_chrVIII | 920039 | 922135 | − | ID = TGME49_230610; | 3752 |
| | | | | length = 2096 | |
| TGME49_chrX | 2698033 | 2701877 | − | ID = TGME49_224905; | 3753 |
| | | | | length = 3844 | |
| TGME49_chrXI | 2114575 | 2119619 | + | ID = TGME49_311485; | 3754 |
| | | | | length = 5044 | |
| TGME49_chrXII | 1401285 | 1403127 | + | ID = TGME49_218580; | 3755 |
| | | | | length = 1842 | |
| TGME49_chrVIIb | 4874138 | 4879043 | − | ID = TGME49_255370; | 3756 |
| | | | | length = 4905 | |
| TGME49_chrVIII | 4334110 | 4336235 | − | ID = TGME49_271860; | 3757 |
| | | | | length = 2125 | |
| TGME49_chrVIII | 1955865 | 1958248 | + | ID = TGME49_232220; | 3758 |
| | | | | length = 2383 | |
| TGME49_chrVIIa | 4058231 | 4061062 | + | ID = TGME49_281400; | 3759 |
| | | | | length = 2831 | |
| TGME49_chrXII | 5605748 | 5608371 | − | ID = TGME49_251830; | 3760 |
| | | | | length = 2623 | |
| TGME49_chrX | 7145189 | 7146960 | + | ID = TGME49_215750; | 3761 |
| | | | | length = 1771 | |
| TGME49_chrIX | 5304271 | 5305970 | − | ID = TGME49_305230; | 3762 |
| | | | | length = 1699 | |
| TGME49_chrIb | 1709895 | 1713439 | + | ID = TGME49_321600; | 3763 |
| | | | | length = 3544 | |
| TGME49_chrXII | 5667819 | 5669852 | − | ID = TGME49_251920; | 3764 |
| | | | | length = 2033 | |
| TGME49_chrXI | 1032945 | 1037980 | − | ID = TGME49_310050; | 3765 |
| | | | | length = 5035 | |
| TGME49_chrXI | 5106537 | 5108324 | − | ID = TGME49_315958; | 3766 |
| | | | | length = 1787 | |
| TGME49_chrVIIb | 1117766 | 1121043 | − | ID = TGME49_262630; | 3767 |
| | | | | length = 3277 | |
| TGME49_chrIb | 772266 | 774883 | + | ID = TGME49_208550; | 3768 |
| | | | | length = 2617 | |
| TGME49_chrIb | 627070 | 629071 | − | ID = TGME49_208350; | 3769 |
| | | | | length = 2001 | |
| TGME49_chrX | 6319660 | 6321243 | + | ID = TGME49_214500; | 3770 |
| | | | | length = 1583 | |
| TGME49_chrVIIb | 2192639 | 2196472 | − | ID = TGME49_260520; | 3771 |
| | | | | length = 3833 | |
| TGME49_chrVI | 898593 | 901403 | − | ID = TGME49_239755; | 3772 |
| | | | | length = 2810 | |
| TGME49_chrXI | 4168642 | 4173147 | + | ID = TGME49_314530; | 3773 |
| | | | | length = 4505 | |
| TGME49_chrIa | 111718 | 114297 | − | ID = TGME49_293050; | 3774 |
| | | | | length = 2579 | |
| TGME49_chrXII | 2783691 | 2785982 | − | ID = TGME49_246450; | 3775 |
| | | | | length = 2291 | |
| TGME49_chrXI | 1288133 | 1292845 | − | ID = TGME49_310350; | 3776 |
| | | | | length = 4712 | |
| TGME49_chrXII | 162730 | 165254 | − | ID = TGME49_300200; | 3777 |
| | | | | length = 2524 | |
| TGME49_chrIX | 3575960 | 3579143 | − | ID = TGME49_290000; | 3778 |
| | | | | length = 3183 | |
| TGME49_chrXII | 3356485 | 3359532 | + | ID = TGME49_247470; | 3779 |
| | | | | length = 3047 | |
| TGME49_chrVIII | 2112448 | 2113740 | + | ID = TGME49_232460; | 3780 |
| | | | | length = 1292 | |
| TGME49_chrVIIa | 3520331 | 3522747 | − | ID = TGME49_202210; | 3781 |
| | | | | length = 2416 | |
| TGME49_chrVIIb | 1807507 | 1811746 | − | ID = TGME49_261250; | 3782 |
| | | | | length = 4239 | |
| TGME49_chrVIIb | 1326486 | 1331064 | − | ID = TGME49_262170; | 3783 |
| | | | | length = 4578 | |
| TGME49_chrXII | 4742982 | 4745450 | + | ID = TGME49_249702; | 3784 |
| | | | | length = 2468 | |
| TGME49_chrV | 2699767 | 2701801 | + | ID = TGME49_284580; | 3785 |
| | | | | length = 2034 | |
| TGME49_chrXI | 2716805 | 2718646 | + | ID = TGME49_312480; | 3786 |
| | | | | length = 1841 | |
| TGME49_chrIX | 772823 | 775776 | − | ID = TGME49_267110; | 3787 |
| | | | | length = 2953 | |
| TGME49_chrVI | 1683551 | 1687309 | + | ID = TGME49_241240; | 3788 |
| | | | | length = 3758 | |
| TGME49_chrIV | 1708862 | 1710770 | + | ID = TGME49_211440; | 3789 |
| | | | | length = 1908 | |
| TGME49_chrVIIb | 2348892 | 2350447 | + | ID = TGME49_260325; | 3790 |
| | | | | length = 1555 | |
| TGME49_chrX | 1012359 | 1015635 | + | ID = TGME49_227335; | 3791 |
| | | | | length = 3276 | |
| TGME49_chrX | 6603260 | 6606386 | − | ID = TGME49_214930; | 3792 |
| | | | | length = 3126 | |
| TGME49_chrVIII | 434978 | 437027 | + | ID = TGME49_229780; | 3793 |
| | | | | length = 2049 | |
| TGME49_chrVIII | 1536361 | 1538858 | − | ID = TGME49_231780; | 3794 |
| | | | | length = 2497 | |
| TGME49_chrVI | 890233 | 892412 | + | ID = TGME49_239752; | 3795 |
| | | | | length = 2179 | |
| TGME49_chrX | 775064 | 778810 | + | ID = TGME49_227840; | 3796 |
| | | | | length = 3746 | |
| TGME49_chrVIII | 5128576 | 5133324 | − | ID = TGME49_270620; | 3797 |
| | | | | length = 4748 | |
| TGME49_chrV | 1696352 | 1699779 | + | ID = TGME49_286740; | 3798 |
| | | | | length = 3427 | |
| TGME49_chrIX | 4570167 | 4571563 | − | ID = TGME49_292130; | 3799 |
| | | | | length = 1396 | |
| TGME49_chrIb | 1506997 | 1508664 | − | ID = TGME49_209870; | 3800 |
| | | | | length = 1667 | |
| TGME49_chrXI | 5888682 | 5890417 | − | ID = TGME49_216785; | 3801 |
| | | | | length = 1735 | |
| TGME49_chrXI | 216523 | 219848 | + | ID = TGME49_306870; | 3802 |
| | | | | length = 3325 | |
| TGME49_chrVIIa | 3745951 | 3750483 | − | ID = TGME49_201850; | 3803 |
| | | | | length = 4532 | |
| TGME49_chrXII | 5911846 | 5916676 | − | ID = TGME49_278740; | 3804 |
| | | | | length = 4830 | |
| TGME49_chrVIIb | 3025423 | 3026890 | − | ID = TGME49_259020; | 3805 |
| | | | | length = 1467 | |
| TGME49_chrXI | 1475654 | 1480111 | − | ID = TGME49_310610; | 3806 |
| | | | | length = 4457 | |
| TGME49_chrXII | 5760821 | 5764702 | + | ID = TGME49_278910; | 3807 |
| | | | | length = 3881 | |
| TGME49_chrIX | 5163063 | 5165571 | − | ID = TGME49_305010; | 3808 |
| | | | | length = 2508 | |
| TGME49_chrIa | 808274 | 811964 | + | ID = TGME49_294340; | 3809 |
| | | | | length = 3690 | |
| TGME49_chrXII | 425609 | 430368 | − | ID = TGME49_307810; | 3810 |
| | | | | length = 4759 | |
| TGME49_chrIX | 189607 | 191648 | − | ID = TGME49_279430; | 3811 |
| | | | | length = 2041 | |
| TGME49_chrXII | 6699406 | 6704060 | − | ID = TGME49_277240; | 3812 |
| | | | | length = 4654 | |
| TGME49_chrX | 3862116 | 3866423 | + | ID = TGME49_223390; | 3813 |
| | | | | length = 4307 | |
| TGME49_chrIb | 163682 | 165355 | − | ID = TGME49_207620; | 3814 |
| | | | | length = 1673 | |
| TGME49_chrVIIb | 628606 | 632828 | − | ID = TGME49_263330; | 3815 |
| | | | | length = 4222 | |
| TGME49_chrVIII | 4276676 | 4280983 | − | ID = TGME49_271935; | 3816 |
| | | | | length = 4307 | |
| TGME49_chrV | 1151826 | 1153503 | + | ID = TGME49_213580; | 3817 |
| | | | | length = 1677 | |
| TGME49_chrIX | 3597344 | 3600415 | − | ID = TGME49_290030; | 3818 |
| | | | | length = 3071 | |
| TGME49_chrVIIa | 1207940 | 1209729 | + | ID = TGME49_205700; | 3819 |
| | | | | length = 1789 | |
| TGME49_chrXII | 1716091 | 1718180 | − | ID = TGME49_218192; | 3820 |
| | | | | length = 2089 | |
| TGME49_chrVI | 1072208 | 1074913 | + | ID = TGME49_240220; | 3821 |
| | | | | length = 2705 | |
| TGME49_chrIX | 3344898 | 3346813 | + | ID = TGME49_289615; | 3822 |
| | | | | length = 1915 | |
| TGME49_chrXII | 193234 | 197614 | − | ID = TGME49_300130; | 3823 |
| | | | | length = 4380 | |
| TGME49_chrIX | 5678742 | 5680658 | − | ID = TGME49_305930; | 3824 |
| | | | | length = 1916 | |
| TGME49_chrIa | 511367 | 514250 | + | ID = TGME49_293700; | 3825 |
| | | | | length = 2883 | |
| TGME49_chrXI | 3234644 | 3236534 | + | ID = TGME49_313280; | 3826 |
| | | | | length = 1890 | |
| TGME49_chrIa | 1342885 | 1345816 | − | ID = TGME49_295035; | 3827 |
| | | | | length = 2931 | |
| TGME49_chrIX | 476754 | 479709 | + | ID = TGME49_267660; | 3828 |
| | | | | length = 2955 | |
| TGME49_chrXII | 5454860 | 5457281 | − | ID = TGME49_251550; | 3829 |
| | | | | length = 2421 | |
| TGME49_chrX | 6552144 | 6556896 | + | ID = TGME49_214870; | 3830 |
| | | | | length = 4752 | |
| TGME49_chrVIIa | 3180348 | 3184059 | + | ID = TGME49_202590; | 3831 |
| | | | | length = 3711 | |
| TGME49_chrIX | 5280883 | 5283665 | − | ID = TGME49_305190; | 3832 |
| | | | | length = 2782 | |
| TGME49_chrX | 3701807 | 3706821 | − | ID = TGME49_223610; | 3833 |
| | | | | length = 5014 | |
| TGME49_chrVIII | 4742918 | 4744434 | − | ID = TGME49_271070; | 3834 |
| | | | | length = 1516 | |
| TGME49_chrX | 6329257 | 6330831 | − | ID = TGME49_214510; | 3835 |
| | | | | length = 1574 | |
| TGME49_chrVIIb | 4135277 | 4137872 | + | ID = TGME49_257300; | 3836 |
| | | | | length = 2595 | |
| TGME49_chrVIIb | 3296604 | 3298791 | − | ID = TGME49_258630; | 3837 |
| | | | | length = 2187 | |
| TGME49_chrVIII | 2597579 | 2599382 | − | ID = TGME49_233330; | 3838 |
| | | | | length = 1803 | |
| TGME49_chrX | 551024 | 552313 | + | ID = TGME49_228140; | 3839 |
| | | | | length = 1289 | |
| TGME49_chrIX | 4614733 | 4617149 | + | ID = TGME49_292220; | 3840 |
| | | | | length = 2416 | |
| TGME49_chrIV | 110065 | 114937 | + | ID = TGME49_320720; | 3841 |
| | | | | length = 4872 | |
| TGME49_chrIX | 3383102 | 3384808 | − | ID = TGME49_289690; | 3842 |
| | | | | length = 1706 | |
| TGME49_chrXI | 3166849 | 3168996 | + | ID = TGME49_313200; | 3843 |
| | | | | length = 2147 | |
| TGME49_chrVIII | 1658293 | 1660173 | + | ID = TGME49_231940; | 3844 |
| | | | | length = 1880 | |
| TGME49_chrXI | 749160 | 751293 | + | ID = TGME49_309600; | 3845 |
| | | | | length = 2133 | |
| TGME49_chrX | 5340571 | 5342425 | − | ID = TGME49_236220; | 3846 |
| | | | | length = 1854 | |
| TGME49_chrIX | 4109881 | 4114158 | − | ID = TGME49_291080; | 3847 |
| | | | | length = 4277 | |
| TGME49_chrVIIb | 579048 | 580735 | − | ID = TGME49_263410; | 3848 |
| | | | | length = 1687 | |
| TGME49_chrIb | 1354758 | 1356812 | − | ID = TGME49_209585; | 3849 |
| | | | | length = 2054 | |
| TGME49_chrII | 114763 | 116965 | − | ID = TGME49_221180; | 3850 |
| | | | | length = 2202 | |
| TGME49_chrX | 7457352 | 7459980 | + | ID = TGME49_207240; | 3851 |
| | | | | length = 2628 | |
| TGME49_chrXI | 3622165 | 3624128 | + | ID = TGME49_313700; | 3852 |
| | | | | length = 1963 | |
| TGME49_chrXI | 4594911 | 4596494 | + | ID = TGME49_315240; | 3853 |
| | | | | length = 1583 | |
| TGME49_chrVIIa | 3667870 | 3670309 | − | ID = TGME49_202050; | 3854 |
| | | | | length = 2439 | |
| TGME49_chrVIII | 3750977 | 3753691 | − | ID = TGME49_272760; | 3855 |
| | | | | length = 2714 | |
| TGME49_chrV | 2731928 | 2734972 | − | ID = TGME49_284540; | 3856 |
| | | | | length = 3044 | |
| TGME49_chrIX | 5312955 | 5315417 | + | ID = TGME49_305250; | 3857 |
| | | | | length = 2462 | |
| TGME49_chrVIII | 1242184 | 1246962 | + | ID = TGME49_231120; | 3858 |
| | | | | length = 4778 | |
| TGME49_chrII | 1270561 | 1272652 | + | ID = TGME49_222870; | 3859 |
| | | | | length = 2091 | |
| TGME49_chrIa | 1394581 | 1398592 | + | ID = TGME49_295100; | 3860 |
| | | | | length = 4011 | |
| TGME49_chrII | 695109 | 697038 | + | ID = TGME49_221922; | 3861 |
| | | | | length = 1929 | |
| TGME49_chrIV | 231725 | 234333 | + | ID = TGME49_320588; | 3862 |
| | | | | length = 2608 | |
| TGME49_chrXII | 473177 | 474441 | + | ID = TGME49_307980; | 3863 |
| | | | | length = 1264 | |
| TGME49_chrVIIb | 3849337 | 3852143 | + | ID = TGME49_257755; | 3864 |
| | | | | length = 2806 | |
| TGME49_chrVIIa | 1664628 | 1666761 | − | ID = TGME49_205040; | 3865 |
| | | | | length = 2133 | |
| TGME49_chrVIIb | 3685950 | 3689788 | + | ID = TGME49_257970; | 3866 |
| | | | | length = 3838 | |
| TGME49_chrX | 1921524 | 1925824 | + | ID = TGME49_225930; | 3867 |
| | | | | length = 4300 | |
| TGME49_chrX | 7302683 | 7304952 | − | ID = TGME49_275480; | 3868 |
| | | | | length = 2269 | |
| TGME49_chrIX | 2710220 | 2712817 | + | ID = TGME49_288730; | 3869 |
| | | | | length = 2597 | |
| TGME49_chrVIIb | 3551916 | 3554846 | − | ID = TGME49_258150; | 3870 |
| | | | | length = 2930 | |
| TGME49_chrXII | 3395404 | 3397801 | − | ID = TGME49_247530; | 3871 |
| | | | | length = 2397 | |
| TGME49_chrXII | 2036318 | 2041237 | − | ID = TGME49_217710; | 3872 |
| | | | | length = 4919 | |
| TGME49_chrVIII | 6601085 | 6602909 | − | ID = TGME49_268260; | 3873 |
| | | | | length = 1824 | |
| TGME49_chrVIIb | 2477511 | 2479458 | − | ID = TGME49_260180; | 3874 |
| | | | | length = 1947 | |
| TGME49_chrXII | 847627 | 848796 | + | ID = TGME49_219580; | 3875 |
| | | | | length = 1169 | |
| TGME49_chrXI | 5245329 | 5247973 | + | ID = TGME49_316340; | 3876 |
| | | | | length = 2644 | |
| TGME49_chrVIII | 1595952 | 1597448 | − | ID = TGME49_231865; | 3877 |
| | | | | length = 1496 | |
| TGME49_chrX | 4882399 | 4885373 | − | ID = TGME49_235460; | 3878 |
| | | | | length = 2974 | |
| TGME49_chrXII | 1510400 | 1513768 | + | ID = TGME49_218470; | 3879 |
| | | | | length = 3368 | |
| TGME49_chrXII | 1275377 | 1278904 | + | ID = TGME49_218820; | 3880 |
| | | | | length = 3527 | |
| TGME49_chrIX | 4321869 | 4323613 | − | ID = TGME49_291670; | 3881 |
| | | | | length = 1744 | |
| TGME49_chrIX | 1600603 | 1603702 | + | ID = TGME49_265370; | 3882 |
| | | | | length = 3099 | |
| TGME49_chrXII | 2166215 | 2167918 | − | ID = TGME49_217830; | 3883 |
| | | | | length = 1703 | |
| TGME49_chrIV | 1694292 | 1697186 | + | ID = TGME49_211460; | 3884 |
| | | | | length = 2894 | |
| TGME49_chrX | 6884604 | 6886087 | + | ID = TGME49_215300; | 3885 |
| | | | | length = 1483 | |
| TGME49_chrXI | 4030644 | 4031150 | − | ID = TGME49_314350; | 3886 |
| | | | | length = 506 | |
| TGME49_chrXI | 5713685 | 5715292 | − | ID = TGME49_217030; | 3887 |
| | | | | length = 1607 | |
| TGME49_chrVIIa | 3187548 | 3190806 | + | ID = TGME49_202580; | 3888 |
| | | | | length = 3258 | |
| TGME49_chrIX | 1479516 | 1483804 | + | ID = TGME49_265650; | 3889 |
| | | | | length = 4288 | |
| TGME49_chrXII | 1108042 | 1109700 | + | ID = TGME49_219140; | 3890 |
| | | | | length = 1658 | |
| TGME49_chrIa | 144640 | 149293 | − | ID = TGME49_293180; | 3891 |
| | | | | length = 4653 | |
| TGME49_chrVIIa | 3402771 | 3404549 | + | ID = TGME49_202350; | 3892 |
| | | | | length = 1778 | |
| TGME49_chrV | 1107121 | 1109027 | + | ID = TGME49_213500; | 3893 |
| | | | | length = 1906 | |
| TGME49_chrV | 1652865 | 1655496 | + | ID = TGME49_286800; | 3894 |
| | | | | length = 2631 | |
| TGME49_chrX | 6732035 | 6733904 | − | ID = TGME49_215070; | 3895 |
| | | | | length = 1869 | |
| TGME49_chrVIII | 3331943 | 3336912 | + | ID = TGME49_273650; | 3896 |
| | | | | length = 4969 | |
| TGME49_chrXII | 6757204 | 6757912 | − | ID = TGME49_277055; | 3897 |
| | | | | length = 708 | |
| TGME49_chrXI | 4086745 | 4089078 | − | ID = TGME49_314415; | 3898 |
| | | | | length = 2333 | |
| TGME49_chrVIIb | 228036 | 231382 | + | ID = TGME49_264020; | 3899 |
| | | | | length = 3346 | |
| TGME49_chrVIIa | 4227427 | 4230194 | − | ID = TGME49_281620; | 3900 |
| | | | | length = 2767 | |
| TGME49_chrV | 1874807 | 1879170 | + | ID = TGME49_286260; | 3901 |
| | | | | length = 4363 | |
| TGME49_chrVI | 3027874 | 3029432 | + | ID = TGME49_244110; | 3902 |
| | | | | length = 1558 | |
| TGME49_chrIV | 1709601 | 1711557 | − | ID = TGME49_211450; | 3903 |
| | | | | length = 1956 | |
| TGME49_chrXII | 2220861 | 2225036 | + | ID = TGME49_217915; | 3904 |
| | | | | length = 4175 | |
| TGME49_chrXI | 828620 | 830503 | + | ID = TGME49_309820; | 3905 |
| | | | | length = 1883 | |
| TGME49_chrVIII | 5192539 | 5195213 | + | ID = TGME49_270550; | 3906 |
| | | | | length = 2674 | |
| TGME49_chrX | 6927629 | 6929143 | + | ID = TGME49_215370; | 3907 |
| | | | | length = 1514 | |
| TGME49_chrXI | 5224384 | 5226744 | + | ID = TGME49_316300; | 3908 |
| | | | | length = 2360 | |
| TGME49_chrVI | 2959203 | 2963259 | − | ID = TGME49_244010; | 3909 |
| | | | | length = 4056 | |
| TGME49_chrXI | 5774652 | 5776514 | + | ID = TGME49_216950; | 3910 |
| | | | | length = 1862 | |
| TGME49_chrIa | 1804411 | 1808455 | + | ID = TGME49_295360; | 3911 |
| | | | | length = 4044 | |
| TGME49_chrVI | 1021188 | 1023814 | + | ID = TGME49_240050; | 3912 |
| | | | | length = 2626 | |
| TGME49_chrIa | 184672 | 186967 | + | ID = TGME49_293240; | 3913 |
| | | | | length = 2295 | |
| TGME49_chrVIIb | 1578553 | 1580579 | − | ID = TGME49_261690; | 3914 |
| | | | | length = 2026 | |
| TGME49_chrXI | 1557851 | 1562530 | + | ID = TGME49_310740; | 3915 |
| | | | | length = 4679 | |
| TGME49_chrX | 3314815 | 3319616 | − | ID = TGME49_224130; | 3916 |
| | | | | length = 4801 | |
| TGME49_chrXII | 4563657 | 4568429 | + | ID = TGME49_249480; | 3917 |
| | | | | length = 4772 | |
| TGME49_chrIb | 1032466 | 1034841 | + | ID = TGME49_209090; | 3918 |
| | | | | length = 2375 | |
| TGME49_chrVI | 2534155 | 2537835 | − | ID = TGME49_243298; | 3919 |
| | | | | length = 3680 | |
| TGME49_chrX | 3597511 | 3600273 | + | ID = TGME49_223770; | 3920 |
| | | | | length = 2762 | |
| TGME49_chrXII | 2678206 | 2682410 | − | ID = TGME49_246120; | 3921 |
| | | | | length = 4204 | |
| TGME49_chrIX | 4818578 | 4819481 | − | ID = TGME49_210400; | 3922 |
| | | | | length = 903 | |
| TGME49_chrXI | 2316523 | 2321340 | − | ID = TGME49_311840; | 3923 |
| | | | | length = 4817 | |
| TGME49_chrIV | 2420083 | 2421297 | − | ID = TGME49_301370; | 3924 |
| | | | | length = 1214 | |
| TGME49_chrIV | 1822182 | 1826088 | − | ID = TGME49_211340; | 3925 |
| | | | | length = 3906 | |
| TGME49_chrXII | 3764475 | 3766489 | + | ID = TGME49_248260; | 3926 |
| | | | | length = 2014 | |
| TGME49_chrVIII | 1207669 | 1210044 | − | ID = TGME49_231030; | 3927 |
| | | | | length = 2375 | |
| TGME49_chrX | 6868549 | 6871573 | + | ID = TGME49_215280; | 3928 |
| | | | | length = 3024 | |
| TGME49_chrVIIb | 1643729 | 1645825 | + | ID = TGME49_261590; | 3929 |
| | | | | length = 2096 | |
| TGME49_chrXI | 1624852 | 1625815 | − | ID = TGME49_310840; | 3930 |
| | | | | length = 963 | |
| TGME49_chrXII | 269284 | 271834 | − | ID = TGME49_300030; | 3931 |
| | | | | length = 2550 | |
| TGME49_chrIX | 3914323 | 3919217 | + | ID = TGME49_290890; | 3932 |
| | | | | length = 4894 | |
| TGME49_chrVIII | 3498835 | 3500944 | − | ID = TGME49_273460; | 3933 |
| | | | | length = 2109 | |
| TGME49_chrXI | 3267474 | 3271294 | + | ID = TGME49_313322; | 3934 |
| | | | | length = 3820 | |
| TGME49_chrX | 1135303 | 1139273 | − | ID = TGME49_227020; | 3935 |
| | | | | length = 3970 | |
| TGME49_chrVIIa | 2000440 | 2005367 | − | ID = TGME49_204100; | 3936 |
| | | | | length = 4927 | |
| TGME49_chrX | 2136745 | 2141573 | − | ID = TGME49_225590; | 3937 |
| | | | | length = 4828 | |
| TGME49_chrIa | 497577 | 499864 | + | ID = TGME49_293670; | 3938 |
| | | | | length = 2287 | |
| TGME49_chrIX | 2730465 | 2732515 | − | ID = TGME49_288770; | 3939 |
| | | | | length = 2050 | |
| TGME49_chrXI | 6095645 | 6097770 | + | ID = TGME49_216510; | 3940 |
| | | | | length = 2125 | |
| TGME49_chrVIII | 6110637 | 6114023 | − | ID = TGME49_269050; | 3941 |
| | | | | length = 3386 | |
| TGME49_chrV | 2296305 | 2301022 | + | ID = TGME49_285660; | 3942 |
| | | | | length = 4717 | |
| TGME49_chrIb | 1593481 | 1595867 | + | ID = TGME49_209970; | 3943 |
| | | | | length = 2386 | |
| TGME49_chrVIIb | 917523 | 919993 | − | ID = TGME49_262933; | 3944 |
| | | | | length = 2470 | |
| TGME49_chrVIIa | 3567094 | 3568251 | − | ID = TGME49_202170; | 3945 |
| | | | | length = 1157 | |
| TGME49_chrVI | 1302262 | 1303984 | + | ID = TGME49_240520; | 3946 |
| | | | | length = 1722 | |
| TGME49_chrXI | 6376445 | 6376951 | + | ID = TGME49_216150; | 3947 |
| | | | | length = 506 | |
| TGME49_chrIV | 1387512 | 1390320 | − | ID = TGME49_318370; | 3948 |
| | | | | length = 2808 | |
| TGME49_chrVIII | 1248684 | 1250326 | + | ID = TGME49_231125; | 3949 |
| | | | | length = 1642 | |
| TGME49_chrIX | 1805400 | 1807228 | − | ID = TGME49_265080; | 3950 |
| | | | | length = 1828 | |
| TGME49_chrIX | 3677519 | 3678219 | + | ID = TGME49_290280; | 3951 |
| | | | | length = 700 | |
| TGME49_chrII | 1020449 | 1025166 | − | ID = TGME49_222300; | 3952 |
| | | | | length = 4717 | |
| TGME49_chrX | 912303 | 916274 | + | ID = TGME49_227560; | 3953 |
| | | | | length = 3971 | |
| TGME49_chrXI | 5699102 | 5701538 | + | ID = TGME49_217050; | 3954 |
| | | | | length = 2436 | |
| TGME49_chrIX | 211482 | 214977 | + | ID = TGME49_279380; | 3955 |
| | | | | length = 3495 | |
| TGME49_chrVIII | 5960219 | 5963166 | − | ID = TGME49_269260; | 3956 |
| | | | | length = 2947 | |
| TGME49_chrXII | 1341036 | 1345114 | − | ID = TGME49_218740; | 3957 |
| | | | | length = 4078 | |
| TGME49_chrX | 5989380 | 5991089 | − | ID = TGME49_237560; | 3958 |
| | | | | length = 1709 | |
| TGME49_chrIV | 481795 | 483580 | + | ID = TGME49_320120; | 3959 |
| | | | | length = 1785 | |
| TGME49_chrVIII | 3598010 | 3600888 | − | ID = TGME49_273320; | 3960 |
| | | | | length = 2878 | |
| TGME49_chrIX | 3065937 | 3068225 | − | ID = TGME49_289190; | 3961 |
| | | | | length = 2288 | |
| TGME49_chrX | 1873929 | 1876445 | + | ID = TGME49_225990; | 3962 |
| | | | | length = 2516 | |
| TGME49_chrXII | 3889205 | 3891343 | + | ID = TGME49_248500; | 3963 |
| | | | | length = 2138 | |
| TGME49_chrXII | 3445460 | 3446440 | + | ID = TGME49_247620; | 3964 |
| | | | | length = 980 | |
| TGME49_chrX | 713964 | 716364 | + | ID = TGME49_227948; | 3965 |
| | | | | length = 2400 | |
| TGME49_chrX | 7423562 | 7425356 | + | ID = TGME49_207170; | 3966 |
| | | | | length = 1794 | |
| TGME49_chrV | 1716156 | 1718652 | − | ID = TGME49_286710; | 3967 |
| | | | | length = 2496 | |
| TGME49_chrV | 1238094 | 1240156 | − | ID = TGME49_213680; | 3968 |
| | | | | length = 2062 | |
| TGME49_chrIb | 1132036 | 1134997 | + | ID = TGME49_209230; | 3969 |
| | | | | length = 2961 | |
| TGME49_chrX | 5892850 | 5895594 | − | ID = TGME49_237460; | 3970 |
| | | | | length = 2744 | |
| TGME49_chrIX | 1635792 | 1638798 | − | ID = TGME49_265280; | 3971 |
| | | | | length = 3006 | |
| TGME49_chrII | 2193632 | 2198046 | + | ID = TGME49_298020; | 3972 |
| | | | | length = 4414 | |
| TGME49_chrVIIb | 4584305 | 4588201 | + | ID = TGME49_255970; | 3973 |
| | | | | length = 3896 | |
| TGME49_chrXII | 4413869 | 4418183 | − | ID = TGME49_249260; | 3974 |
| | | | | length = 4314 | |
| TGME49_chrXII | 1375295 | 1377205 | − | ID = TGME49_218610; | 3975 |
| | | | | length = 1910 | |
| TGME49_chrII | 2159735 | 2161907 | − | ID = TGME49_297990; | 3976 |
| | | | | length = 2172 | |
| TGME49_chrVI | 3390012 | 3392557 | − | ID = TGME49_244600; | 3977 |
| | | | | length = 2545 | |
| TGME49_chrIX | 2379675 | 2384376 | − | ID = TGME49_288190; | 3978 |
| | | | | length = 4701 | |
| TGME49_chrIX | 5721253 | 5723275 | + | ID = TGME49_306010; | 3979 |
| | | | | length = 2022 | |
| TGME49_chrXI | 1588995 | 1592976 | + | ID = TGME49_310790; | 3980 |
| | | | | length = 3981 | |
| TGME49_chrII | 1526942 | 1530423 | − | ID = TGME49_297090; | 3981 |
| | | | | length = 3481 | |
| TGME49_chrIV | 212060 | 214189 | + | ID = TGME49_320592; | 3982 |
| | | | | length = 2129 | |
| TGME49_chrIX | 302614 | 305702 | − | ID = TGME49_267875; | 3983 |
| | | | | length = 3088 | |
| TGME49_chrX | 6964191 | 6968709 | − | ID = TGME49_215440; | 3984 |
| | | | | length = 4518 | |
| TGME49_chrXI | 3138372 | 3140384 | − | ID = TGME49_313140; | 3985 |
| | | | | length = 2012 | |
| TGME49_chrVIIb | 305794 | 307179 | − | ID = TGME49_263830; | 3986 |
| | | | | length = 1385 | |
| TGME49_chrXII | 249631 | 253074 | − | ID = TGME49_300048; | 3987 |
| | | | | length = 3443 | |
| TGME49_chrVIIb | 4653479 | 4655650 | − | ID = TGME49_255890; | 3988 |
| | | | | length = 2171 | |
| TGME49_chrVIIb | 1873350 | 1875365 | + | ID = TGME49_261075; | 3989 |
| | | | | length = 2015 | |
| TGME49_chrX | 5306045 | 5308393 | + | ID = TGME49_236158; | 3990 |
| | | | | length = 2348 | |
| TGME49_chrIa | 780454 | 781800 | + | ID = TGME49_294285; | 3991 |
| | | | | length = 1346 | |
| TGME49_chrVIIa | 2946359 | 2947823 | + | ID = TGME49_202910; | 3992 |
| | | | | length = 1464 | |
| TGME49_chrXII | 3857367 | 3862038 | − | ID = TGME49_248445; | 3993 |
| | | | | length = 4671 | |
| TGME49_chrIb | 1450314 | 1452140 | + | ID = TGME49_209790; | 3994 |
| | | | | length = 1826 | |
| TGME49_chrXII | 2082658 | 2086018 | + | ID = TGME49_217740; | 3995 |
| | | | | length = 3360 | |
| TGME49_chrVI | 3028353 | 3030855 | − | ID = TGME49_244100; | 3996 |
| | | | | length = 2502 | |
| TGME49_chrXI | 2970744 | 2973324 | + | ID = TGME49_312905; | 3997 |
| | | | | length = 2580 | |
| TGME49_chrIb | 1210143 | 1211342 | − | ID = TGME49_209420; | 3998 |
| | | | | length = 1199 | |
| TGME49_chrVIII | 225120 | 227610 | + | ID = TGME49_229390; | 3999 |
| | | | | length = 2490 | |
| TGME49_chrVIII | 2354860 | 2357994 | − | ID = TGME49_233030; | 4000 |
| | | | | length = 3134 | |
| TGME49_chrVIII | 3259418 | 3261475 | + | ID = TGME49_273790; | 4001 |
| | | | | length = 2057 | |
| TGME49_chrX | 1752272 | 1756039 | + | ID = TGME49_226260; | 4002 |
| | | | | length = 3767 | |
| TGME49_chrXI | 5923228 | 5926772 | + | ID = TGME49_216740; | 4003 |
| | | | | length = 3544 | |
| TGME49_chrVIIb | 4131702 | 4133633 | + | ID = TGME49_257310; | 4004 |
| | | | | length = 1931 | |
| TGME49_chrVIIa | 1169485 | 1173218 | + | ID = TGME49_205750; | 4005 |
| | | | | length = 3733 | |
| TGME49_chrVIIb | 255202 | 259201 | − | ID = TGME49_263990; | 4006 |
| | | | | length = 3999 | |
| TGME49_chrIV | 1230510 | 1233030 | − | ID = TGME49_318560; | 4007 |
| | | | | length = 2520 | |
| TGME49_chrVIIb | 1618717 | 1621489 | − | ID = TGME49_261650; | 4008 |
| | | | | length = 2772 | |
| TGME49_chrV | 3151111 | 3154171 | + | ID = TGME49_283450; | 4009 |
| | | | | length = 3060 | |
| TGME49_chrVIII | 5745993 | 5747995 | + | ID = TGME49_269600; | 4010 |
| | | | | length = 2002 | |
| TGME49_chrVIIb | 1719667 | 1720796 | − | ID = TGME49_261480; | 4011 |
| | | | | length = 1129 | |
| TGME49_chrVIIa | 489530 | 490382 | + | ID = TGME49_280375; | 4012 |
| | | | | length = 852 | |
| TGME49_chrVIII | 3141675 | 3145631 | − | ID = TGME49_273970; | 4013 |
| | | | | length = 3956 | |
| TGME49_chrXI | 5516873 | 5518970 | + | ID = TGME49_316710; | 4014 |
| | | | | length = 2097 | |
| TGME49_chrIa | 1508323 | 1512231 | − | ID = TGME49_295850; | 4015 |
| | | | | length = 3908 | |
| TGME49_chrX | 4338721 | 4343260 | − | ID = TGME49_234400; | 4016 |
| | | | | length = 4539 | |
| TGME49_chrX | 309061 | 312804 | + | ID = TGME49_228430; | 4017 |
| | | | | length = 3743 | |
| TGME49_chrIb | 8721 | 12586 | − | ID = TGME49_207365; | 4018 |
| | | | | length = 3865 | |
| TGME49_chrX | 6251950 | 6254576 | + | ID = TGME49_214340; | 4019 |
| | | | | length = 2626 | |
| TGME49_chrVIII | 739200 | 742279 | − | ID = TGME49_230380; | 4020 |
| | | | | length = 3079 | |
| TGME49_chrX | 1570278 | 1574363 | + | ID = TGME49_226500; | 4021 |
| | | | | length = 4085 | |
| TGME49_chrX | 681974 | 683378 | + | ID = TGME49_227990; | 4022 |
| | | | | length = 1404 | |
| TGME49_chrXI | 6467604 | 6468954 | + | ID = TGME49_216010; | 4023 |
| | | | | length = 1350 | |
| TGME49_chrVIIa | 3933627 | 3938631 | + | ID = TGME49_201250; | 4024 |
| | | | | length = 5004 | |
| TGME49_chrVIIa | 3007574 | 3010494 | − | ID = TGME49_202830; | 4025 |
| | | | | length = 2920 | |
| TGME49_chrX | 3256800 | 3258378 | − | ID = TGME49_224200; | 4026 |
| | | | | length = 1578 | |
| TGME49_chrXI | 4639183 | 4641514 | − | ID = TGME49_315300; | 4027 |
| | | | | length = 2331 | |
| TGME49_chrVI | 1947456 | 1949773 | + | ID = TGME49_242300; | 4028 |
| | | | | length = 2317 | |
| TGME49_chrXII | 4726342 | 4728931 | + | ID = TGME49_249680; | 4029 |
| | | | | length = 2589 | |
| TGME49_chrVIIb | 2488617 | 2490012 | − | ID = TGME49_260170; | 4030 |
| | | | | length = 1395 | |

Table 1. Provided are non-limiting examples of endogenous promoters which can be used along with the construct(s) of some embodiments of the invention. The predicted promoter sequences were obtained based on histone marks data around the genes.

[0153] Table 2 lists suitable constitutive and inducible promoters which can be cloned into the nucleic acid construct of some embodiments of the invention.

TABLE 2
constitutive and inducible promoters

| | | promoter |
|---|---|---|
| promoter name | mode | SEQ ID NO: |
| 5RT70 | constitutive promoter | 4031 |
| DHFR | constitutive promoter | 4032 |
| MIC2 | constitutive promoter | 4033 |
| MIC8 | constitutive promoter | 4034 |
| SAG1 | constitutive promoter | 4035 |
| TetO7SAG1 | inducible promoter | 4036 |
| TetO7SAG4 | inducible promoter | 4037 |
| TUB1 | constitutive promoter | 4038 |
| TUB8 | constitutive promoter | 4039 |

Table 2.

[0154] As mentioned, the heterologous polynucleotide comprising a first nucleic acid sequence encoding a Toxoplasma secreted protein.

[0155] As used herein the phrase “Toxoplasma secreted protein” refers to at least a functional fragment (amino acid sequence) of a Toxoplasma polypeptide which is sufficient in order to be secreted to a host cell when infected in-vitro by the Toxoplasma.

[0156] According to some embodiments of the invention, the Toxoplasma secreted protein or the functional fragment thereof is capable of being secreted to a host cell when infected in-vivo by the Toxoplasma.

[0157] According to some embodiments of the invention, the first nucleic acid sequence encoding a functional fragment of the Toxoplasma secreted protein.

[0158] According to some embodiments of the invention, the first nucleic acid sequence encoding the full-length open reading frame (ORF) of the Toxoplasma secreted protein.

[0159] According to some embodiments of the invention, the Toxoplasma secreted protein is secreted from a rhoptry of the Toxoplasma.

[0160] According to some embodiments of the invention, the Toxoplasma secreted protein which is secreted from the rhoptry comprises Toxofilin and/or ROP1.

[0161] According to some embodiments of the invention, the Toxoplasma secreted protein which is secreted from the rhoptry comprises the amino acid sequence selected from the group consisting of SEQ ID NOs:344-465.

[0162] According to some embodiments of the invention, the Toxoplasma secreted protein is a non-rhoptry protein.

[0163] According to some embodiments of the invention, the Toxoplasma secreted protein is selected from the group consisting of a microneme protein and a dense granule protein.

[0164] According to some embodiments of the invention, the Toxoplasma secreted protein is secreted from a dense granule of the Toxoplasma.

[0165] According to some embodiments of the invention, the Toxoplasma secreted protein which is secreted from the dense granule comprises a GRA16, and/or GRA24.

[0166] According to some embodiments of the invention, the Toxoplasma secreted protein is secreted from a microneme of the Toxoplasma.

[0167] According to some embodiments of the invention, the protein secreted from the microneme comprises the amino acid sequence selected from the group consisting of SEQ ID NOs:280-322.

[0168] According to some embodiments of the invention, the protein secreted from the dense granule comprises the amino acid sequence selected from the group consisting of SEQ ID NOs:234-279.

[0169] According to some embodiments of the invention, the Toxoplasma secreted protein comprises Toxoplasma gondii macrophage migration inhibitory factor (TgMIF).

[0170] Table 3 below lists Toxoplasma-secreted proteins which can be cloned into the nucleic acid construct of some embodiments of the invention, organized according to the organelle to which the protein is localized or predicted to be localized to.

TABLE 3
Toxoplasma proteins

| | | | | Polyn. | Polyp. |
|---|---|---|---|---|---|
| | | | | SEQ | SEQ |
| Gene ID | Gene Product Description | Organism | organelle | ID | ID |
| TGME49_289620 | cathepsin CPC1 (CPC1) | T. gondii | Dense | 1 | 234 |
| | | ME49 | Granules | | |
| TGME49_276130 | cathepsin CPC2 (CPC2) | T. gondii | Dense | 2 | 235 |
| | | ME49 | Granules | | |
| TGME49_268900 | dense granular protein GRA10 | T. gondii | Dense | 3 | 236 |
| | (GRA10) | ME49 | Granules | | |
| TGME49_297880 | dense granule protein DG32 | T. gondii | Dense | 4 | 237 |
| | | ME49 | Granules | | |
| TGME49_270250 | dense granule protein GRA1 | T. gondii | Dense | 5 | 238 |
| | (GRA1) | ME49 | Granules | | |
| TGME49_212410 | dense granule protein GRA11 | T. gondii | Dense | 6 | 239 |
| | | ME49 | Granules | | |
| TGME49_237800 | dense granule protein GRA11 | T. gondii | Dense | 7 | 240 |
| | | ME49 | Granules | | |
| TGME49_275850 | dense granule protein GRA12 | T. gondii | Dense | 8 | 241 |
| | (GRA12) | ME49 | Granules | | |
| TGME49_288650 | dense granule protein GRA12 | T. gondii | Dense | 9 | 242 |
| | (GRA12) | ME49 | Granules | | |
| TGME49_239740 | dense granule protein GRA14 | T. gondii | Dense | 10 | 243 |
| | (GRA14) | ME49 | Granules | | |
| TGME49_275470 | dense granule protein GRA15 | T. gondii | Dense | 11 | 244 |
| | (GRA15) | ME49 | Granules | | |
| TGME49_227620 | dense granule protein GRA2 | T. gondii | Dense | 12 | 245 |
| | (GRA2) | ME49 | Granules | | |
| TGME49_227280 | dense granule protein GRA3 | T. gondii | Dense | 13 | 246 |
| | (GRA3) | ME49 | Granules | | |
| TGME49_310780 | dense granule protein GRA4 | T. gondii | Dense | 14 | 247 |
| | (GRA4) | ME49 | Granules | | |
| TGME49_286450 | dense granule protein GRA5 | T. gondii | Dense | 15 | 248 |
| | (GRA5) | ME49 | Granules | | |
| TGME49_275440 | dense granule protein GRA6 | T. gondii | Dense | 16 | 249 |
| | (GRA6) | ME49 | Granules | | |
| TGME49_203310 | dense granule protein GRA7 | T. gondii | Dense | 17 | 250 |
| | (GRA7) | ME49 | Granules | | |
| TGME49_254720 | dense granule protein GRA8 | T. gondii | Dense | 18 | 251 |
| | (GRA8) | ME49 | Granules | | |
| TGME49_251540 | dense granule protein GRA9 | T. gondii | Dense | 19 | 252 |
| | (GRA9) | ME49 | Granules | | |
| TGME49_222170 | dense-granule antigen DG32 | T. gondii | Dense | 20 | 253 |
| | | ME49 | Granules | | |
| TGME49_208830 | GRA16 | T. gondii | Dense | 21 | 254 |
| | | ME49 | Granules | | |
| TGME49_200010 | GRA20 | T. gondii | Dense | 22 | 255 |
| | | ME49 | Granules | | |
| TGME49_241610 | GRA21 | T. gondii | Dense | 23 | 256 |
| | | ME49 | Granules | | |
| TGME49_230180 | GRA24 | T. gondii | Dense | 24 | 257 |
| | | ME49 | Granules | | |
| TGME49_290700 | GRA25 | T. gondii | Dense | 25 | 258 |
| | | ME49 | Granules | | |
| TGME49_231960 | GRA28 | T. gondii | Dense | 26 | 259 |
| | | ME49 | Granules | | |
| TGME49_269690 | GRA29 | T. gondii | Dense | 27 | 260 |
| | | ME49 | Granules | | |
| TGME49_232000 | GRA30 | T. gondii | Dense | 28 | 261 |
| | | ME49 | Granules | | |
| TGME49_220240 | GRA31 | T. gondii | Dense | 29 | 262 |
| | | ME49 | Granules | | |
| TGME49_212300 | GRA32 | T. gondii | Dense | 30 | 263 |
| | | ME49 | Granules | | |
| TGME49_247440 | GRA33 | T. gondii | Dense | 31 | 264 |
| | | ME49 | Granules | | |
| TGME49_226380 | GRA35 | T. gondii | Dense | 32 | 265 |
| | | ME49 | Granules | | |
| TGME49_213067 | GRA36 | T. gondii | Dense | 33 | 266 |
| | | ME49 | Granules | | |
| TGME49_236890 | GRA37 | T. gondii | Dense | 34 | 267 |
| | | ME49 | Granules | | |
| TGME49_312420 | GRA38 | T. gondii | Dense | 35 | 268 |
| | | ME49 | Granules | | |
| TGME49_289380 | GRA39 | T. gondii | Dense | 36 | 269 |
| | | ME49 | Granules | | |
| TGME49_219810 | GRA40 | T. gondii | Dense | 37 | 270 |
| | | ME49 | Granules | | |
| TGME49_200360 | hypothetical protein | T. gondii | Dense | 38 | 271 |
| | | ME49 | Granules | | |
| TGME49_203290 | hypothetical protein | T. gondii | Dense | 39 | 272 |
| | | ME49 | Granules | | |
| TGME49_310790 | hypothetical protein | T. gondii | Dense | 40 | 273 |
| | | ME49 | Granules | | |
| TGME49_277240 | NTPase I | T. gondii | Dense | 41 | 274 |
| | | ME49 | Granules | | |
| TGME49_277270 | NTPase II | T. gondii | Dense | 42 | 275 |
| | | ME49 | Granules | | |
| TGME49_217430 | protease inhibitor PI1 (PI1) | T. gondii | Dense | 43 | 276 |
| | | ME49 | Granules | | |
| TGME49_208450 | protease inhibitor PI2 (PI2) | T. gondii | Dense | 44 | 277 |
| | | ME49 | Granules | | |
| TGGT1_411330 | putative dense granule protein | T. gondii | Dense | 45 | 278 |
| | GRA11 | GT1 | Granules | | |
| TGME49_275860 | putative dense granule protein | T. gondii | Dense | 46 | 279 |
| | GRA12 | VEG | Granules | | |
| TGME49_261710 | ankyrin repeat-containing protein | T. gondii | Micronemes | 47 | 280 |
| | | ME49 | | | |
| TGME49_300130 | apical membrane antigen 1 domain- | T. gondii | Micronemes | 48 | 281 |
| | containing protein | ME49 | | | |
| TGME49_255260 | apical membrane antigen AMA1 | T. gondii | Micronemes | 49 | 282 |
| | | ME49 | | | |
| TGME49_293770 | chitinase-like protein CLP1 (CLP1) | T. gondii | Micronemes | 50 | 283 |
| | | ME49 | | | |
| TGME49_204340 | GRA34 | T. gondii | Micronemes | 51 | 284 |
| | | ME49 | | | |
| TGME49_221480 | hypothetical protein | T. gondii | Micronemes | 52 | 285 |
| | | ME49 | | | |
| TGME49_289100 | MIC18 | T. gondii | Micronemes | 53 | 286 |
| | | ME49 | | | |
| TGME49_294790 | MIC19 | T. gondii | Micronemes | 54 | 287 |
| | | ME49 | | | |
| TGME49_214940 | MIC2-associated protein M2AP | T. gondii | Micronemes | 55 | 288 |
| | | ME49 | | | |
| TGME49_283540 | MIC20 | T. gondii | Micronemes | 56 | 289 |
| | | ME49 | | | |
| TGME49_291890 | microneme protein MIC1 (MIC1) | T. gondii | Micronemes | 57 | 290 |
| | | ME49 | | | |
| TGME49_250710 | microneme protein MIC10 (MIC10) | T. gondii | Micronemes | 58 | 291 |
| | | ME49 | | | |
| TGME49_204530 | microneme protein MIC11 (MIC11) | T. gondii | Micronemes | 59 | 292 |
| | | ME49 | | | |
| TGME49_267680 | microneme protein MIC12 (MIC12) | T. gondii | Micronemes | 60 | 293 |
| | | ME49 | | | |
| TGME49_260190 | microneme protein MIC13 (MIC13) | T. gondii | Micronemes | 61 | 294 |
| | | ME49 | | | |
| TGME49_218310 | microneme protein MIC14 (MIC14) | T. gondii | Micronemes | 62 | 295 |
| | | ME49 | | | |
| TGME49_247195 | microneme protein MIC15 (MIC15) | T. gondii | Micronemes | 63 | 296 |
| | | ME49 | | | |
| TGME49_289630 | microneme protein MIC16 (MIC16) | T. gondii | Micronemes | 64 | 297 |
| | | ME49 | | | |
| TGME49_200250 | microneme protein MIC17A | T. gondii | Micronemes | 65 | 298 |
| | (MIC17A) | ME49 | | | |
| TGME49_200240 | microneme protein MIC17B | T. gondii | Micronemes | 66 | 299 |
| | (MIC17B) | ME49 | | | |
| TGME49_200230 | microneme protein MIC17C | T. gondii | Micronemes | 67 | 300 |
| | (MIC17C) | ME49 | | | |
| TGME49_201780 | microneme protein MIC2 (MIC2) | T. gondii | Micronemes | 68 | 301 |
| | | ME49 | | | |
| TGME49_319560 | microneme protein MIC3 (MIC3) | T. gondii | Micronemes | 69 | 302 |
| | | ME49 | | | |
| TGME49_208030 | microneme protein MIC4 (MIC4) | T. gondii | Micronemes | 70 | 303 |
| | | ME49 | | | |
| TGME49_277080 | microneme protein MIC5 (MIC5) | T. gondii | Micronemes | 71 | 304 |
| | | ME49 | | | |
| TGME49_218520 | microneme protein MIC6 (MIC6) | T. gondii | Micronemes | 72 | 305 |
| | | ME49 | | | |
| TGME49_261780 | microneme protein MIC7 (MIC7) | T. gondii | Micronemes | 73 | 306 |
| | | ME49 | | | |
| TGME49_245490 | microneme protein MIC8 (MIC8) | T. gondii | Micronemes | 74 | 307 |
| | | ME49 | | | |
| TGME49_245485 | microneme protein MIC9 (MIC9) | T. gondii | Micronemes | 75 | 308 |
| | | ME49 | | | |
| TGME49_208730 | microneme protein, putative | T. gondii | Micronemes | 76 | 309 |
| | | ME49 | | | |
| TGME49_208740 | microneme protein, putative | T. gondii | Micronemes | 77 | 310 |
| | | ME49 | | | |
| TGME49_254430 | microneme protein, putative | T. gondii | Micronemes | 78 | 311 |
| | | ME49 | | | |
| TGME49_275798 | microneme protein, putative | T. gondii | Micronemes | 79 | 312 |
| | | ME49 | | | |
| TGME49_244180 | microneme-like protein | T. gondii | Micronemes | 80 | 313 |
| | | ME49 | | | |
| TGME49_286740 | microneme-like protein | T. gondii | Micronemes | 81 | 314 |
| | | ME49 | | | |
| TGME49_200270 | PAN/Apple domain-containing | T. gondii | Micronemes | 82 | 315 |
| | protein | ME49 | | | |
| TGME49_286150 | PAN/Apple domain-containing | T. gondii | Micronemes | 83 | 316 |
| | protein | ME49 | | | |
| TGME49_204130 | perforin-like protein PLP1 (PLP1) | T. gondii | Micronemes | 84 | 317 |
| | | ME49 | | | |
| TGVEG_439620 | putative microneme protein | T. gondii | Micronemes | 85 | 318 |
| | | VEG | | | |
| TGME49_200290 | rhomboid protease R0M1 (ROM1) | T. gondii | Micronemes | 86 | 319 |
| | | ME49 | | | |
| TGME49_293900 | sporozoite protein with an altered | T. gondii | Micronemes | 87 | 320 |
| | thrombospondin repeat SPATR | ME49 | | | |
| TGME49_204050 | subtilisin SUB1 (SUB1) | T. gondii | Micronemes | 88 | 321 |
| | | ME49 | | | |
| TGME49_206510 | toxolysin TLN4 (TLN4) | T. gondii | Micronemes | 89 | 322 |
| | | ME49 | | | |
| TGME49_209030 | actin ACT1 (ACT1) | T. gondii | Other | 90 | 323 |
| | | ME49 | | | |
| TGME49_214290 | DJ-1 family protein | T. gondii | Other | 91 | 324 |
| | | ME49 | | | |
| TGME49_268850 | enolase 2 | T. gondii | Other | 92 | 325 |
| | | ME49 | | | |
| TGME49_236040 | fructose-1,6-bisphosphate aldolase | T. gondii | Other | 93 | 326 |
| | | ME49 | | | |
| TGME49_289690 | glyceraldehyde-3-phosphate | T. gondii | Other | 94 | 327 |
| | dehydrogenase GAPDH1 | ME49 | | | |
| | (GAPDH1) | | | | |
| TGME49_290040 | macrophage migration inhibitory | T. gondii | Other | 95 | 328 |
| | factor, putative | ME49 | | | |
| TGME49_211680 | protein disulfide isomerase | T. gondii | Other | 96 | 329 |
| | | ME49 | | | |
| TGME49_273610 | Secretory phospholipase A2 | T. gondii | Other | 97 | 330 |
| | | ME49 | | | |
| TGME49_273620 | Secretory phospholipase A2 | T. gondii | Other | 98 | 331 |
| | | GT1 | | | |
| TGME49_271570 | Toxoplasma gondii family D protein | T. gondii | Other | 99 | 332 |
| | | ME49 | | | |
| TGME49_205470 | translation elongation factor 2 | T. gondii | Other | 100 | 333 |
| | family protein, putative | ME49 | | | |
| TGME49_288360 | tryptophanyl-tRNA synthetase | T. gondii | Other | 101 | 334 |
| | (TrpRS2) | ME49 | | | |
| TGME49_208590 | vacuolar ATP synthase subunit | T. gondii | Other | 102 | 335 |
| | 54kD, putative | ME49 | | | |
| TGME49_256970 | vacuolar ATP synthase subunit A, | T. gondii | Other | 103 | 336 |
| | putative | ME49 | | | |
| TGME49_219800 | vacuolar ATP synthase subunit b, | T. gondii | Other | 104 | 337 |
| | putative | ME49 | | | |
| TGME49_315620 | vacuolar ATP synthase subunit C, | T. gondii | Other | 105 | 338 |
| | putative | ME49 | | | |
| TGME49_259010 | vacuolar ATP synthase subunit d, | T. gondii | Other | 106 | 339 |
| | putative | ME49 | | | |
| TGME49_305290 | vacuolar atp synthase subunit e, | T. gondii | Other | 107 | 340 |
| | putative | ME49 | | | |
| TGME49_310960 | vacuolar atp synthase subunit f, | T. gondii | Other | 108 | 341 |
| | putative | ME49 | | | |
| TGME49_246560 | vacuolar ATP synthase subunit g, | T. gondii | Other | 109 | 342 |
| | putative | ME49 | | | |
| TGME49_212310 | vacuolar ATP synthetase | T. gondii | Other | 110 | 343 |
| | | ME49 | | | |
| TGME49_314250 | bradyzoite rhoptry protein BRP1 | T. gondii | Rhoptries | 111 | 344 |
| | (BRP1) | ME49 | | | |
| TGME49_209985 | cAMP-dependent protein kinase | T. gondii | Rhoptries | 112 | 345 |
| | | ME49 | | | |
| TGME49_249670 | cathepsin B | T. gondii | Rhoptries | 113 | 346 |
| | | ME49 | | | |
| TGME49_252200 | cell cycle regulator with zn-finger | T. gondii | Rhoptries | 114 | 347 |
| | domain-containing protein | ME49 | | | |
| TGME49_210095 | hypothetical protein | T. gondii | Rhoptries | 115 | 348 |
| | | ME49 | | | |
| TGME49_296015 | hypothetical protein | T. gondii | Rhoptries | 116 | 349 |
| | | ME49 | | | |
| TGME49_297070 | hypothetical protein | T. gondii | Rhoptries | 117 | 350 |
| | | ME49 | | | |
| TGME49_311320 | hypothetical protein | T. gondii | Rhoptries | 118 | 351 |
| | | ME49 | | | |
| TGME49_321700 | hypothetical protein | T. gondii | Rhoptries | 119 | 352 |
| | | ME49 | | | |
| TGME49_321710 | hypothetical protein | T. gondii | Rhoptries | 120 | 353 |
| | | ME49 | | | |
| TGME49_322120 | hypothetical protein | T. gondii | Rhoptries | 121 | 354 |
| | | ME49 | | | |
| TGME49_323320 | hypothetical protein | T. gondii | Rhoptries | 122 | 355 |
| | | ME49 | | | |
| TGGT1_410610 | hypothetical protein | T. gondii | Rhoptries | 123 | 356 |
| | | GT1 | | | |
| TGME49_242118 | myosin-light-chain kinase | T. gondii | Rhoptries | 124 | 357 |
| | | ME49 | | | |
| TGME49_322000 | myosin-light-chain kinase | T. gondii | Rhoptries | 125 | 358 |
| | | ME49 | | | |
| TGME49_322010 | myosin-light-chain kinase | T. gondii | Rhoptries | 126 | 359 |
| | | ME49 | | | |
| TGME49_322100 | myosin-light-chain kinase | T. gondii | Rhoptries | 127 | 360 |
| | | ME49 | | | |
| TGME49_323300 | myosin-light-chain kinase | T. gondii | Rhoptries | 128 | 361 |
| | | ME49 | | | |
| TGME49_252500 | polo kinase | T. gondii | Rhoptries | 129 | 362 |
| | | ME49 | | | |
| TGME49_258225 | Predicted rhoptry protein kinase | T. gondii | Rhoptries | 130 | 363 |
| | (ROPK) | GT1 | | | |
| TGME49_234950 | protein kinase (incomplete catalytic | T. gondii | Rhoptries | 131 | 364 |
| | triad) | ME49 | | | |
| TGME49_274170 | protein kinase (incomplete catalytic | T. gondii | Rhoptries | 132 | 365 |
| | triad) | ME49 | | | |
| TGME49_281675 | protein kinase, putative | T. gondii | Rhoptries | 133 | 366 |
| | | ME49 | | | |
| TGME49_270320 | protein phosphatase 2C domain- | T. gondii | Rhoptries | 134 | 367 |
| | containing protein | ME49 | | | |
| TGME49_282055 | protein phosphatase PP2C-hn | T. gondii | Rhoptries | 135 | 368 |
| | (PP2CHN) | ME49 | | | |
| TGVEG_281675A | putative protein kinase | T. gondii | Rhoptries | 136 | 369 |
| | | VEG | | | |
| TGVEG_281675B | putative protein kinase | T. gondii | Rhoptries | 137 | 370 |
| | | VEG | | | |
| TGME49_289680 | Ras-related protein Rab11 | T. gondii | Rhoptries | 138 | 371 |
| | | ME49 | | | |
| TGGT1_411350 | rhoptry kinase family (incomplete | T. gondii | Rhoptries | 139 | 372 |
| | catalytic triad) protein | GT1 | | | |
| TGGT1_409600 | rhoptry kinase family protein | T. gondii | Rhoptries | 140 | 373 |
| | | GT1 | | | |
| TGGT1_411360 | rhoptry kinase family protein | T. gondii | Rhoptries | 141 | 374 |
| | | GT1 | | | |
| TGVEG_440850 | rhoptry kinase family protein | T. gondii | Rhoptries | 142 | 375 |
| | | VEG | | | |
| TGVEG_440860 | rhoptry kinase family protein | T. gondii | Rhoptries | 143 | 376 |
| | | VEG | | | |
| TGVEG_442710 | rhoptry kinase family protein | T. gondii | Rhoptries | 144 | 377 |
| | | VEG | | | |
| TGME49_308093 | rhoptry kinase family protein | T. gondii | Rhoptries | 145 | 378 |
| | (incomplete catalytic triad) | ME49 | | | |
| TGME49_308096 | rhoptry kinase family protein | T. gondii | Rhoptries | 146 | 379 |
| | (incomplete catalytic triad) | ME49 | | | |
| TGME49_227810 | rhoptry kinase family protein | T. gondii | Rhoptries | 147 | 380 |
| | ROP11 (incomplete catalytic triad) | ME49 | | | |
| | (ROP11) | | | | |
| TGME49_242240 | rhoptry kinase family protein | T. gondii | Rhoptries | 148 | 381 |
| | ROP19A (ROP19A) | ME49 | | | |
| TGME49_242250 | rhoptry kinase family protein | T. gondii | Rhoptries | 149 | 382 |
| | ROP19B (ROP19B) | ME49 | | | |
| TGME49_258230 | rhoptry kinase family protein | T. gondii | Rhoptries | 150 | 383 |
| | ROP20 (ROP20) | ME49 | | | |
| TGME49_263220 | rhoptry kinase family protein | T. gondii | Rhoptries | 151 | 384 |
| | ROP21 (ROP21) | ME49 | | | |
| TGME49_207700 | rhoptry kinase family protein | T. gondii | Rhoptries | 152 | 385 |
| | ROP22 (incomplete catalytic triad) | ME49 | | | |
| | (ROP22) | | | | |
| TGME49_239600 | rhoptry kinase family protein | T. gondii | Rhoptries | 153 | 386 |
| | ROP23 (incomplete catalytic triad) | ME49 | | | |
| | (ROP23) | | | | |
| TGME49_252360 | rhoptry kinase family protein | T. gondii | Rhoptries | 154 | 387 |
| | ROP24 (incomplete catalytic triad) | ME49 | | | |
| | (ROP24) | | | | |
| TGME49_202780 | rhoptry kinase family protein | T. gondii | Rhoptries | 155 | 388 |
| | ROP25 (ROP25) | ME49 | | | |
| TGME49_211260 | rhoptry kinase family protein | T. gondii | Rhoptries | 156 | 389 |
| | ROP26 (incomplete catalytic triad) | ME49 | | | |
| | (ROP26) | | | | |
| TGME49_313330 | rhoptry kinase family protein | T. gondii | Rhoptries | 157 | 390 |
| | ROP27 (ROP27) | ME49 | | | |
| TGME49_258370 | rhoptry kinase family protein | T. gondii | Rhoptries | 158 | 391 |
| | ROP28 (ROP28) | ME49 | | | |
| TGME49_242230 | rhoptry kinase family protein | T. gondii | Rhoptries | 159 | 392 |
| | ROP29 (ROP29) | ME49 | | | |
| TGME49_227010 | rhoptry kinase family protein | T. gondii | Rhoptries | 160 | 393 |
| | ROP30 (ROP30) | ME49 | | | |
| TGME49_258800 | rhoptry kinase family protein | T. gondii | Rhoptries | 161 | 394 |
| | ROP31 (ROP31) | ME49 | | | |
| TGME49_270920 | rhoptry kinase family protein | T. gondii | Rhoptries | 162 | 395 |
| | ROP32 (ROP32) | ME49 | | | |
| TGME49_201130 | rhoptry kinase family protein | T. gondii | Rhoptries | 163 | 396 |
| | ROP33 (ROP33) | ME49 | | | |
| TGME49_240090 | rhoptry kinase family protein | T. gondii | Rhoptries | 164 | 397 |
| | ROP34, putative | ME49 | | | |
| TGME49_304740 | rhoptry kinase family protein | T. gondii | Rhoptries | 165 | 398 |
| | ROP35 (ROP35) | ME49 | | | |
| TGME49_207610 | rhoptry kinase family protein | T. gondii | Rhoptries | 166 | 399 |
| | ROP36 (incomplete catalytic triad) | ME49 | | | |
| | (ROP36) | | | | |
| TGME49_294560 | rhoptry kinase family protein | T. gondii | Rhoptries | 167 | 400 |
| | ROP37 (incomplete catalytic triad) | ME49 | | | |
| | (ROP37) | | | | |
| TGME49_242110 | rhoptry kinase family protein | T. gondii | Rhoptries | 168 | 401 |
| | ROP38 (ROP38) | ME49 | | | |
| TGME49_262050 | rhoptry kinase family protein | T. gondii | Rhoptries | 169 | 402 |
| | ROP39 (ROP39) | ME49 | | | |
| TGME49_291960 | rhoptry kinase family protein | T. gondii | Rhoptries | 170 | 403 |
| | ROP40 (incomplete catalytic triad) | ME49 | | | |
| | (ROP40) | | | | |
| TGME49_266100 | rhoptry kinase family protein | T. gondii | Rhoptries | 171 | 404 |
| | ROP41 (ROP41) | ME49 | | | |
| TGME49_230470 | rhoptry kinase family protein | T. gondii | Rhoptries | 172 | 405 |
| | ROP46, putative | ME49 | | | |
| TGME49_249470 | Rhoptry kinase family protein, | T. gondii | Rhoptries | 173 | 406 |
| | truncated (incomplete catalytic | ME49 | | | |
| | triad) | | | | |
| TGME49_253330 | Rhoptry kinase family protein, | T. gondii | Rhoptries | 174 | 407 |
| | truncated (incomplete catalytic | ME49 | | | |
| | triad) | | | | |
| TGVEG_322130 | rhoptry kinase family ROP19B | T. gondii | Rhoptries | 175 | 408 |
| | | VEG | | | |
| TGVEG_269885A | rhoptry metalloprotease toxolysin | T. gondii | Rhoptries | 176 | 409 |
| | TLN1 | VEG | | | |
| TGVEG_269885B | rhoptry metalloprotease toxolysin | T. gondii | Rhoptries | 177 | 410 |
| | TLN1 | VEG | | | |
| TGME49_269885 | rhoptry metalloprotease toxolysin | T. gondii | Rhoptries | 178 | 411 |
| | TLN1 (TLN1) | ME49 | | | |
| TGVEG_310010A | rhoptry neck protein RON1 | T. gondii | Rhoptries | 179 | 412 |
| | | VEG | | | |
| TGVEG_310010B | rhoptry neck protein RON1 | T. gondii | Rhoptries | 180 | 413 |
| | | VEG | | | |
| TGME49_310010 | rhoptry neck protein RON1 (RON1) | T. gondii | Rhoptries | 181 | 414 |
| | | ME49 | | | |
| TGME49_261750 | rhoptry neck protein RON10 | T. gondii | Rhoptries | 182 | 415 |
| | (RON10) | ME49 | | | |
| TGME49_300100 | rhoptry neck protein RON2 (RON2) | T. gondii | Rhoptries | 183 | 416 |
| | | ME49 | | | |
| TGME49_223920 | rhoptry neck protein RON3 (RON3) | T. gondii | Rhoptries | 184 | 417 |
| | | ME49 | | | |
| TGME49_229010 | rhoptry neck protein RON4 (RON4) | T. gondii | Rhoptries | 185 | 418 |
| | | ME49 | | | |
| TGME49_311470 | rhoptry neck protein RON5 (RON5) | T. gondii | Rhoptries | 186 | 419 |
| | | ME49 | | | |
| TGVEG_2 | rhoptry neck protein RON6 | T. gondii | Rhoptries | 187 | 420 |
| 97960A | | VEG | | | |
| TGVEG_2 | rhoptry neck protein RON6 | T. gondii | Rhoptries | 188 | 421 |
| 97960B | | VEG | | | |
| TGME49_297960 | rhoptry neck protein RON6 (RON6) | T. gondii | Rhoptries | 189 | 422 |
| | | ME49 | | | |
| TGME49_306060 | rhoptry neck protein RON8 (RON8) | T. gondii | Rhoptries | 190 | 423 |
| | | ME49 | | | |
| TGVEG_3 | rhoptry neck protein RON9 | T. gondii | Rhoptries | 191 | 424 |
| 08810A | | VEG | | | |
| TGVEG_3 | rhoptry neck protein RON9 | T. gondii | Rhoptries | 192 | 425 |
| 08810B | | VEG | | | |
| TGME49_308810 | rhoptry neck protein RON9 (RON9) | T. gondii | Rhoptries | 193 | 426 |
| | | ME49 | | | |
| TGME49_265120 | rhoptry neck protein, putative | T. gondii | Rhoptries | 194 | 427 |
| | | ME49 | | | |
| TGME49_327200 | rhoptry neck protein, putative | T. gondii | Rhoptries | 195 | 428 |
| | | ME49 | | | |
| TGME49_309590 | rhoptry protein ROP1 (ROP1) | T. gondii | Rhoptries | 196 | 429 |
| | | ME49 | | | |
| TGME49_315490 | rhoptry protein ROP10 (ROP10) | T. gondii | Rhoptries | 197 | 430 |
| | | ME49 | | | |
| TGME49_203990 | rhoptry protein ROP12 (ROP12) | T. gondii | Rhoptries | 198 | 431 |
| | | ME49 | | | |
| TGME49_312270 | rhoptry protein ROP13 (ROP13) | T. gondii | Rhoptries | 199 | 432 |
| | | ME49 | | | |
| TGME49_315220 | rhoptry protein ROP14 (ROP14) | T. gondii | Rhoptries | 200 | 433 |
| | | ME49 | | | |
| TGME49_211290 | rhoptry protein ROP15 (ROP15) | T. gondii | Rhoptries | 201 | 434 |
| | | ME49 | | | |
| TGME49_262730 | rhoptry protein ROP16 (ROP16) | T. gondii | Rhoptries | 202 | 435 |
| | | ME49 | | | |
| TGME49_258580 | rhoptry protein ROP17 (ROP17) | T. gondii | Rhoptries | 203 | 436 |
| | | ME49 | | | |
| TGME49_205250 | rhoptry protein ROP18 (ROP18) | T. gondii | Rhoptries | 204 | 437 |
| | | ME49 | | | |
| TGME49_215785 | rhoptry protein ROP2A (ROP2A) | T. gondii | Rhoptries | 205 | 438 |
| | | ME49 | | | |
| TGME49_295125 | rhoptry protein ROP4 (ROP4) | T. gondii | Rhoptries | 206 | 439 |
| | | ME49 | | | |
| TGGT1_411430 | rhoptry protein ROP5 | T. gondii | Rhoptries | 207 | 440 |
| | | GT1 | | | |
| TGVEG_442220 | rhoptry protein ROP5 | T. gondii | Rhoptries | 208 | 441 |
| | | VEG | | | |
| TGME49_308090 | rhoptry protein ROP5 (ROP5) | T. gondii | Rhoptries | 209 | 442 |
| | | ME49 | | | |
| TGME49_258660 | rhoptry protein ROP6 (ROP6) | T. gondii | Rhoptries | 210 | 443 |
| | | ME49 | | | |
| TGGT1_365080 | rhoptry protein ROP7 | T. gondii | Rhoptries | 211 | 444 |
| | | GT1 | | | |
| TGME49_295110 | rhoptry protein ROP7 (ROP7) | T. gondii | Rhoptries | 212 | 445 |
| | | ME49 | | | |
| TGVEG_363030 | rhoptry protein ROP8 | T. gondii | Rhoptries | 213 | 446 |
| | | VEG | | | |
| TGME49_215775 | rhoptry protein ROP8 (ROP8) | T. gondii | Rhoptries | 214 | 447 |
| | | ME49 | | | |
| TGME49_243730 | rhoptry protein ROP9 (ROP9) | T. gondii | Rhoptries | 215 | 448 |
| | | ME49 | | | |
| TGME49_295105 | rhoptry protein, putative | T. gondii | Rhoptries | 216 | 449 |
| | | ME49 | | | |
| TGME49_315210 | rhoptry protein, putative | T. gondii | Rhoptries | 217 | 450 |
| | | ME49 | | | |
| TGME49_315940 | rhoptry protein, putative | T. gondii | Rhoptries | 218 | 451 |
| | | ME49 | | | |
| TGME49_230350 | RON11 | T. gondii | Rhoptries | 219 | 452 |
| | | ME49 | | | |
| TGME49_232020 | RON12 | T. gondii | Rhoptries | 220 | 453 |
| | | ME49 | | | |
| TGME49_294400 | RON2L1 | T. gondii | Rhoptries | 221 | 454 |
| | | ME49 | | | |
| TGME49_296020 | ROP2L11 | T. gondii | Rhoptries | 222 | 455 |
| | | VEG | | | |
| TGME49_296000 | ROP2L12 | T. gondii | Rhoptries | 223 | 456 |
| | | ME49 | | | |
| TGME49_242100 | ROP38 | T. gondii | Rhoptries | 224 | 457 |
| | | ME49 | | | |
| TGME49_261740 | ROP47 | T. gondii | Rhoptries | 225 | 458 |
| | | ME49 | | | |
| TGME49_218270 | ROP48 | T. gondii | Rhoptries | 226 | 459 |
| | | ME49 | | | |
| TGME49_308075 | ROP5 | T. gondii | Rhoptries | 227 | 460 |
| | | VEG | | | |
| TGME49_241000 | ROP51 | T. gondii | Rhoptries | 228 | 461 |
| | | ME49 | | | |
| TGME49_210370 | ROP54 | T. gondii | Rhoptries | 229 | 462 |
| | | ME49 | | | |
| TGME49_300290 | SNARE domain-containing protein | T. gondii | Rhoptries | 230 | 463 |
| | | ME49 | | | |
| TGME49_299060 | sodium/hydrogen exchanger NHE2 | T. gondii | Rhoptries | 231 | 464 |
| | | ME49 | | | |
| TGME49_314500 | subtilisin SUB2 (SUB2) | T. gondii | Rhoptries | 232 | 465 |
| | | ME49 | | | |
| TGME49_214080 | toxofilin | T. gondii | Rhoptries | 233 | 466 |
| | | ME49 | | | |

Table 3. “polyn.” = polynucleotide; “polyp” = polypeptide.

[0171] According to some embodiments of the invention, the heterologous polynucleotide further comprises a Toxoplasma untranslated region (UTR) nucleic acid sequence.

[0172] According to some embodiments of the invention, the Toxoplasma untranslated region (UTR) nucleic acid sequence is upstream and/or downstream of the open reading frame of the heterologous polynucleotide (e.g., which encodes the Toxoplasma secreted protein fused in frame with the pharmaceutical polypeptide).

[0173] According to some embodiments of the invention, the Toxoplasma 5′-untranslated region (5′-UTR) is placed upstream of the Toxoplasma secreted protein open reading frame.

[0174] According to some embodiments of the invention, the Toxoplasma 3′-untranslated region (3′-UTR) is placed downstream of the open reading frame encoding the Toxoplasma secreted protein fused in frame with the pharmaceutical polypeptide.

[0175] According to some embodiments of the invention, the Toxoplasma 3′ untranslated region (3′-UTR) nucleic acid sequence is the GRA2 3′-UTR, GRA16 3′-UTR, GRA24 3′-UTR, SAG1 3′-UTR, or the DHFR 3′-UTR.

[0176] According to some embodiments of the invention, the Toxoplasma 5′ untranslated region (5′-UTR) nucleic acid sequence is the GRA2 5′-UTR, GRA16 5′-UTR, GRA24 5′-UTR, SAG1 5′-UTR, or the DHFR 5′-UTR.

[0177] According to some embodiments of the invention, the Toxoplasma untranslated region (UTR) nucleic acid sequence is the Toxofilin 3′-UTR.

[0178] As mentioned, the heterologous polynucleotide comprises a second nucleic acid sequence encoding a pharmaceutical polypeptide being fused in frame downstream of the Toxoplasma secreted protein.

[0179] As used herein the phrase “pharmaceutical polypeptide” refers to a polypeptide having a therapeutic effect, e.g., capable of treating a pathology, when introduced into cell(s) of a subject in need thereof.

[0180] It should be noted that for certain diseases, the pharmaceutical polypeptide may be effective when reaching a certain organ, tissue, cell, cell compartment or cellular localization within the subject. For example, for treating a neurological disease, the pharmaceutical composition is preferably targeted to the nervous system, e.g., neurons, glia or other cells. Additionally or alternatively, for certain diseases, the pharmaceutical polypeptide should reach a certain cellular localization such as the cell nucleus in case the target of the pharmaceutical composition is situated (positioned) within the cell nucleus. For example, in the case of MECP2, the active protein binds to DNA within the nucleus and regulates gene expression.

[0181] According to some embodiments of the invention, the nucleic acid construct further comprises at least one in frame cleavage site, which allows detachment of the pharmaceutical polypeptide from the Toxoplasma secreted protein.

[0182] According to some embodiments of the invention, the pharmaceutical polypeptide comprises a wild type amino acid sequence corresponding to the endogenous protein capable of treating the pathology.

[0183] According to some embodiments of the invention, the pharmaceutical polypeptide comprises an antibody capable of treating the pathology.

[0184] According to some embodiments of the invention, the pharmaceutical polypeptide comprises an antigen capable of treating the pathology.

[0185] According to some embodiments of the invention, the pharmaceutical polypeptide comprises a toxin capable of treating the pathology.

[0186] According to some embodiments of the invention, the pharmaceutical polypeptide comprises an enzyme, a structural polypeptide, a motility polypeptide, a regulatory polypeptide, a storage polypeptide, a signaling/ligand polypeptide, a receptor polypeptide, a sensory polypeptide, an antibody, a protein channel and/or a transport polypeptide.

[0187] According to some embodiments of the invention, the pharmaceutical polypeptide is Galactocerebrosidase (GALC).

[0188] According to some embodiments of the invention, the pharmaceutical polypeptide is Galactocerebrosidase (GALC) isoform 1, isoform 2, isoform 3, isoform 4 or isoform 5.

[0189] According to some embodiments of the invention, the pharmaceutical polypeptide is Methyl-CpG Binding Protein 2 (MECP2).

[0190] According to some embodiments of the invention, the pharmaceutical polypeptide is Methyl-CpG Binding Protein 2 (MECP2) isoform 1 or MECP2 isoform 2.

[0191] According to some embodiments of the invention, the pharmaceutical polypeptide is Glial Cell Derived Neurotrophic Factor (GDNF).

[0192] According to some embodiments of the invention, the pharmaceutical polypeptide is Glial Cell Derived Neurotrophic Factor (GDNF) isoform 1, isoform 2, isoform 3, isoform 4 or isoform 5.

[0193] According to some embodiments of the invention, the pharmaceutical polypeptide is Aspartoacylase (ASPA).

[0194] According to some embodiments of the invention, the pharmaceutical polypeptide is Survival Motor Neuron Protein (SMN1).

[0195] According to some embodiments of the invention, the pharmaceutical polypeptide is Survival Motor Neuron Protein isoform SMN, isoform SMN-delta5, isoform SMN-delta7, or isoform SMN-delta57.

[0196] According to some embodiments of the invention, the pharmaceutical polypeptide is Parkin (PARK2).

[0197] According to some embodiments of the invention, the pharmaceutical polypeptide is Parkin (PARK2) isoform 1, isoform 2, isoform 3, isoform 4, isoform 5, isoform 6, isoform 7, or isoform 8.

[0198] According to some embodiments of the invention, the pharmaceutical polypeptide is Transcription Factor EB (TFEB).

[0199] According to some embodiments of the invention, the pharmaceutical polypeptide is Transcription Factor EB (TFEB) isoform 1 or isoform 2.

[0200] According to some embodiments of the invention, the pharmaceutical polypeptide is a TALEN (TALE nuclease).

[0201] According to some embodiments of the invention, the pharmaceutical polypeptide is a TALE TF (TALE transcription factor).

[0202] Table 4 hereinbelow, lists exemplary therapeutic proteins, which can be secreted to the subject by the Toxoplasma of some embodiments of the invention.

TABLE 4
exemplary pharmaceutical proteins

| | Polypeptide | | Polynucleotide | |
|---|---|---|---|---|
| | GenBank | SEQ | GenBank | SEQ |
| Gene | Accession | ID | Accession Number | ID |
| Name/Symbol | Number | NO: | (coding sequence) | NO: |
| TFEB | NP_001258874.1 | 4610 | NM_001271945.1 | 4600 |
| TFEB | NP_001161299.2 | 4618 | NM_001167827.2 | 4619 |
| TFEB | NP_001258873.1 | 4620 | NM_001271944.1 | 4621 |
| TFEB | NP_009093.1 | 4622 | NM_007162.2 | 4623 |
| TFEB | NP_001258872.1 | 4624 | NM_001271943.1 | 4625 |
| HGSNAT | NP_689632 | 4301 | NM_152419 | 4040 |
| MEF2C | NP_001124477 | 4302 | NM_001131005 | 4041 |
| MEF2C | NP_002388 | 4303 | NM_002397 | 4042 |
| NRTN | NP_004549 | 4304 | NM_004558 | 4043 |
| PGF | NP_002623 | 4305 | NM_002632 | 4044 |
| RPE65 | NP_000320 | 4306 | NM_000329 | 4045 |
| GDNF | NP_000505 | 4307 | NM_000514 | 4046 |
| GDNF | NP_954701 | 4308 | NM_199231 | 4047 |
| CNGB3 | NP_061971 | 4309 | NM_019098 | 4048 |
| BDNF | NP_001137277 | 4310 | NM_001143816 | 4049 |
| BDNF | NP_001137279 | 4311 | NM_001143814 | 4050 |
| BDNF | NP_001137288 | 4312 | NM_001143813 | 4051 |
| BDNF | NP_001137278 | 4313 | NM_001143812 | 4052 |
| BDNF | NP_733931 | 4314 | NM_001143806 | 4053 |
| BDNF | NP_733930 | 4315 | NM_001143811 | 4054 |
| BDNF | NP_733929 | 4316 | NM_001709 | 4055 |
| BDNF | NP_733927 | 4317 | NM_001143805 | 4056 |
| BDNF | NP_733928 | 4318 | NM_001143810 | 4057 |
| BDNF | NP_001700 | 4319 | NM_170735 | 4058 |
| BDNF | NP_001137281 | 4320 | NM_170734 | 4059 |
| BDNF | NP_001137282 | 4321 | NM_170733 | 4060 |
| BDNF | NP_001137280 | 4322 | NM_170732 | 4061 |
| BDNF | NP_001137285 | 4323 | NM_170731 | 4062 |
| BDNF | NP_001137286 | 4324 | NM_001143809 | 4063 |
| BDNF | NP_001137283 | 4325 | NM_001143807 | 4064 |
| BDNF | NP_001137284 | 4326 | NM_001143808 | 4065 |
| APP | NP_001129601 | 4327 | NM_000484 | 4066 |
| APP | NP_958817 | 4328 | NM_201414 | 4067 |
| APP | NP_958816 | 4329 | NM_001136131 | 4068 |
| APP | NP_001129602 | 4330 | NM_201413 | 4069 |
| APP | NP_001129488 | 4331 | NM_001136130 | 4070 |
| APP | NP_000475 | 4332 | NM_001136016 | 4071 |
| APP | NP_001129603 | 4333 | NM_001136129 | 4072 |
| ASPA | NP_000040 | 4334 | NM_001128085 | 4073 |
| ASPA | NP_001121557 | 4335 | NM_000049 | 4074 |
| S1PR1 | NP_001391 | 4336 | NM_001400 | 4075 |
| IDS | NP_001160022 | 4337 | NM_001166550 | 4076 |
| IDS | NP_006114 | 4338 | NM_006123 | 4077 |
| IDS | NP_000193 | 4339 | NM_000202 | 4078 |
| HTRA2 | NP_659540 | 4340 | NM_013247 | 4079 |
| HTRA2 | NP_037379 | 4341 | NM_145074 | 4080 |
| CDNF | NP_001025125 | 4342 | NM_001029954 | 4081 |
| DNAJC5 | NP_079495 | 4343 | NM_025219 | 4082 |
| IDUA | NP_000194 | 4344 | NM_000203 | 4083 |
| SPON1 | NP_006099 | 4345 | NM_006108 | 4084 |
| NMNAT2 | NP_733820 | 4346 | NM_015039 | 4085 |
| NMNAT2 | NP_055854 | 4347 | NM_170706 | 4086 |
| FMR1 | NP_002015 | 4348 | NM_002024 | 4087 |
| MECP2 | NP_004983 | 4349 | NM_001110792 | 4088 |
| MECP2 | NP_001104262 | 4350 | NM_004992 | 4089 |
| GNS | NP_002067 | 4351 | NM_002076 | 4090 |
| VEGFB | NP_003368 | 4352 | NM_003377 | 4091 |
| HIF1A | NP_851397 | 4353 | NM_181054 | 4092 |
| HIF1A | NP_001521 | 4354 | NM_001530 | 4093 |
| SERPINF1 | NP_002606 | 4355 | NM_002615 | 4094 |
| VEGFA | NP_001165093 | 4356 | NM_001025369 | 4095 |
| VEGFA | NP_001165094 | 4357 | NM_001025366 | 4096 |
| VEGFA | NP_001020540 | 4358 | NM_001025367 | 4097 |
| VEGFA | NP_001020541 | 4359 | NM_001025368 | 4098 |
| VEGFA | NP_003367 | 4360 | NM_003376 | 4099 |
| VEGFA | NP_001165101 | 4361 | NM_001171627 | 4100 |
| VEGFA | NP_001020537 | 4362 | NM_001171626 | 4101 |
| VEGFA | NP_001165100 | 4363 | NM_001171629 | 4102 |
| VEGFA | NP_001020539 | 4364 | NM_001171628 | 4103 |
| VEGFA | NP_001020538 | 4365 | NM_001171624 | 4104 |
| VEGFA | NP_001028928 | 4366 | NM_001171630 | 4105 |
| VEGFA | NP_001165098 | 4367 | NM_001171625 | 4106 |
| VEGFA | NP_001165097 | 4368 | NM_001171622 | 4107 |
| VEGFA | NP_001165096 | 4369 | NM_001171623 | 4108 |
| VEGFA | NP_001165095 | 4370 | NM_001033756 | 4109 |
| VEGFA | NP_001165099 | 4371 | NM_001025370 | 4110 |
| STC1 | NP_003146 | 4372 | NM_003155 | 4111 |
| NGB | NP_067080 | 4373 | NM_021257 | 4112 |
| NFE2L2 | NP_001138884 | 4374 | NM_006164 | 4113 |
| NFE2L2 | NP_006155 | 4375 | NM_001145412 | 4114 |
| NFE2L2 | NP_001138885 | 4376 | NM_001145413 | 4115 |
| MAPK7 | NP_620603 | 4377 | NM_002749 | 4116 |
| MAPK7 | NP_620602 | 4378 | NM_139034 | 4117 |
| MAPK7 | NP_620601 | 4379 | NM_139033 | 4118 |
| MAPK7 | NP_002740 | 4380 | NM_139032 | 4119 |
| NMNAT1 | NP_073624 | 4381 | NM_022787 | 4120 |
| NGF | NP_002497 | 4382 | NM_002506 | 4121 |
| NAGLU | NP_000254 | 4383 | NM_000263 | 4122 |
| CLU | NP_001822 | 4384 | NM_001831 | 4123 |
| MME | NP_009218 | 4385 | NM_000902 | 4124 |
| MME | NP_009219 | 4386 | NM_007289 | 4125 |
| MME | NP_000893 | 4387 | NM_007287 | 4126 |
| MME | NP_009220 | 4388 | NM_007288 | 4127 |
| CTSA | NP_001121167 | 4389 | NM_001167594 | 4128 |
| CTSA | NP_000299 | 4390 | NM_000308 | 4129 |
| CTSA | NP_001161066 | 4391 | NM_001127695 | 4130 |
| PPT1 | NP_000301 | 4392 | NM_000310 | 4131 |
| PPT1 | NP_001136076 | 4393 | NM_001142604 | 4132 |
| TIMP2 | NP_003246 | 4394 | NM_003255 | 4133 |
| MANF | NP_006001 | 4395 | NM_006010 | 4134 |
| TIMP1 | NP_003245 | 4396 | NM_003254 | 4135 |
| GAD2 | NP_000809 | 4397 | NM_001134366 | 4136 |
| GAD2 | NP_001127838 | 4398 | NM_000818 | 4137 |
| GALC | NP_000144 | 4399 | NM_000153 | 4138 |
| GAD1 | NP_000808 | 4400 | NM_013445 | 4139 |
| GAD1 | NP_038473 | 4401 | NM_000817 | 4140 |
| NTF3 | NP_002518 | 4402 | NM_002527 | 4141 |
| NTF3 | NP_001096124 | 4403 | NM_001102654 | 4142 |
| GUSB | NP_000172 | 4404 | NM_000181 | 4143 |
| HGF | NP_001010932 | 4405 | NM_001010933 | 4144 |
| HGF | NP_001010931 | 4406 | NM_001010932 | 4145 |
| HGF | NP_001010934 | 4407 | NM_001010931 | 4146 |
| HGF | NP_000592 | 4408 | NM_000601 | 4147 |
| HGF | NP_001010933 | 4409 | NM_001010934 | 4148 |
| SERPINI1 | NP_005016 | 4410 | NM_005025 | 4149 |
| SERPINI1 | NP_001116224 | 4411 | NM_001122752 | 4150 |
| RGS2 | NP_002914 | 4412 | NM_002923 | 4151 |
| NPY | NP_000896 | 4413 | NM_000905 | 4152 |
| UCP2 | NP_003346 | 4414 | NM_003355 | 4153 |
| SST | NP_001039 | 4415 | NM_001048 | 4154 |
| SGSH | NP_000190 | 4416 | NM_000199 | 4155 |
| CYP2J2 | NP_000766 | 4417 | NM_000775 | 4156 |
| GM2A | NP_000396 | 4418 | NM_000405 | 4157 |
| GM2A | NP_001161079 | 4419 | NM_001167607 | 4158 |
| HEXA | NP_000511 | 4420 | NM_000520 | 4159 |
| UCHE1 | NP_004172 | 4421 | NM_004181 | 4160 |
| HEXB | NP_000512 | 4422 | NM_000521 | 4161 |
| PINK1 | NP_115785 | 4423 | NM_032409 | 4162 |
| PRDX3 | NP_006784 | 4424 | NM_006793 | 4163 |
| PRDX1 | NP_859048 | 4425 | NM_002574 | 4164 |
| PRDX1 | NP_859047 | 4426 | NM_181696 | 4165 |
| PRDX1 | NP_002565 | 4427 | NM_181697 | 4166 |
| GEB1 | NP_001129074 | 4428 | NM_001135602 | 4167 |
| GEB1 | NP_001073279 | 4429 | NM_000404 | 4168 |
| GEB1 | NP_000395 | 4430 | NM_001079811 | 4169 |
| TPP1 | NP_000382 | 4431 | NM_000391 | 4170 |
| ANG | NP_001136 | 4432 | NM_001097577 | 4171 |
| ANG | NP_001091046 | 4433 | NM_001145 | 4172 |
| HMOX1 | NP_002124 | 4434 | NM_002133 | 4173 |
| NRG1 | NP_039258 | 4435 | NM_001160001 | 4174 |
| NRG1 | NP_001153479 | 4436 | NM_001159995 | 4175 |
| NRG1 | NP_001153476 | 4437 | NM_001160007 | 4176 |
| NRG1 | NP_001153477 | 4438 | NM_001160008 | 4177 |
| NRG1 | NP_039254 | 4439 | NM_001159996 | 4178 |
| NRG1 | NP_039256 | 4440 | NM_001159999 | 4179 |
| NRG1 | NP_001153467 | 4441 | NM_001160002 | 4180 |
| NRG1 | NP_001153468 | 4442 | NM_001160004 | 4181 |
| NRG1 | NP_039250 | 4443 | NM_004495 | 4182 |
| NRG1 | NP_001153471 | 4444 | NM_001160005 | 4183 |
| NRG1 | NP_001153480 | 4445 | NM_013964 | 4184 |
| NRG1 | NP_039251 | 4446 | NM_013960 | 4185 |
| NRG1 | NP_039252 | 4447 | NM_013962 | 4186 |
| NRG1 | NP_039253 | 4448 | NM_013959 | 4187 |
| NRG1 | NP_001153474 | 4449 | NM_013958 | 4188 |
| NRG1 | NP_004486 | 4450 | NM_013957 | 4189 |
| NRG1 | NP_001153473 | 4451 | NM_013956 | 4190 |
| NFIL3 | NP_005375 | 4452 | NM_005384 | 4191 |
| MAN2B1 | NP_000519 | 4453 | NM_000528 | 4192 |
| DHCR24 | NP_055577 | 4454 | NM_014762 | 4193 |
| DDC | NP_001076440 | 4455 | NM_001082971 | 4194 |
| DDC | NP_000781 | 4456 | NM_000790 | 4195 |
| TP53 | NP_001119588 | 4457 | NM_001126113 | 4196 |
| TP53 | NP_001119589 | 4458 | NM_001126112 | 4197 |
| TP53 | NP_001119585 | 4459 | NM_000546 | 4198 |
| TP53 | NP_001119584 | 4460 | NM_001126116 | 4199 |
| TP53 | NP_001119587 | 4461 | NM_001126117 | 4200 |
| TP53 | NP_001119586 | 4462 | NM_001126114 | 4201 |
| TP53 | NP_000537 | 4463 | NM_001126115 | 4202 |
| ADNP | NP_056154 | 4464 | NM_181442 | 4203 |
| ADNP | NP_852107 | 4465 | NM_015339 | 4204 |
| GAN | NP_071324 | 4466 | NM_022041 | 4205 |
| GAL | NP_057057 | 4467 | NM_015973 | 4206 |
| SMN1 | NP_000335 | 4468 | NM_022874 | 4207 |
| SMN1 | NP_075015 | 4469 | NM_017411 | 4208 |
| SMN1 | NP_075014 | 4470 | NM_000344 | 4209 |
| SMN1 | NP_059107 | 4471 | NM_022876 | 4210 |
| SMN1 | NP_075013 | 4510 | NM_022875 | 4211 |
| SMN1 | NP_075012 | 4511 | NM_022877 | 4212 |
| PROC | NP_000303 | 4512 | NM_000312 | 4213 |
| TRAP1 | NP_057376 | 4513 | NM_016292 | 4214 |
| I118BP | NP_001138527 | 4514 | NM_173042 | 4215 |
| I118BP | NP_001138529 | 4515 | NM_001145057 | 4216 |
| I118BP | NP_766630 | 4516 | NM_001145055 | 4217 |
| I118BP | NP_001034749 | 4517 | NM_001039660 | 4218 |
| I118BP | NP_001034748 | 4518 | NM_001039659 | 4219 |
| PRDX6 | NP_004896 | 4519 | NM_004905 | 4220 |
| TXN | NP_003320 | 4520 | NM_003329 | 4221 |
| GAA | NP_000143 | 4521 | NM_000152 | 4222 |
| GAA | NP_001073271 | 4522 | NM_001079803 | 4223 |
| GAA | NP_001073272 | 4523 | NM_001079804 | 4224 |
| GHRL | NP_001128416 | 4524 | NM_001134945 | 4225 |
| GHRL | NP_001128417 | 4525 | NM_001134944 | 4226 |
| GHRL | NP_001128413 | 4526 | NM_001134946 | 4227 |
| GHRL | NP_057446 | 4527 | NM_016362 | 4228 |
| GHRL | NP_001128418 | 4528 | NM_001134941 | 4229 |
| CSF3 | NP_757373 | 4529 | NM_000759 | 4230 |
| CSF3 | NP_757374 | 4530 | NM_172220 | 4231 |
| CSF3 | NP_000750 | 4531 | NM_172219 | 4232 |
| UBE3A | NP_000453 | 4532 | NM_130838 | 4233 |
| UBE3A | NP_570854 | 4533 | NM_130839 | 4234 |
| UBE3A | NP_570853 | 4534 | NM_000462 | 4235 |
| ABCD1 | NP_000024 | 4535 | NM_000033 | 4236 |
| NDP | NP_000257 | 4536 | NM_000266 | 4237 |
| TH | NP_954986 | 4537 | NM_199292 | 4238 |
| TH | NP_954987 | 4538 | NM_199293 | 4239 |
| TH | NP_000351 | 4539 | NM_000360 | 4240 |
| GCH1 | NP_000152 | 4540 | NM_000161 | 4241 |
| GCH1 | NP_001019241 | 4541 | NM_001024070 | 4242 |
| GCH1 | NP_001019242 | 4542 | NM_001024071 | 4243 |
| GCH1 | NP_001019195 | 4543 | NM_001024024 | 4244 |
| BCL2 | NP_000648 | 4544 | NM_000633 | 4245 |
| BCL2 | NP_000624 | 4545 | NM_000657 | 4246 |
| ENO2 | NP_001966 | 4546 | NM_001975 | 4247 |
| EPO | NP_000790 | 4547 | NM_000799 | 4248 |
| GBA | NP_001005741 | 4548 | NM_001005742 | 4249 |
| GBA | NP_001165283 | 4549 | NM_001005741 | 4250 |
| GBA | NP_001005742 | 4550 | NM_001171811 | 4251 |
| GBA | NP_001165282 | 4551 | NM_001171812 | 4252 |
| GBA | NP_000148 | 4552 | NM_000157 | 4253 |
| AGA | NP_000018 | 4553 | NM_000027 | 4254 |
| AGA | NP_001165459 | 4554 | NM_001171988 | 4255 |
| UPF1 | NP_002902 | 4555 | NM_002911 | 4256 |
| PSAP | NP_001035931 | 4556 | NM_001042465 | 4257 |
| PSAP | NP_002769 | 4557 | NM_001042466 | 4258 |
| PSAP | NP_001035930 | 4558 | NM_002778 | 4259 |
| ANXA1 | NP_000691 | 4559 | NM_000700 | 4260 |
| IGF1 | NP_001104753 | 4560 | NM_001111284 | 4261 |
| IGF1 | NP_001104754 | 4561 | NM_001111283 | 4262 |
| IGF1 | NP_000609 | 4562 | NM_000618 | 4263 |
| IGF2 | NP_001035835 | 4563 | NM_001007139 | 4264 |
| IGF2 | NP_000603 | 4564 | NM_000612 | 4265 |
| IGF2 | NP_001007140 | 4565 | NM_000207 | 4266 |
| IGF2 | NP_001121070 | 4566 | NM_001127598 | 4267 |
| IGF2 | NP_000198 | 4567 | NM_001042376 | 4268 |
| PARK2 | NP_054642 | 4568 | NM_013988 | 4269 |
| PARK2 | NP_054643 | 4569 | NM_013987 | 4270 |
| PARK2 | NP_004553 | 4570 | NM_004562 | 4271 |
| FUCA1 | NP_000138 | 4571 | NM_000147 | 4272 |
| SIRT1 | NP_001135970 | 4572 | NM_012238 | 4273 |
| SIRT1 | NP_036370 | 4573 | NM_001142498 | 4274 |
| PARK7 | NP_001116849 | 4574 | NM_007262 | 4275 |
| PARK7 | NP_009193 | 4575 | NM_001123377 | 4276 |
| ANXA2 | NP_004030 | 4576 | NM_004039 | 4277 |
| ANXA2 | NP_001002857 | 4577 | NM_001136015 | 4278 |
| ANXA2 | NP_001002858 | 4578 | NM_001002858 | 4279 |
| ANXA2 | NP_001129487 | 4579 | NM_001002857 | 4280 |
| GCG | NP_002045 | 4580 | NM_002054 | 4281 |
| LEP | NP_000221 | 4581 | NM_000230 | 4282 |
| SH3BP5 | NP_004835 | 4582 | NM_001018009 | 4283 |
| SH3BP5 | NP_001018009 | 4583 | NM_004844 | 4284 |
| CNTF | NP_000605 | 4584 | NM_053023 | 4285 |
| CNTF | NP_444251 | 4585 | NM_000614 | 4286 |
| GLA | NP_000160 | 4586 | NM_000169 | 4287 |
| KCNN3 | NP_740752 | 4587 | NM_170782 | 4288 |
| KCNN3 | NP_002240 | 4588 | NM_002249 | 4289 |
| ARSA | NP_001078896 | 4589 | NM_000487 | 4290 |
| ARSA | NP_001078897 | 4590 | NM_001085428 | 4291 |
| ARSA | NP_000478 | 4591 | NM_001085426 | 4292 |
| ARSA | NP_001078894 | 4592 | NM_001085427 | 4293 |
| ARSA | NP_001078895 | 4593 | NM_001085425 | 4294 |
| SUMF1 | NP_001158147 | 4594 | NM_001164674 | 4295 |
| SUMF1 | NP_001158146 | 4595 | NM_001164675 | 4296 |
| SUMF1 | NP_877437 | 4596 | NM_182760 | 4297 |
| CRH | NP_000747 | 4597 | NM_000756 | 4298 |
| SMPD1 | NP_000534 | 4598 | NM_000543 | 4299 |
| SMPD1 | NP_001007594 | 4599 | NM_001007593 | 4300 |

Table 4.

[0203] It should be noted that any of the sequences described herein (e.g., the Toxoplasma secreted protein and/or the therapeutic polypeptides) can be codon optimized for expression in a target cell (e.g., Toxoplasma). Examples of such sequence modifications include, but are not limited to, an altered G/C content to more closely approach that typically found in the target cell species of interest, and the removal of codons atypically found in the target cell a species commonly referred to as codon optimization.

[0204] The phrase “codon optimization” refers to the selection of appropriate DNA nucleotides for use within a structural gene or fragment thereof that approaches codon usage within the target cell of interest. Therefore, an optimized gene or nucleic acid sequence refers to a gene in which the nucleotide sequence of a native or naturally occurring gene has been modified in order to utilize statistically-preferred or statistically-favored codons within the target cell. The nucleotide sequence typically is examined at the DNA level and the coding region optimized for expression in the target cell species determined using any suitable procedure. In this method, the standard deviation of codon usage, a measure of codon usage bias, may be calculated by first finding the squared proportional deviation of usage of each codon of the native gene relative to that of highly expressed target cell genes, followed by a calculation of the average squared deviation. The formula used is: 1 SDCU=n=1 N [(Xn—Yn)/Yn]2/N, where Xn refers to the frequency of usage of codon n in highly expressed target cell genes, where Yn to the frequency of usage of codon n in the gene of interest and N refers to the total number of codons in the gene of interest.

[0205] One method of optimizing the nucleic acid sequence in accordance with the preferred codon usage for a particular target cell type is based on the direct use, without performing any extra statistical calculations, of codon optimization Tables such as those provided on-line at the Codon Usage Database through the Codon usage tabulated from international DNA sequence databases: status for the year 2000. Y Nakamura, T Gojobori, T Ikemura—Nucleic acids research, 2000—Oxford Univ Press. The Codon Usage Database contains codon usage tables for a number of different species, with each codon usage Table having been statistically determined based on the data present in Genbank.

[0206] By using the above Tables to determine the most preferred or most favored codons for each amino acid in a particular species (for example, Toxoplasma gondii), a naturally-occurring nucleotide sequence encoding a protein of interest can be codon optimized for that particular target cell species. This is effected by replacing codons that may have a low statistical incidence in the particular species genome with corresponding codons, in regard to an amino acid, that are statistically more favored. However, one or more less-favored codons may be selected to delete existing restriction sites, to create new ones at potentially useful junctions (5′ and 3′ ends to add signal peptide or termination cassettes, internal sites that might be used to cut and splice segments together to produce a correct full-length sequence), or to eliminate nucleotide sequences that may negatively effect mRNA stability or expression.

[0207] The naturally-occurring encoding nucleotide sequence may already, in advance of any modification, contain a number of codons that correspond to a statistically-favored codon in a particular target cell species. Therefore, codon optimization of the native nucleotide sequence may comprise determining which codons, within the native nucleotide sequence, are not statistically-favored with regards to a particular target cell, and modifying these codons in accordance with a codon usage table of the particular target cell to produce a codon optimized derivative. A modified nucleotide sequence may be fully or partially optimized for target cell codon usage provided that the protein encoded by the modified nucleotide sequence is produced at a level higher than the protein encoded by the coresponding naturally occurring or native gene. Additionally or alternatively, codon optimized/usage sequence can fold better than the protein encoded by the corresponding naturally occurring or native gene. Additionally or alternatively, codon optimized/usage sequence is targeted better to the target organelle(s) than the protein encoded by the corresponding naturally occurring or native gene. Additionally or alternatively, codon optimized/usage sequence is less degraded than the protein encoded by the corresponding naturally occurring or native gene.

[0208] For example, the following Table 5 of Tosoplasma codon usage can be used.

TABLE 5

| | Amino acid | | Frequency: per |
|---|---|---|---|
| Triplet | (one letter code) | Fraction | thousand |
| UUU | F | 0.35 | 13.3 |
| UUC | F | 0.65 | 25 |
| UUA | L | 0.03 | 2.6 |
| UUG | L | 0.17 | 14.5 |
| CUU | L | 0.17 | 15 |
| CUC | L | 0.31 | 27.1 |
| CUA | L | 0.04 | 3.8 |
| CUG | L | 0.28 | 24 |
| AUU | I | 0.38 | 12.2 |
| AUC | I | 0.53 | 17.4 |
| AUA | I | 0.09 | 2.9 |
| AUG | M | 1 | 18.3 |
| GUU | V | 0.22 | 14.7 |
| GUC | V | 0.38 | 25.4 |
| GUA | V | 0.08 | 5.7 |
| GUG | V | 0.32 | 21.4 |
| UCU | S | 0.23 | 20.3 |
| UCC | S | 0.17 | 15.2 |
| UCA | S | 0.09 | 8.1 |
| UCG | S | 0.22 | 19 |
| CCU | P | 0.27 | 15.4 |
| CCC | P | 0.24 | 13.6 |
| CCA | P | 0.18 | 10.4 |
| CCG | P | 0.3 | 17.3 |
| ACU | T | 0.22 | 12.3 |
| ACC | T | 0.24 | 13 |
| ACA | T | 0.24 | 13.2 |
| ACG | T | 0.3 | 16.4 |
| GCU | A | 0.21 | 20.5 |
| GCC | A | 0.24 | 22.6 |
| GCA | A | 0.22 | 20.8 |
| GCG | A | 0.33 | 31.5 |
| UAU | Y | 0.26 | 5.1 |
| UAC | Y | 0.74 | 14.5 |
| UAA | * | 0.34 | 0.6 |
| UAG | * | 0.23 | 0.4 |
| CAU | H | 0.37 | 7.9 |
| CAC | H | 0.63 | 13.4 |
| CAA | Q | 0.36 | 13.7 |
| CAG | Q | 0.64 | 24.5 |
| AAU | N | 0.35 | 10.1 |
| AAC | N | 0.65 | 18.9 |
| AAA | K | 0.38 | 18.4 |
| AAG | K | 0.62 | 29.8 |
| GAU | D | 0.32 | 16.3 |
| GAC | D | 0.68 | 34.3 |
| GAA | E | 0.45 | 32.7 |
| GAG | E | 0.55 | 40.6 |
| UGU | C | 0.37 | 7.2 |
| UGC | C | 0.63 | 12.4 |
| UGA | * | 0.43 | 0.8 |
| UGG | W | 1 | 10.8 |
| CGU | R | 0.12 | 8.2 |
| CGC | R | 0.25 | 17.5 |
| CGA | R | 0.18 | 12.7 |
| CGG | R | 0.14 | 10.1 |
| AGU | S | 0.11 | 9.3 |
| AGC | S | 0.18 | 16.1 |
| AGA | R | 0.18 | 12.8 |
| AGG | R | 0.12 | 8.7 |
| GGU | G | 0.18 | 14.6 |
| GGC | G | 0.36 | 28.5 |
| GGA | G | 0.27 | 21.4 |
| GGG | G | 0.18 | 14.6 |

Table 5.

[0209] According to some embodiments of the invention, the heterologous polynucleotide further comprises a nucleic acid sequence encoding a selectable marker.

[0210] According to some embodiments of the invention, the selectable marker comprises chloramphenicol acetyltransferase (CAT), DHFR-TS, BLE, HXGPRT, UPRT, TK, CD, a fluorescent protein (such as GFP, YFP, RFP, mCherry or other) or an epitope tag (such as HA, Myc, Ty-1, FLAG or other).

[0211] According to some embodiments of the invention, the selectable marker comprises HXGPRT.

[0212] Toxoplasma tachyzoites deficient in HXGPRT activity can be selected in the presence of 6-thioxanthine (6-TX), whereas strains expressing HXGPRT activity can be selected in mycophenolic acid (MPA) and/or xanthine (Pfefferkorn and Borotz, 1994, Pfefferkorn E. R., Borotz S. (1994) Exp. Parasitol. 79, 374-382).

[0213] According to some embodiments of the invention, the selectable marker comprises chloramphenicol acetyltransferase (CAT) (for positive selection using Chloramphenicol), DHFR-TS (for positive selection using Pyrimethamine), BLE (for positive selection using Phleomycin), HXGPRT (for positive selection using Mycophenolic acid+xanthine or negative selection using 6-thioxanthine, UPRT (for negative selection using 5′-fluo-2′-deoxyuridine), TK (for positive selection using Ganciclovir), CD (for positive selection using 5-fluorocytosine), a fluorescent protein (such as GFP, YFP, RFP, mCherry or other) or an epitope tag (such as HA, Myc, Ty-1, FLAG or other).

[0214] According to some embodiments of the invention, the nucleic acid construct further comprises a third nucleic acid sequence encoding an inducible self-destruction element.

[0215] According to some embodiments of the invention, the inducible self destruction element is in the same frame as the therapeutic cassette.

[0216] According to some embodiments of the invention, the inducible self destruction element is in a separate reading frame, regulated by different regulatory elements. For instance, the therapeutic cassette can be driven by a latent-stage promoter, while the self-destruction cassette will be driven by a drug-inducible promoter.

[0217] According to some embodiments of the invention, the inducible self-destruction element is active in response to a drug.

[0218] According to some embodiments of the invention, the drug comprises an antibiotic.

[0219] According to some embodiments of the invention, the third nucleic acid sequence encoding the inducible self-destruction element is comprised in the same nucleic acid construct which comprises the heterologous polynucleotide comprising the first nucleic acid sequence encoding the Toxoplasma secreted protein in frame fused upstream to the second nucleic acid sequence encoding the pharmaceutical polypeptide.

[0220] According to some embodiments of the invention, the third nucleic acid sequence encoding the inducible self-destruction element is comprised in a separate nucleic acid construct with respect to the nucleic acid construct which comprises the heterologous polynucleotide comprising the first nucleic acid sequence encoding the Toxoplasma secreted protein in frame fused upstream to the second nucleic acid sequence encoding the pharmaceutical polypeptide.

[0221] According to some embodiments of the invention, the Toxoplasma untranslated region (UTR) nucleic acid sequence is upstream and/or downstream of the open reading frame of the selectable marker and/or of the self-destruction element.

[0222] According to an aspect of some embodiments of the present invention there is provided a nucleic acid construct system comprising at least two nucleic acid constructs, wherein a first nucleic acid construct of the at least two nucleic acid constructs is the nucleic acid construct of some embodiments of the invention, and a second nucleic construct of the at least two nucleic acid constructs comprises a polynucleotide encoding a selectable marker.

[0223] Typical cloning vectors may also contain a transcription and translation initiation sequence, transcription and translation terminator and a polyadenylation signal.

[0224] Following is a non-limiting list of Toxoplasma nucleic acid constructs which can be used as a backbone to generate the nucleic acid construct of some embodiments ofthe invention: pGRA, pUPRT, pROP1, pTUB1, pTUB8, pLIC, pTOXO, pMIC2, pHX, pCAT, pDHFR, pBlueScript, pTet7SAG1, pTet07SAG4, pSAG1, pSAG4, pHTU, pTKO, pLoxP-DHFR, pminCAT/HXGPRT+, pminCAT/HXGPRT-, pDHFR-TSc3/M3, pDHFR-TSc3/M2M3, pminiHXGPRT, and pUC19. These vectors can be obtained from various sources, such as the nonprofit plasmid repository “addgene”; the NIH AIDS Reagent Program; Agilent Technologies; NEB; Thermo Fisher Scientific; Sigma Aldrich; GenScript; and MoBiTec GmbH.

[0225] Table 6 hereinbelow provides non-limiting exemplary vectors and catalogue numbers.

TABLE 6
Vector Backbones

| | | Catalogue |
|---|---|---|
| Construct name | Manufacturer | number |
| pLIC | Addgene | 27989 |
| pCAT | Addgene | 59018 |
| pTetO7SAG1 | Addgene | 59017 |
| pSAG1 | Addgene | 54467 |
| pUPRT | Addgene | 58528 |
| pLoxP-DHFR | Addgene | 70147 |
| pminCAT/HXGPRT+ | NIH AIDS Reagent Program | 2850 |
| pminCAT/HXGPRT− | NIH AIDS Reagent Program | 2851 |
| pDHFR-TSc3/M3 | NIH AIDS Reagent Program | 2853 |
| pDHFR-TSc3/M2M3 | NIH AIDS Reagent Program | 2854 |
| pminiHXGPRT | NIH AIDS Reagent Program | 2855 |
| pBlueScript | Agilent Technologies | 200252, 200251, |
| | | 212205, 212206, |
| | | 212207, 212208, |
| | | 212240, 212250 |
| pUC19 | Addgene; | 50005; |
| | NEB; | N3041; |
| | Thermo Fisher Scientific; | SD0061; |
| | Sigma Aldrich; | D3404; |
| | MoBiTec GmbH | V33202 |

Table 6.

[0226] According to an aspect of some embodiments of the present invention there is provided a Toxoplasma transformed with the nucleic acid construct of some embodiments of the invention or with the nucleic acid construct system of some embodiments of the invention.

[0227] As used herein the term “Toxoplasma” refers to the intracellular, parasitic protozoan Toxoplasma gondii.

[0228] Non-limiting examples of a Toxoplasma gondii strains which can be used along with the construct and methods of some embodiments of the invention include:
[0229] (i) Type I—including but not limited to: GT1, RH, ENT, VEL, TgCatCo1 and CAST.
[0230] (ii) Type II—including but not limited to: ME49, Beverly, PDS, PLK, PTG, DEG, PIH, TgNmBrl and PRU.
[0231] (iii) Type III—including but not limited to: VEG, C56, CTG, CEP, TgGoatUS4 and STRL.
[0232] (iv) Type Atypical—including but not limited to: TgCTPrC3, TgBbUS1, TgRabbitBrl and TgPigUS15.

[0233] According to some embodiments of the invention, the Toxoplasma is not attenuated.

[0234] As is conventional in the art, the term “attenuated” refers to a weakened and/or less vigorous strain of T. gondii as compared to a native (wild type) T. gondii which is non-genetically modified. Usually, an attenuated mutant of T. gondii is capable of stimulating an immune response and creating immunity but not causing illness. Attenuation can be achieved by conventional methods including, but not limited, to γ-irradiation or the generation of a pyrimidine auxotroph.

[0235] Non-limiting examples of attenuated Toxoplasma are described in US 20120045477 A1 and U.S. Pat. No. 8,673,289 B2, which are fully incorporated herein by reference.

[0236] It should be noted that T. gondii replication is essential for its ability to disseminate in the body and reach distal tissues during the acute stage of infection, its ability to persist in the infected cells and its ability to establish chronic cysts in the host.

[0237] According to some embodiments of the invention, the Toxoplasma of some embodiments of the invention is characterized by a higher proliferation rate as compared to the proliferation rate of an attenuated Toxoplasma.

[0238] According to some embodiments of the invention, the Toxoplasma of some embodiments of the invention is not an auxotroph.

[0239] According to some embodiments of the invention, the Toxoplasma of some embodiments of the invention comprises a functional endogenous pathway suitable for de-novo biosynthesis of pyrimidines.

[0240] According to some embodiments of the invention, the Toxoplasma of some embodiments of the invention is capable of differentiation into the Bradizoite stage.

[0241] According to some embodiments of the invention, the Toxoplasma of some embodiments of the invention is capable of RNA synthesis and/or DNA replication.

[0242] According to some embodiments of the invention, the Toxoplasma of some embodiments of the invention is capable of RNA synthesis.

[0243] According to some embodiments of the invention, the Toxoplasma of some embodiments of the invention is capable of DNA replication.

[0244] According to some embodiments of the invention, the Toxoplasma of some embodiments of the invention comprises an endogenous functional Carbamoyl phosphate synthetase II (CPSII) enzyme (as described in U.S. Pat. No. 8,673,289), e.g., as provided in any of SEQ ID NOs: 4612-4617.

[0245] The constructs and Toxoplasma of some embodiments of the invention can be used to deliver a protein-of-interest into the subject, e.g., into a specific tissue or cell type of the subject.

[0246] According to an aspect of some embodiments of the present invention there is provided a method of administering a protein-of-interest into a tissue-of-interest of a subject, the method comprising administering to the subject the Toxoplasma of some embodiments of the invention or the pharmaceutical composition of some embodiments of the invention, thereby administering the protein-of-interest to the tissue-of-interest of the subject.

[0247] Examples of tissue-of-interest include, but are not limited to, a central nervous system, muscles, parts of the eye, blood, lymph nodes, spleen, white blood cells, digestive system, and lamina propria.

[0248] It should be noted that since the Toxoplasma can cross the blood brain barrier it can deliver the protein-of-interest into the central nervous system of the subject in need thereof.

[0249] According to an aspect of some embodiments of the present invention there is provided a method of administering a protein-of-interest into a central nervous system of a subject, the method comprising administering to the subject the Toxoplasma of some embodiments of the invention or the pharmaceutical composition of some embodiments of the invention, thereby administering the protein-of-interest to the central nervous system of the subject.

[0250] Thus, the Toxoplasma of some embodiments of the invention can be used to treat a subject in need thereof by delivering a protein-of-interest (e.g., a therapeutic polypeptide) which is capable of treating the subject.

[0251] According to an aspect of some embodiments of the present invention there is provided a method of treating a subject in need thereof, comprising administering to the subject the Toxoplasma of some embodiments of the invention or the pharmaceutical composition of some embodiments of the invention, wherein the subject is diagnosed with a pathology treatable by administration of the pharmaceutical polypeptide in a central nervous system of the subject, thereby treating the subject in need thereof.

[0252] According to an aspect of some embodiments of the present invention there is provided a method of treating a subject in need thereof, comprising administering to the subject a Toxoplasma comprising a nucleic acid construct which comprises a heterologous polynucleotide comprising a first nucleic acid sequence encoding a Toxoplasma secreted protein in frame fused upstream to a second nucleic acid sequence encoding a pharmaceutical polypeptide, wherein the heterologous polynucleotide is operably linked to a promoter for directing transcription of the heterologous polynucleotide in a Toxoplasma, wherein the subject is diagnosed with a pathology treatable by administration of the pharmaceutical polypeptide in a central nervous system of the subject, thereby treating the subject in need thereof.

[0253] The term “treating” refers to inhibiting, preventing or arresting the development of a pathology (disease, disorder or condition) and/or causing the reduction, remission, or regression of a pathology. Those of skill in the art will understand that various methodologies and assays can be used to assess the development of a pathology, and similarly, various methodologies and assays may be used to assess the reduction, remission or regression of a pathology.

[0254] As used herein, the term “preventing” refers to keeping a disease, disorder or condition from occurring in a subject who may be at risk for the disease, but has not yet been diagnosed as having the disease.

[0255] As used herein, the term “subject” includes mammals, preferably human beings at any age which suffer from the pathology. Preferably, this term encompasses individuals who are at risk to develop the pathology.

[0256] According to some embodiments of the invention, the subject is diagnosed with a pathology characterized by a deficient endogenous protein in a central nervous system of a subject.

[0257] According to some embodiments of the invention, the deficient endogenous protein comprises a deletion, insertion, and/or substitution of at least one amino acid of the endogenous protein as compared to a wild type amino acid sequence of the endogenous protein.

[0258] According to some embodiments of the invention, the deficient endogenous protein comprises a reduced level of the endogenous protein as compared to a level of the endogenous protein in a healthy subject devoid of the pathology.

[0259] According to some embodiments of the invention, the deficient endogenous protein is absence of the endogenous protein in the subject diagnosed with the pathology.

[0260] According to some embodiments of the invention, the subject is diagnosed with Krabbe disease.

[0261] According to some embodiments of the invention, the subject is diagnosed with Rett syndrome.

[0262] According to some embodiments of the invention, the subject is diagnosed with Canavan disease.

[0263] According to some embodiments of the invention, the subject is diagnosed with Spinal Muscular Atrophy.

[0264] According to some embodiments of the invention, the subject is diagnosed with Parkinson's disease.

[0265] According to some embodiments of the invention, the subject is diagnosed with hypoxic/ischemic or neuroinflammatory CNS disorder.

[0266] According to some embodiments of the invention, the subject is diagnosed with Alzheimer's disease.

[0267] According to some embodiments of the invention, the subject is diagnosed with Amyotrophic Lateral Sclerosis.

[0268] According to some embodiments of the invention, the subject is diagnosed with Huntington's disease.

[0269] According to some embodiments of the invention, the subject is diagnosed with a lysosomal storage disease.

[0270] According to some embodiments of the invention, the subject is diagnosed with MECP2-duplication syndrome.

[0271] According to some embodiments of the invention the subject does not a have a compromised immune system. Examples of subjects with compromised immune system include, but are not limited to AIDS patients, subjects receiving chemotherapy, subjects receiving immunosuppressant drugs such as for cell, tissue and/or organ transplantation.

[0272] According to some embodiments of the invention, the method further comprising administering to the subject a drug capable of inducing the self-destruction element.

[0273] According to some embodiments of the invention, the method further comprising administering to the subject a molecule necessary for sustaining the Toxoplasma inside the host cell and/or body.

[0274] According to some embodiments of the invention, the molecule necessary for sustaining the Toxoplasma is an antibiotic.

[0275] According to some embodiments of the invention, the molecule necessary for sustaining the Toxoplasma is a small-molecule.

[0276] According to some embodiments of the invention, the molecule necessary for sustaining the Toxoplasma is a metabolite.

[0277] According to some embodiments of the invention, the method further comprises administering to the subject an immunosuppression drug prior to administration of the Toxoplasma and/or subsequent to administration of the Toxoplasma and/or concomitantly with administration of the Toxoplasma to the subject.

[0278] According to some embodiments of the invention, the method further comprises administering to the subject an immunosuppression drug prior to administration of the Toxoplasma to the subject.

[0279] According to some embodiments of the invention, the method further comprises administering to the subject an immunosuppression drug subsequent (or following) to administration of the Toxoplasma to the subject.

[0280] According to some embodiments of the invention, the method further comprises administering to the subject an immunosuppression drug concomitantly with administration of the Toxoplasma to the subject.

[0281] According to some embodiments of the invention, administering is performed by peripheral administration.

[0282] According to some embodiments of the invention, the peripheral administration comprises intravenous administration.

[0283] According to some embodiments of the invention, the peripheral administration comprises oral administration.

[0284] According to some embodiments of the invention, administering is performed by intraperitoneal injection.

[0285] According to some embodiments of the invention, administering is performed by intramuscular injection.

[0286] According to some embodiments of the invention, administering is performed by aerosols.

[0287] According to some embodiments of the invention, administering is performed by direct administration to the central nervous system or an adjacent tissue thereof.

[0288] According to some embodiments of the invention, the disease which is treated by the methods of some embodiments of the invention, e.g., using the Toxoplasma and/or the pharmaceutical composition comprising same is any of the diseases listed in Table 7 hereinabove.

[0289] Table 7 lists nonb-limiting diseases associated with deficient or abnormal expression or function of the endogenous proteins, which can be treated by administration of the therapeutic polypeptide of some embodiments of the invention.

TABLE 7

| Gene | |
|---|---|
| Name/Symbol | Associated disease |
| TFEB | Lysosomal storage diseases and neurodegenerative diseases |
| HGSNAT | Mucopolysaccharidosis 3C (Sanfilippo syndrome C) |
| MEF2C | Parkinson's disease |
| NRTN | Parkinson's disease |
| PGF | Traumatic Brain Injury, hypoxic/ischaemic CNS disorders, |
| | neuroinflammatory diseases, including stroke and |
| | neurodegenerative conditions. |
| RPE65 | Leber congenital amaurosis, retinitis pigmentosa |
| GDNF | Parkinson's disease, Supranuclear Palsy, Multiple sclerosis, |
| | Alzheimers disease, Amyotrophic Lateral Sclerosis, |
| | Huntington's disease, retinal degenerations, Traumatic Brain |
| | Injury, hypoxic/ischaemic CNS disorders, neuroinflammatory |
| | diseases, including stroke and neurodegenerative conditions. |
| CNGB3 | Achromatopsia |
| BDNF | Amyotrophic Lateral Sclerosis, Huntington's disease, |
| | Alzheimer's disease, Spinal Cord Injury, Obesity, Lysosomal |
| | storage disorders. |
| APP | Traumatic Brain Injury, hypoxic/ischaemic CNS disorders, |
| | neuroinflammatory diseases, including stroke and |
| | neurodegenerative conditions. |
| ASPA | Canavan disease |
| S1PR1 | Multiple sclerosis |
| IDS | Mucopolysaccharidosis type II (Hunter Syndrome, iduronate |
| | sulfatase deficiency) |
| HTRA2 | Parkinson's disease, Alzheimer's disease |
| CDNF | Parkinson's Disease, Alzheimers Disease, Amyotrophic Lateral |
| | Sclerosis |
| DNAJC5 | neurodegenerative disorders |
| IDUA | Mucopolysaccharidosis type I (Hurler syndrome, Hurler-Scheie |
| | syndrome, Scheie syndrome) |
| SPON1 | Alzheimer's disease |
| NMNAT2 | disorders involving axonal degenerations, such as Taxol-induced |
| | neuropathy, multiple sclerosis, some viral disorders, Traumatic |
| | Brain Injury, hypoxic/ischaemic CNS disorders, |
| | neuroinflammatory diseases, including stroke and |
| | neurodegenerative conditions. |
| FMR1 | Fragile X syndrome |
| MECP2 | Rett syndrome |
| GNS | Mucopolysaccharidosis 3D (Sanfilippo syndrome D) |
| VEGFB | Traumatic Brain Injury, hypoxic/ischaemic CNS disorders, |
| | neuroinflammatory diseases, including stroke and |
| | neurodegenerative conditions. |
| HIF1A | Alzheimer's disease |
| SERPINF1 | Parkinson's Disease, Amyotrophic Lateral Sclerosis, Multiple |
| | Sclerosis, Traumatic Brain Injury, hypoxic/ischaemic CNS |
| | disorders, neuroinflammatory diseases, including stroke and |
| | neurodegenerative conditions. |
| VEGFA | Traumatic Brain Injury, hypoxic/ischaemic CNS disorders, |
| | neuroinflammatory diseases, including stroke and |
| | neurodegenerative conditions. |
| STC1 | retinal degeneration, optic nerve diseases, Traumatic Brain |
| | Injury, hypoxic/ischaemic CNS disorders, neuroinflammatory |
| | diseases, including stroke and neurodegenerative conditions. |
| NGB | optic atrophy, Traumatic Brain Injury, hypoxic/ischaemic CNS |
| | disorders, neuroinflammatory diseases, including stroke and |
| | neurodegenerative conditions. |
| NFE2L2 | |
| MAPK7 | Alzheimer's disease |
| NMNAT1 | Parkinsons disease, Leber Congential Amaurosis, Traumatic |
| | Brain Injury, hypoxic/ischaemic CNS disorders, |
| | neuroinflammatory diseases, including stroke and |
| | neurodegenerative conditions. |
| NGF | Amyotrophic Lateral Sclerosis, Alzheimer's disease, down |
| | syndrome, sensory neuropathies |
| NAGLU | Mucopolysaccharidosis 3B (Sanfilippo syndrome B) |
| CLU | Alzheimer's disease, Traumatic Brain Injury, hypoxic/ischaemic |
| | CNS disorders, neuroinflammatory diseases, including stroke |
| | and neurodegenerative conditions. |
| MME | Alzheimer's disease |
| CTSA | Galactosialidosis |
| PPT1 | ceroid lipofuscinosis neuronal type 1 (Batten disease) |
| TIMP2 | Multiple sclerosis, Alzheimer's disease, and Huntington's |
| | disease, Parkinson's disease, Traumatic Brain Injury, |
| | hypoxic/ischaemic CNS disorders, neuroinflammatory |
| | diseases, including stroke and neurodegenerative conditions. |
| MANF | Parkinson's disease, retinitis pigmentosa, retinal artery occlusion, |
| | diabetes, Wolfram's syndrome, Alzheimer's disease, Traumatic |
| | Brain Injury, hypoxic/ischaemic CNS disorders, |
| | neuroinflammatory diseases, including stroke and |
| | neurodegenerative conditions. |
| TIMP1 | Traumatic Brain Injury, hypoxic/ischaemic CNS disorders, |
| | neuroinflammatory diseases, including stroke and |
| | neurodegenerative conditions. |
| GAD2 | Parkinson's disease |
| GALC | Krabbe disease (globoid cell leukodystrophy) |
| GAD1 | Parkinson's disease |
| NTF3 | Charcot-Marie-Tooth disease, multiple sclerosis, Spinal Cord |
| | Injury, X-linked adrenoleukodystrophy, diabetic neuropathies, |
| | axonal neuropathies, Traumatic Brain Injury, |
| | hypoxic/ischaemic CNS disorders, neuroinflammatory |
| | diseases, including stroke and neurodegenerative conditions. |
| GUSB | Sly syndrome |
| HGF | amyotrophic lateral sclerosis |
| SERPINI1 | Traumatic Brain Injury, hypoxic/ischaemic CNS disorders, |
| | neuroinflammatory diseases, including stroke and |
| | neurodegenerative conditions. |
| RGS2 | anxiety disorders |
| NPY | epilepsy, Post-Traumatic Stress Disorder |
| UCP2 | acute and excitotoxic brain injury, Parkinsons disease, |
| SST | epilepsy, alzheimer's disease, |
| SGSH | Mucopolysaccharidosis 3A (Sanfilippo syndrome A) |
| CYP2J2 | Traumatic Brain Injury, hypoxic/ischaemic CNS disorders, |
| | neuroinflammatory diseases, including stroke and |
| | neurodegenerative conditions. |
| GM2A | GM2 gangliosidoses (Tay-Sachs disease (TSD), Sandhoff- |
| | Jatzkewitz disease, GM2 activator deficiency) |
| HEXA | GM2 gangliosidoses (Tay-Sachs disease (TSD), Sandhoff- |
| | Jatzkewitz disease, GM2 activator deficiency) |
| UCH11 | Alzheimer's disease |
| HEXB | GM2 gangliosidoses (Tay-Sachs disease (TSD), Sandhoff- |
| | Jatzkewitz disease, GM2 activator deficiency) |
| PINK1 | Parkinson's disease |
| PRDX3 | Amyotrophic Lateral Sclerosis, parkinsons disease, alzheimers |
| | disease |
| PRDX1 | Traumatic Brain Injury, hypoxic/ischaemic CNS disorders, |
| | neuroinflammatory diseases, including stroke and |
| | neurodegenerative conditions. |
| GLB1 | GM1 gangliosidosis |
| TPP1 | ceroid lipofuscinosis neuronal type 2 (Batten disease) |
| ANG | Amyotrophic Lateral Sclerosis, Parkinson's disease |
| HMOX1 | Alzheimer's (AD), Parkinson's (PD), Traumatic Brain Injury, |
| | hypoxic/ischaemic CNS disorders, neuroinflammatory |
| | diseases, including stroke and neurodegenerative conditions. |
| NRG1 | Charcot-Marie-Tooth disease, Traumatic Brain Injury, |
| | hypoxic/ischaemic CNS disorders, neuroinflammatory |
| | diseases, including stroke and neurodegenerative conditions. |
| NFIL3 | Amyotrophic Lateral Sclerosis |
| MAN2B1 | alpha-Mannosidosis |
| DHCR24 | Alzheimer's disease. |
| DDC | Parkinson's disease, Aromatic L-amino-acid decarboxylase |
| | deficiency |
| TP53 | Brain tumors (Astrocytic tumours, Oligodendroglial tumours, |
| | Oligoastrocytic tumours, Ependymal tumours, Choroid plexus |
| | tumours, Other neuroepithelial tumours (Astroblastoma, |
| | Chordoid glioma of the third ventricle, Angiocentric glioma), |
| | Neuronal and mixed neuronal-glial tumours, Tumours of the |
| | pineal region, Embryonal tumours, Tumours of cranial and |
| | paraspinal nerves (Schwannoma, Neurofibroma, Perineurioma, |
| | Malignant peripheral nerve sheath tumour), Tumours of |
| | meningothelial cells, Mesenchymal tumours, Primary |
| | melanocytic lesions, Other neoplasms related to the meninges |
| | (Haemangioblastoma), Tumors of the haematopoietic system |
| | (Malignant Lymphomas, Plasmocytoma, Granulocytic |
| | sarcoma), Germ cell tumours (Germinoma, Embryonal |
| | carcinoma, Yolk sac tumour, Choriocarcinoma, Teratoma, |
| | Mixed germ cell tumours), Tumours of the sellar region |
| | (craniopharyngioma, Granular cell tumour, Pituicytoma, |
| | Spindle cell oncocytoma of the adenohypophysis), Metastatic |
| | Tumours). |
| ADNP | Alzheimer's disease, Amyotrophic Lateral Sclerosis, |
| | frontotemportal degeneration/dementia (FTD), Traumatic |
| | Brain Injury, hypoxic/ischaemic CNS disorders, |
| | neuroinflammatory diseases, including stroke and |
| | neurodegenerative conditions. |
| GAN | Giant Axonal Neuropathy |
| GAL | epilepsy, Alzheimer's disease, opiate addiction/withdrawel |
| SMN1 | Spinal muscular atrophy |
| PROC | Amyotrophic Lateral Sclerosis, Alzheimer's disease, multiple |
| | sclerosis, Traumatic Brain Injury, hypoxic/ischaemic CNS |
| | disorders, neuroinflammatory diseases, including stroke and |
| | neurodegenerative conditions. |
| TRAP1 | Parkinson's disease, Traumatic Brain Injury, hypoxic/ischaemic |
| | CNS disorders, neuroinflammatory diseases, including stroke |
| | and neurodegenerative conditions. |
| I118BP | Traumatic Brain Injury, hypoxic/ischaemic CNS disorders, |
| | neuroinflammatory diseases, including stroke and |
| | neurodegenerative conditions. |
| PRDX6 | Alzheimer's disease, Parkinson's disease, Traumatic Brain Injury, |
| | hypoxic/ischaemic CNS disorders, neuroinflammatory |
| | diseases, including stroke and neurodegenerative conditions. |
| TXN | Traumatic Brain Injury, hypoxic/ischaemic CNS disorders, |
| | neuroinflammatory diseases, including stroke and |
| | neurodegenerative conditions. |
| GAA | Pompe disease |
| GHRL | Alzheimer's disease, Parkinson's disease, Traumatic Brain Injury, |
| | hypoxic/ischaemic CNS disorders, neuroinflammatory |
| | diseases, including stroke and neurodegenerative conditions. |
| CSF3 | Parkinson's Disease, Amyotrophic Lateral Sclerosis, Cerebral |
| | Palsy, Alzheimer's disease, Traumatic Brain Injury, |
| | hypoxic/ischaemic CNS disorders, neuroinflammatory |
| | diseases, including stroke and neurodegenerative conditions. |
| UBE3A | Angelman syndrome |
| ABCD1 | Adrenoleukodystrophy |
| NDP | Norrie disease, familial exudative vitreoretinopathy (FEVR), |
| | inner ear diseases |
| TH | Parkinson's disease |
| GCH1 | Parkinson's disease |
| BCL2 | Amyotrophic lateral sclerosis, Parkinson's disease, Traumatic |
| | Brain Injury, hypoxic/ischaemic CNS disorders, |
| | neuroinflammatory diseases, including stroke and |
| | neurodegenerative conditions. |
| ENO2 | Alzheimers disease |
| EPO | Parkinson's disease, multiple sclerosis, Traumatic Brain Injury, |
| | hypoxic/ischaemic CNS disorders, neuroinflammatory |
| | diseases, including stroke and neurodegenerative conditions. |
| GBA | Gaucher disease |
| AGA | Aspartylglucosaminuria |
| UPF1 | Amyotrophic Lateral Sclerosis |
| PSAP | Parkinson's disease, demyelination disorders, Traumatic Brain |
| | Injury, hypoxic/ischaemic CNS disorders, neuroinflammatory |
| | diseases, including stroke and neurodegenerative conditions. |
| ANXA1 | Traumatic Brain Injury, hypoxic/ischaemic CNS disorders, |
| | neuroinflammatory diseases, including stroke and |
| | neurodegenerative conditions. |
| IGF1 | Amyotrophic Lateral Sclerosis, Traumatic Brain Injury, |
| | hypoxic/ischaemic CNS disorders, neuroinflammatory |
| | diseases, including stroke and neurodegenerative conditions. |
| IGF2 | Alzheimer's disease |
| PARK2 | Parkinson's disease, Traumatic Brain Injury, hypoxic/ischaemic |
| | CNS disorders, neuroinflammatory diseases, including stroke |
| | and neurodegenerative conditions. |
| FUCA1 | Fucosidosis |
| SIRT1 | Huntington's disease, amyotrophic lateral sclerosis, Parkinson's |
| | disease, Alzheimer disease, Frontotemporal dementia, |
| | Traumatic Brain Injury, hypoxic/ischaemic CNS disorders, |
| | neuroinflammatory diseases, including stroke and |
| | neurodegenerative conditions. |
| PARK7 | Amyotrophic Lateral Sclerosis, Parkinsons disease |
| ANXA2 | Traumatic Brain Injury, hypoxic/ischaemic CNS disorders, |
| | neuroinflammatory diseases, including stroke and |
| | neurodegenerative conditions. |
| GCG | Brain insulin resistance in Alzheimer's disease, Parkinson's |
| | disease, Amyotrophic Lateral Sclerosis |
| LEP | Alzheimer's disease, Obesity, Traumatic Brain Injury, |
| | hypoxic/ischaemic CNS disorders, neuroinflammatory |
| | diseases, including stroke and neurodegenerative conditions. |
| SH3BP5 | Alzheimer's disease. |
| CNTF | Parkinson's disease, Supranuclear Palsy, Multiple sclerosis, |
| | Alzheimers disease, Amyotrophic Fateral Sclerosis, |
| | Huntington's disease, retinal degenerations, Traumatic Brain |
| | Injury, hypoxic/ischaemic CNS disorders, neuroinflammatory |
| | diseases, including stroke and neurodegenerative conditions. |
| GLA | Fabry disease |
| KCNN3 | Alzheimer's disease |
| ARSA | Metachromatic leukodystrophy, Multiple sulfatase deficiency |
| SUMF1 | Multiple sulfatase deficiency, Mucopolysaccharidosis Type III A |
| | (Sanfilippo Disease Type A) |
| CRH | cerebral oedema |
| SMPD1 | Niemann-Pick disease |

Table 7.

[0290] According to some embodiments of the invention, the disease (pathology) is not cancer.

[0291] The nucleic acid construct, the nucleic acid construct system or the Toxoplasma transformed with the nucleic acid construct or with the nucleic acid construct system of some embodiments of the invention can be administered to an organism per se, or in a pharmaceutical composition where it is mixed with suitable carriers or excipients.

[0292] According to an aspect of some embodiments of the present invention there is provided a pharmaceutical composition comprising the Toxoplasma of some embodiments of the invention, and a pharmaceutically acceptable carrier.

[0293] According to some embodiments of the invention, the pharmaceutical composition is for treating a subject diagnosed with any of the pathologies described herein.

[0294] According to some embodiments of the invention, the pharmaceutical composition is for treating a subject diagnosed with a pathology characterized by a deficient endogenous protein in a central nervous system of a subject.

[0295] According to some embodiments of the invention, the pharmaceutical composition is for treating a subject diagnosed with a pathology which is treatable by administration of the pharmaceutical polypeptide in a central nervous system of a subject.

[0296] According to some embodiments of the invention, the pharmaceutical composition further comprises an immunosuppression agent.

[0297] As used herein a “pharmaceutical composition” refers to a preparation of one or more of the active ingredients described herein with other chemical components such as physiologically suitable carriers and excipients. The purpose of a pharmaceutical composition is to facilitate administration of a compound to an organism.

[0298] Herein the term “active ingredient” refers to the nucleic acid construct, the nucleic acid construct system or the toxoplama transformed with the nucleic acid construct or with the nucleic acid construct system of some embodiments of the invention accountable for the biological effect.

[0299] Hereinafter, the phrases “physiologically acceptable carrier” and “pharmaceutically acceptable carrier” which may be interchangeably used refer to a carrier or a diluent that does not cause significant irritation to an organism and does not abrogate the biological activity and properties of the administered compound. An adjuvant is included under these phrases.

[0300] Herein the term “excipient” refers to an inert substance added to a pharmaceutical composition to further facilitate administration of an active ingredient. Examples, without limitation, of excipients include calcium carbonate, calcium phosphate, various sugars and types of starch, cellulose derivatives, gelatin, vegetable oils and polyethylene glycols.

[0301] Techniques for formulation and administration of drugs may be found in “Remington's Pharmaceutical Sciences,” Mack Publishing Co., Easton, PA, latest edition, which is incorporated herein by reference.

[0302] Suitable routes of administration may, for example, include oral, rectal, transmucosal, especially transnasal, intestinal or parenteral delivery, including intramuscular, subcutaneous and intramedullary injections as well as intrathecal, direct intraventricular, intracardiac, e.g., into the right or left ventricular cavity, into the common coronary artery, intravenous, intraperitoneal, intranasal, or intraocular injections.

[0303] Conventional approaches for drug delivery to the central nervous system (CNS) include: neurosurgical strategies (e.g., intracerebral injection or intracerebroventricular infusion); molecular manipulation of the agent (e.g., production of a chimeric fusion protein that comprises a transport peptide that has an affinity for an endothelial cell surface molecule in combination with an agent that is itself incapable of crossing the BBB) in an attempt to exploit one of the endogenous transport pathways of the BBB; pharmacological strategies designed to increase the lipid solubility of an agent (e.g., conjugation of water-soluble agents to lipid or cholesterol carriers); and the transitory disruption of the integrity of the BBB by hyperosmotic disruption (resulting from the infusion of a mannitol solution into the carotid artery or the use of a biologically active agent such as an angiotensin peptide).

[0304] Alternately, one may administer the pharmaceutical composition in a local rather than systemic manner, for example, via injection of the pharmaceutical composition directly into a tissue region of a patient.

[0305] The term “tissue” refers to part of an organism consisting of cells designed to perform a function or functions. Examples include, but are not limited to, brain tissue, retina, skin tissue, hepatic tissue, pancreatic tissue, bone, cartilage, connective tissue, blood tissue, muscle tissue, cardiac tissue, vascular tissue, renal tissue, pulmonary tissue, gonadal tissue, hematopoietic tissue.

[0306] Pharmaceutical compositions of some embodiments of the invention may be manufactured by processes well known in the art, e.g., by means of conventional mixing, dissolving, culturing, granulating, dragee-making, levigating, emulsifying, encapsulating, entrapping or lyophilizing processes. For example, manufacturing of toxoplasma can be by culturing the toxoplasma in cell cultures.

[0307] Pharmaceutical compositions for use in accordance with some embodiments of the invention thus may be formulated in conventional manner using one or more physiologically acceptable carriers comprising excipients and auxiliaries, which facilitate processing of the active ingredients into preparations which, can be used pharmaceutically. Proper formulation is dependent upon the route of administration chosen.

[0308] For injection, the active ingredients of the pharmaceutical composition may be formulated in aqueous solutions, preferably in physiologically compatible buffers such as Hank's solution, Ringer's solution, or physiological salt buffer. For transmucosal administration, penetrants appropriate to the barrier to be permeated are used in the formulation. Such penetrants are generally known in the art.

[0309] For oral administration, the pharmaceutical composition can be formulated readily by combining the active compounds with pharmaceutically acceptable carriers well known in the art. Such carriers enable the pharmaceutical composition to be formulated as tablets, pills, dragees, capsules, liquids, gels, syrups, foodstuff, slurries, suspensions, and the like, for oral ingestion by a patient. Pharmacological preparations for oral use can be made using a solid excipient, optionally grinding the resulting mixture, and processing the mixture of granules, after adding suitable auxiliaries if desired, to obtain tablets or dragee cores. Suitable excipients are, in particular, fillers such as sugars, including lactose, sucrose, mannitol, or sorbitol; cellulose preparations such as, for example, maize starch, wheat starch, rice starch, potato starch, gelatin, gum tragacanth, methyl cellulose, hydroxypropylmethyl-cellulose, sodium carbomethylcellulose; and/or physiologically acceptable polymers such as polyvinylpyrrolidone (PVP). If desired, disintegrating agents may be added, such as cross-linked polyvinyl pyrrolidone, agar, or alginic acid or a salt thereof such as sodium alginate.

[0310] Dragee cores are provided with suitable coatings. For this purpose, concentrated sugar solutions may be used which may optionally contain gum arabic, talc, polyvinyl pyrrolidone, carbopol gel, polyethylene glycol, titanium dioxide, lacquer solutions and suitable organic solvents or solvent mixtures. Dyestuffs or pigments may be added to the tablets or dragee coatings for identification or to characterize different combinations of active compound doses.

[0311] Pharmaceutical compositions which can be used orally, include push-fit capsules made of gelatin as well as soft, sealed capsules made of gelatin and a plasticizer, such as glycerol or sorbitol. The push-fit capsules may contain the active ingredients in admixture with filler such as lactose, binders such as starches, lubricants such as talc or magnesium stearate and, optionally, stabilizers. In soft capsules, the active ingredients may be dissolved or suspended in suitable liquids, such as fatty oils, liquid paraffin, or liquid polyethylene glycols. In addition, stabilizers may be added. All formulations for oral administration should be in dosages suitable for the chosen route of administration.

[0312] For buccal administration, the compositions may take the form of tablets or lozenges formulated in conventional manner.

[0313] For administration by nasal inhalation, the active ingredients for use according to some embodiments of the invention are conveniently delivered in the form of an aerosol spray presentation from a pressurized pack or a nebulizer with the use of a suitable propellant, e.g., dichlorodifluoromethane, trichlorofluoromethane, dichloro-tetrafluoroethane or carbon dioxide. In the case of a pressurized aerosol, the dosage unit may be determined by providing a valve to deliver a metered amount. Capsules and cartridges of, e.g., gelatin for use in a dispenser may be formulated containing a powder mix of the compound and a suitable powder base such as lactose or starch.

[0314] The pharmaceutical composition described herein may be formulated for parenteral administration, e.g., by bolus injection or continuous infusion. Formulations for injection may be presented in unit dosage form, e.g., in ampoules or in multidose containers with optionally, an added preservative. The compositions may be suspensions, solutions or emulsions in oily or aqueous vehicles, and may contain formulatory agents such as suspending, stabilizing and/or dispersing agents.

[0315] Pharmaceutical compositions for parenteral administration include aqueous solutions of the active preparation in water-soluble form. Additionally, suspensions of the active ingredients may be prepared as appropriate oily or water based injection suspensions. Suitable lipophilic solvents or vehicles include fatty oils such as sesame oil, or synthetic fatty acids esters such as ethyl oleate, triglycerides or liposomes. Aqueous injection suspensions may contain substances, which increase the viscosity of the suspension, such as sodium carboxymethyl cellulose, sorbitol or dextran. Optionally, the suspension may also contain suitable stabilizers or agents which increase the solubility of the active ingredients to allow for the preparation of highly concentrated solutions.

[0316] Alternatively, the active ingredient may be in powder form for constitution with a suitable vehicle, e.g., sterile, pyrogen-free water based solution, before use.

[0317] The pharmaceutical composition of some embodiments of the invention may also be formulated in rectal compositions such as suppositories or retention enemas, using, e.g., conventional suppository bases such as cocoa butter or other glycerides.

[0318] Pharmaceutical compositions suitable for use in context of some embodiments of the invention include compositions wherein the active ingredients are contained in an amount effective to achieve the intended purpose. More specifically, a therapeutically effective amount means an amount of active ingredients (e.g., the nucleic acid construct, the nucleic acid construct system or the toxoplasma transformed with the nucleic acid construct or with the nucleic acid construct system of some embodiments of the invention) effective to prevent, alleviate or ameliorate symptoms of a disorder (e.g., a disorder affecting the central nervous system of the subject) or prolong the survival of the subject being treated.

[0319] Determination of a therapeutically effective amount is well within the capability of those skilled in the art, especially in light of the detailed disclosure provided herein.

[0320] For any preparation used in the methods of the invention, the therapeutically effective amount or dose can be estimated initially from in-vitro assays, ex-vivo assays, cell culture assays, and/or animal models. For example, a dose can be formulated in animal models to achieve a desired concentration or titer. Such information can be used to more accurately determine useful doses in humans.

[0321] Toxicity and therapeutic efficacy of the active ingredients described herein can be determined by standard pharmaceutical procedures in vitro, in cell cultures or experimental animals. The data obtained from these in vitro and cell culture assays and animal studies can be used in formulating a range of dosage for use in human. The dosage may vary depending upon the dosage form employed and the route of administration utilized. The exact formulation, route of administration and dosage can be chosen by the individual physician in view of the patient's condition. (See e.g., Fingl, et al., 1975, in “The Pharmacological Basis of Therapeutics”, Ch. 1 p.1).

[0322] Dosage amount and interval may be adjusted individually to provide tissue levels (e.g., brain levels) of the active ingredient which are sufficient to induce or suppress the biological effect (minimal effective concentration, MEC). The MEC may vary for each preparation, but can be estimated from in vitro data. Dosages necessary to achieve the MEC will depend on individual characteristics and route of administration. Detection assays can be used to determine plasma, tissue or CSF (cerebro-spinal fluid) concentrations.

[0323] Depending on the severity and responsiveness of the condition to be treated, dosing can be of a single or a plurality of administrations, with course of treatment lasting from several days to several weeks, or e.g., a lifetime in the case of chronic diseases, or until cure is effected or diminution of the disease state is achieved.

[0324] For example, for chronic diseases, the dosing can be adjusted until symptoms are managed, stabilized and/or ameliorated.

[0325] The amount of a composition to be administered will, of course, be dependent on the subject being treated, the severity of the affliction, the manner of administration, the immune state of the subject, the judgment of the prescribing physician, etc.

[0326] Compositions of some embodiments of the invention may, if desired, be presented in a pack or dispenser device, such as an FDA approved kit, which may contain one or more unit dosage forms containing the active ingredient. The pack may, for example, comprise metal or plastic foil, such as a blister pack. The pack or dispenser device may be accompanied by instructions for administration. The pack or dispenser may also be accommodated by a notice associated with the container in a form prescribed by a governmental agency regulating the manufacture, use or sale of pharmaceuticals, which notice is reflective of approval by the agency of the form of the compositions or human or veterinary administration. Such notice, for example, may be of labeling approved by the U.S. Food and Drug Administration for prescription drugs or of an approved product insert. Compositions comprising a preparation of the invention formulated in a compatible pharmaceutical carrier may also be prepared, placed in an appropriate container, and labeled for treatment of an indicated condition, as is further detailed above.

[0327] As used herein the term “about” refers to ±10%

[0328] The terms “comprises”, “comprising”, “includes”, “including”, “having” and their conjugates mean “including but not limited to”.

[0329] The term “consisting of” means “including and limited to”.

[0330] The term “consisting essentially of” means that the composition, method or structure may include additional ingredients, steps and/or parts, but only if the additional ingredients, steps and/or parts do not materially alter the basic and novel characteristics of the claimed composition, method or structure.

[0331] As used herein, the singular form “a”, “an” and “the” include plural references unless the context clearly dictates otherwise. For example, the term “a compound” or “at least one compound” may include a plurality of compounds, including mixtures thereof. Throughout this application, various embodiments of this invention may be presented in a range format. It should be understood that the description in range format is merely for convenience and brevity and should not be construed as an inflexible limitation on the scope of the invention. Accordingly, the description of a range should be considered to have specifically disclosed all the possible subranges as well as individual numerical values within that range. For example, description of a range such as from 1 to 6 should be considered to have specifically disclosed subranges such as from 1 to 3, from 1 to 4, from 1 to 5, from 2 to 4, from 2 to 6, from 3 to 6 etc., as well as individual numbers within that range, for example, 1, 2, 3, 4, 5, and 6. This applies regardless of the breadth of the range.

[0332] Whenever a numerical range is indicated herein, it is meant to include any cited numeral (fractional or integral) within the indicated range. The phrases “ranging/ranges between” a first indicate number and a second indicate number and “ranging/ranges from” a first indicate number “to” a second indicate number are used herein interchangeably and are meant to include the first and second indicated numbers and all the fractional and integral numerals therebetween.

[0333] As used herein the term “method” refers to manners, means, techniques and procedures for accomplishing a given task including, but not limited to, those manners, means, techniques and procedures either known to, or readily developed from known manners, means, techniques and procedures by practitioners of the chemical, pharmacological, biological, biochemical and medical arts.

[0334] As used herein, the term “treating” includes abrogating, substantially inhibiting, slowing or reversing the progression of a condition, substantially ameliorating clinical or aesthetical symptoms of a condition or substantially preventing the appearance of clinical or aesthetical symptoms of a condition.

[0335] When reference is made to particular sequence listings, such reference is to be understood to also encompass sequences that substantially correspond to its complementary sequence as including minor sequence variations, resulting from, e.g., allelic variation, sequencing errors, cloning errors, or other alterations resulting in base substitution, base deletion or base addition, provided that the frequency of such variations is less than 1 in 50 nucleotides, alternatively, less than 1 in 100 nucleotides, alternatively, less than 1 in 200 nucleotides, alternatively, less than 1 in 500 nucleotides, alternatively, less than 1 in 1000 nucleotides, alternatively, less than 1 in 5,000 nucleotides, alternatively, less than 1 in 10,000 nucleotides.

[0336] It is appreciated that certain features of the invention, which are, for clarity, described in the context of separate embodiments, may also be provided in combination in a single embodiment. Conversely, various features of the invention, which are, for brevity, described in the context of a single embodiment, may also be provided separately or in any suitable subcombination or as suitable in any other described embodiment of the invention. Certain features described in the context of various embodiments are not to be considered essential features of those embodiments, unless the embodiment is inoperative without those elements.

[0337] Various embodiments and aspects of the present invention as delineated hereinabove and as claimed in the claims section below find experimental support in the following examples.

### EXAMPLES

[0338] Reference is now made to the following examples, which together with the above descriptions illustrate some embodiments of the invention in a non limiting fashion.

[0339] Generally, the nomenclature used herein and the laboratory procedures utilized in the present invention include molecular, biochemical, microbiological and recombinant DNA techniques. Such techniques are thoroughly explained in the literature. See, for example, “Molecular Cloning: A laboratory Manual” Sambrook et al., (1989); “Current Protocols in Molecular Biology” Volumes I-III Ausubel, R. M., ed. (1994); Ausubel et al., “Current Protocols in Molecular Biology”, John Wiley and Sons, Baltimore, Maryland (1989); Perbal, “A Practical Guide to Molecular Cloning”, John Wiley & Sons, New York (1988); Watson et al., “Recombinant DNA”, Scientific American Books, New York; Birren et al. (eds) “Genome Analysis: A Laboratory Manual Series”, Vols. 1-4, Cold Spring Harbor Laboratory Press, New York (1998); methodologies as set forth in U.S. Pat. Nos. 4,666,828; 4,683,202; 4,801,531; 5,192,659 and 5,272,057; “Cell Biology: A Laboratory Handbook”, Volumes I-III Cellis, J. E., ed. (1994); “Current Protocols in Immunology” Volumes I-III Coligan J. E., ed. (1994); Stites et al. (eds), “Basic and Clinical Immunology” (8th Edition), Appleton & Lange, Norwalk, CT (1994); Mishell and Shiigi (eds), “Selected Methods in Cellular Immunology”, W. H. Freeman and Co., New York (1980); available immunoassays are extensively described in the patent and scientific literature, see, for example, U.S. Pat. Nos. 3,791,932; 3,839,153; 3,850,752; 3,850,578; 3,853,987; 3,867,517; 3,879,262; 3,901,654; 3,935,074; 3,984,533; 3,996,345; 4,034,074; 4,098,876; 4,879,219; 5,011,771 and 5,281,521; “Oligonucleotide Synthesis” Gait, M. J., ed. (1984); “Nucleic Acid Hybridization” Hames, B. D., and Higgins S. J., eds. (1985); “Transcription and Translation” Hames, B. D., and Higgins S. J., Eds. (1984); “Animal Cell Culture” Freshney, R. I., ed. (1986); “Immobilized Cells and Enzymes” IRL Press, (1986); “A Practical Guide to Molecular Cloning” Perbal, B., (1984) and “Methods in Enzymology” Vol. 1-317, Academic Press; “PCR Protocols: A Guide To Methods And Applications”, Academic Press, San Diego, CA (1990); Marshak et al., “Strategies for Protein Purification and Characterization—A Laboratory Course Manual” CSHL Press (1996); all of which are incorporated by reference as if fully set forth herein. Toxoplasma gondii: the model apicomplexan—Perspectives and methods. LM Weiss, K Kim, 2011. Other general references are provided throughout this document. The procedures therein are believed to be well known in the art and are provided for the convenience of the reader. All the information contained therein is incorporated herein by reference.

### General Materials and Experimental Methods

Toxoplasma gondii Culture

[0340] Parasites were grown on human foreskin fibroblasts (HFF) in Dulbecco's modified Eagle's medium (DMEM) supplemented with 2 mM L-Glutamine, Penicillin and Streptomycin or Gentamicin antibiotic mix and 10% Fetal Bovine Serum (FBS), thereby referred to as “complete DMEM media”. Cultures were monitored daily, and the parasites were passaged by transferring a drop of the supernatant of a lysed dish or a drop of syringe-released intracellular parasites into a fresh dish with HFF.

Generation of T. gondii Expression Vectors for Expression of Heterologous Polypeptides Comprised of a Toxoplasma Secreted Protein Fused to a Pharmaceutical Polypeptide-of-Interest

[0341] In order to generate stable transgenic lines of T. gondii that express specific therapeutic proteins, the present inventors first generated T. gondii expression constructs by molecular cloning. The constructs include a long open reading frame (ORF), which consists of Toxofilin cDNA [SEQ ID NO: 4481] or GRA16 cDNA [SEQ ID NO: 4472] followed by an HA tag coding sequence (SEQ ID NO: 4474) followed by the therapeutic mammalian cDNA of interest, such as the murine MeCP2 isoform 1 [SEQ ID NO: 4476]; the human ASPA [SEQ ID NO: 4483], the human SMN1 [SEQ ID NO: 4479]; the human PARK2 [SEQ ID NO: 4478]; the human GDNF [SEQ ID NO: 4489]; the human TFEB (Transcription factor EB) isoform 1 [SEQ ID NO: 4600] sequence; the human GALC isoform 1 [SEQ ID NO:4486 or SEQ ID NO:4601 (GALC version 2); the GALC-TAT that includes a Glycine flexible linker (Gly) [SEQ ID NO:4490] followed by a protein transduction domain (TAT) that facilitates nonclassical trafficking across membranes in order to aid the targeting of GALC to the lysosome of the host cell (SEQ ID NO: 4488) or the “mutated GALC-TAT” (GALC-TAT that harbors a deletion) (SEQ ID NO: 4487). The cDNA of interest can also be codon-optimized according to the codon usage of T. gondii in order to increase efficiency of expression, stability and localization of the heterologous polypeptide in T. gondii (such as with the codon optimized murine MeCP2 isoform 1 [SEQ ID NO: 4477], codon optimized human ASPA [SEQ ID NO: 4602], codon optimized human GALC isoform 1 [SEQ ID NO: 4603] and codon optimized human TFEB isoform 1 [SEQ ID NO: 4604] codon optimized for expression in T. gondii). The T. gondii expression vector also includes regulatory elements from the same or other Toxoplasma genes that guarantee its correct expression and targeting. Upstream of the ORF is the endogenous 5′ regulatory sequence which can be either the endogenous 5′ regulatory sequence of the Toxofilin gene, here referred to as the “Toxofilin promoter” or “Toxofilin 5′-UTR” (SEQ ID NO: 4482) or the endogenous 5′ regulatory sequence of the GRA16 gene, here referred to as the “GRA16 promoter” or “GRA16 5′-UTR” (SEQ ID NO: 4473). Downstream of the ORF is the 3′-UTR of the abundant dense granule protein GRA2 (SEQ ID NO: 4491; FIG. 3). The expression vector also included a separate ORF containing the selectable markers HXGPRT [SEQ ID NO: 4475] or DHFR-TS [SEQ ID NO: 4484 or 4606] or mCherry [SEQ ID NO: 4608], surrounded by the 5′ UTR of DHFR-TS (upstream) [SEQ ID NO:4492] and 3′ UTR of DHFR-TS (downstream) [SEQ ID NO: 4493 or 4609].

Generation of Transgenic T. gondii

[0342] T. gondii of the type I strains RH or RHAHX or the type II strains Prugniaud, Prugniaud-GFP-Luciferase or Prugniaud ΔHPT (also known as Prugniaud ΔHX) were used for generating transgenic strains. Extracellular Tachyzoites were collected or mechanically egressed using a 22-26 gauge needle, filtered from cellular debris, pelleted and resuspended in 300 μl cytomix buffer (120 mM KCl, 0.15 mM CaCl₂) 10 mM K₂HPO₄/KH₂PO₄ pH 7.6, 25 mM HEPES pH 7.6, 2 mM EGTA, 5 mM MgCl₂) with freshly added 2 mM ATP and 5 mM GSH in 30 μl each (360 μl total). 20-60 g plasmid DNA, or DNA linearized with the enzyme ScaI was transfected into the tachyzoites by electroporation with a BTX ECM electroporator. A few drops of the transfected cells were transferred onto IFA wells (immunofluorescence assay wells of a 24-well plate with HFF cells seeded on glass coverslips) and immunofluorescently stained for assessment of transfection efficiency and transient protein expression (expression from plasmid DNA). The rest of the transfected parasites were transferred onto a fresh flask with HFF in complete DMEM. If a drug-resistance selectable marker was used, the next day media was changed to fresh media containing the drug used for selection (1 μM pyrimethamine for DHFR-TS selection or 25 g/ml mycophenolic acid+50 g/ml xanthine for HXGPRT selection). Starting from the day the parasites started egressing from the HFF, drops of the supernatant containing extracellular parasites were passed every 1-2 days into a second flask of HFF in selective media containing the selection drug. When the parasites in the second flask started egressing from the HFF, drops of the supernatant were passed every 1-2 days from the second flask into a third flask, and so on. If a fluorescent protein selectable marker was used, when the parasites in the second flask egressed out of about 50%-90% of the HFF cells, the media with extracellular parasites was collected, filtered from cell debris and sorted using a FACS machine. Parasites emitting fluorescence corresponding to the fluorescent protein used for selection were collected and passed into the next flask of HFF in complete DMEM media. After the 3rd-5th flask started lysing (about 2-5 weeks), the parasites were considered a “stable pool” containing parasites that integrated the DNA construct into their genome. A drop of the stable pool was passed onto IFA (immuno fluorescent assay) wells and immunofluorescently stained to assess percentage of construct-positive parasites in the pool, protein expression and protein localization in the genome-integrated (“stable”) parasites (genomic expression). Clonal lines were established by manual sorting by limiting dilutions or by FACS sorting one parasite per well in 96 well plates. Plates were kept undisturbed for 5-10 days, after which they were screened by eye using a bright field microscope to detect wells with a single plaque which is assumed to originate from a single parasite. Wells with a single plaque were mixed vigorously with a pipette and 50 μl of the mixture was passed to a new dish and to a PCR tube. Lysates were made by pelleting the collected cells in the PCR tubes, resuspending them in 10 μl lysis buffer consisted of 10% proteinase K in TE buffer and incubation in 60° C. for 60 minutes followed by 95° C. for 10 minutes in a thermocycler. One micorliter (1 μl) of the lysates were used as template for PCR screening using primers specific for the genetic construct. PCR-positive clones were passed onto IFA wells, fixed, immunofluorescently stained and analysed using a fluorescent microscope and polarized light microscope for protein expression and protein localization in each clone.

### Antibodies

[0343] Antibodies and the respective concentrations they were used in, are as follows: anti-HA (Roche, IFA: 1:1000, WB: 1:1000), anti-IMC-1 (gift from Prof. Dominique Soldati-Favre, IFA: 1:1000-1:2000), anti-MeCP2 (Cell Signaling, IFA: 1:200, WB: 1:1000, IP: 1:26), anti-NeuN (Abcam, IFA: 1:500), anti-NCoR1 (Bethyl Laboratories, WB: 1:1000), anti-TBL1 (Abcam, WB: 1:1000), Alexa Fluor anti-rat 488 and 594 (Invitrogen, IFA: 1:1000), Alexa Fluor anti-rabbit 488 and 594 (Invitrogen, IFA: 1:1000), Alexa Fluor anti-mouse 488 and 594 (Invitrogen, IFA: 1:1000).

### Example 1

Generation of T. Gondii Construct which Leads to the Expression, Localization to Parasite's Secretory Organelles and Secretion of a Therapeuic Protein-of-Interest into the

### Host Cell

### Experimental Procedures

[0344] The constructs were transfected into RH (RHhxgprt) or Pru (Pruhxgprt) strain T. gondii parasites by electroporation. This is followed by a process of selection for parasites expressing the selection markers (either Pyrimethamine selection for a construct containing DHFR-TS (SEQ ID NO: 4484), which was co-transfected with the construct-of-interest), or using MPA+Xanthine for selection based on expression of HXGPRT (SEQ ID NO:4475), cloning by limiting dilutions or flow cytometry, and PCR-based screening. The positive clones were verified by Western Blot analysis and by immunofluorescence staining to characterize the expression and specific localization of the HA-tagged therapeutic protein in the secretory rhoptry organelles, dense granule organelles, parasitophorous vacuole space, parasitophorous vacuole membrane, or in the host cells. The verified positive lines were further maintained on HFF (human foreskin fibroblast) cells.

### Experimental Results

[0345] Generation of constructs and T. gondii strains for delivery of the therapeutic proteins Galactocerebrosidase, Galactocerebrosidase-TAT, GDNF, Aspartoacylase, MeCP2, Survival motor neuron protein and E3 ubiquitin-protein ligase parkin—The results demonstrate that T. gondii can be engineered to express heterologous (mammalian, e.g., human) therapeutic proteins fused to an endogenous protein of the parasite. Using this approach, the present inventors have generated 3 novel stable T. gondii transgenic lines expressing the 3 human proteins associated with common neuropathologies, Galactocerebrosidase-TAT (the mutated GALC-TAT SEQ ID NO: 4487), MeCP2 (codon optimized SEQ ID NO: 4477) and GDNF (SEQ ID NO: 4489), and additional 4 mixed-population pools containing stable T. gondii transgenic parasites expressing the 3 human proteins associated with common neuropathologies Galactocerebrosidase (GALC, isoform 1, SEQ ID NO:4486), Galactocerebrosidase-TAT (the WT GALC-TAT SEQ ID NO: 4488), Aspartoacylase (ASPA SEQ ID NO:4483) and Survival Motor Neuron Protein (SMN1, SEQ ID NO: 4479).

[0346] Improving secretion and uptake of the therapeutic protein by a viral protein transduction domain—In order to improve secretion of the Galactocerebrosidase protein from the host cell to the extracellular space, as well as the uptake of the protein by neighboring cells, the present inventors have fused Galactocerebrosidase to a viral protein transduction domain (PTD). Tat-PTD has been previously shown to significantly increase (by 6 fold) the cross-correction efficiency of Galactocerebrosidase through enhancing both the secretion and uptake of the enzyme in a cell culture model system (Meng, X.-L., et al., 2013).

[0347] Localization of the therapeutic proteins Galactocerebrosidase-TAT, Aspartoacylase, MeCP2 and Survival Motor Neuron Protein to T. gondii rhoptries secretory organelles—The results demonstrate that T. gondii can localize heterologous (mammalian, e.g., human) therapeutic proteins to the parasite's rhoptries secretory organelles (FIG. 4A), from which they could potentially be released into the host cell cytoplasm and localize to target sites within the infected cell. The fusion proteins containing Galactocerebrosidase-TAT, Aspartoacylase, MeCP2 and Survival Motor Neuron Protein localized to the parasite rhoptries as reported for previous Toxofilin fusions that evidently made their way into the host cell. This was proven by immunofluorescence staining (IFAs) (FIGS. 4B-4I).

[0348] Thus, the present inventors have succeeded in demonstrating that T. gondii may be engineered to express heterologous (mammalian, e.g., human) proteins fused to an endogenous protein of the parasite, and that these proteins localize to the parasite's rhoptries secretory organelles. The present inventors have engineered the human proteins to be fused to Toxofilin, an endogenous protein that is naturally secreted into host cells by the parasites, which allows to “ride” on the parasite's protein secretion machinery for the targeting and secretion of proteins of interest (e.g., a therapeutic protein). This is an important milestone on the path to suggesting T. gondii as a feasible basis for this technology.

[0349] Using this approach, the present inventors have generated a novel stable T. gondii transgenic line, expressing and localizing to the rhoptries the human protein associated with Krabbe disease Galactocerebrosidase-TAT (the mutated GALC-TAT SEQ ID NO: 4487), and additional 4 mixed-population pools containing stable T. gondii transgenic parasites expressing and localizing to the rhoptries the 3 human proteins associated with common neuropathologies Galactocerebrosidase-TAT (the WT GALC-TAT SEQ ID NO: 4488), Aspartoacylase (ASPA SEQ ID NO:4483), MeCP2 (SEQ ID NO:4477) and Survival Motor Neuron Protein (SMN1, SEQ ID NO: 4479).

[0350] Localization of the therapeutic proteins Aspartoacylase, MeCP2 and Survival Motor Neuron Protein to T. gondii Dense granules secretory organelles and parasitophorous vacuolar space—The results demonstrate that T. gondii can localize the heterologous (mammalian) human therapeutic proteins to the parasite's Dense granules secretory organelles and parasitophorous vacuolar space (FIG. 5A), from which they could be released into the host cell cytoplasm and localize to target sites within the infected cell (FIGS. 5B-5I). As this approach of using sequences from dense granule proteins to drive the secretion of a protein of interest from the parasite dense granules is unprecedented, this is the first time mammalian proteins have been found to be secreted into the parasitophorous vacuolar space by fusion to a dense granule protein (GRA16). This was proven by immunofluorescence staining (IFAs) (FIGS. 5B-5I). The fusion proteins are then expected to pass through the parasitophorous vacuolar membrane into the host cell, based on the known localization of the native GRA16 protein they are fused to (Bougdour et al. 2013).

[0351] Thus, the present inventors have succeeded in demonstrating that T. gondii may be engineered to express heterologous (mammalian) proteins fused to an endogenous protein of the parasite, and that these proteins localize to the parasite's Dense granules secretory organelles and parasitophorous vacuolar space. The present inventors have engineered the human proteins to be fused to GRA16, an endogenous protein that is naturally secreted into host cells by the parasites, which allows to “ride” on the parasite's protein secretion machinery for the targeting and secretion of proteins of interest (e.g., a therapeutic protein). This is an important milestone on the path to suggesting T. gondii as a feasible basis for this technology.

[0352] Using this approach, the present inventors have generated a novel stable T. gondii transgenic line, expressing and localizing to the Dense granule secretory organelles and parasitophorous vacuolar space the human protein associated with Rett Syndrome MeCP2, and additional 2 mixed-population pools containing stable T. gondii transgenic parasites expressing and localizing to the Dense granule secretory organelles and parasitophorous vacuolar space the two human proteins associated with common neuropathologies Aspartoacylase and Survival Motor Neuron Protein.

[0353] Secretion of the therapeutic protein MeCP2 from the transgenic parasite into the host cell, and localization in the region of activity in the host cell, the nucleus—The results demonstrate that protein fusions consisting of a pharmaceutical polypeptide fused to a Toxoplasma gondii secreted polypeptide (and specifically here, the therapeutic protein MeCP2 fused to the T. gondii dense granule protein GRA16), can be released from the parasite into the host cell and translocate to the therapeutic protein's target site in the host cell (here, the nucleus). The fusion protein containing MeCP2 localized to the host cell nucleus as shown by immunofluorescence staining (IFAs) (FIGS. 5F-5I). This is an important milestone on the path to suggesting T. gondii as a feasible basis for this technology.

[0354] Using this approach, the present inventors have generated novel stable T. gondii transgenic lines, expressing and localizing to the host cell nucleus the human protein associated with Rett Syndrome, MeCP2 (FIGS. 5F-5I).

### Example 2

### Rescue of Galactocerebrosidase Deficiency Through Parasitic Delivery

[0355] The Galactocerebrosidase enzymatic activity assay which is based on the enzymatic breakup of a synthetic fluorescent substrate of Galactocerebrosidase named 6-Hexadecanoylamino-4-methylumbelliferyl-beta-D-galactoside (6HMU-beta-D-galactoside) is based on the manufacturer's protocol [Otto P. van Diggelen. MOSCERDAM SUBSTRATES, Laboratory protocol for enzyme analysis for Krabbe disease; Galactocerebrosidase]. Using Krabbe patient-derived fibroblasts, the assay is used to evaluate the ability of the GALC- and GALC-TAT-expressing parasite's to rescue Krabbe disease phenotypes in culture. Untreated Krabbe disease cells (Krabbe patient-derived fibroblasts), Krabbe disease cells transfected with sham vector (empty human expression vector) and/or Krabbe disease cells infected with T. gondii parasites not expressing GALC are used as negative controls. Positive controls are wild type (WT) cell lines, or the Krabbe disease cells transfected with human expression vectors driving the expression of either the standalone (HA-tagged) GALC or GALC-TAT gene or a Toxofilin/GRA16-fused GALC or GALC-TAT gene, identical to the fusion expressed by the transgenic parasites tested. This allows ruling out the possibility that any negative results could be caused by a lack of sufficient effect of the protein itself, or from disruption of the therapeutic protein's activity by the fusion of Toxofilin or GRA16 to the N-terminus of the therapeutic protein, and thus allows quantifiable and direct inference of the efficiency of the parasitic delivery system.

[0356] The assay is used to characterize the Galactocerebrosidase-expressing parasites' ability to rescue the Galactocerebrosidase-deficiency shown in Krabbe disease patient-derived fibroblasts. This experiment demonstrates the transgenic parasites' ability to rescue Krabbe disease by delivering the supplementary protein to cells in culture.

### Example 3

### Rescue of MECP2 Deficiency Through Parasitic Delivery

[0357] Neural and glial cells derived from mouse models of Rett syndrome that harbor a mutation or deletion of the MECP2 gene present an array of abnormal morphological and molecular characteristics. [Percy, A. Rett syndrome: coming to terms with treatment. Adv. Neurosci. (2014), [de la Torre-Ubieta et al. Advancing the understanding of autism disease mechanisms through genetics. Nat Med. 2016].

[0358] Using a Rett Syndrome cell culture model, the quantitative scoring of the molecular and morphological characteristic phenotypes of Rett syndrome is used to evaluate the ability of the MeCP2-expressing parasite's to rescue Rett Syndrome phenotypes in culture. Untreated Rett Syndrome model cells, Rett Syndrome model cells transfected with sham vector and/or Rett Syndrome model cells infected with T. gondii parasites not expressing MeCP2 are used as negative controls. Positive controls are WT cell lines and Rett Syndrome model cells transfected with human expression vectors driving the expression of either the standalone (HA-tagged) MECP2 coding sequence or a Toxofilin/GRA16-fused MECP2 coding sequence identical to the fusion expressed by the transgenic parasites tested. This allows ruling out the possibility that any negative results could be caused by a lack of sufficient effect of the protein itself, or from disruption of the therapeutic protein's activity by the fusion of Toxofilin or GRA16 to the N-terminus of the therapeutic protein, and thus allows quantifiable and direct inference of the efficiency of the parasitic delivery system.

[0359] The assay is used to characterize the MeCP2-expressing parasites' ability to rescue the MeCP2-deficiency shown in a Rett Syndrome cell culture model. This experiment demonstrates the transgenic parasites' ability to rescue a Rett Syndrome by delivering the supplementary protein to cells in culture.

### Example 4

### Testing Therapeutic Potential of the Transgenic Parasite Lines in Animal Models

[0360] The transgenic lines of the parasite are tested for their ability to affect phenotypes in whole organism. Testing the transgenic parasites in mice allows the assessment of the system in the presence of an immune system and a functional blood brain barrier (BBB). The transgenic T. gondii parasites are administered to the respective animal model of the condition being tested intranasally, enterally (such as orally), subcutaneously, intra-muscularly, intravenously, intradermally, intraperitoneally, intracranially or intracerebrally. The transgenic T. gondii parasites are administered in the form of tachyzoites, bradyzoite tissue cysts or oocysts.

[0361] Following inoculation with the parasites, the animal model are characterized and assessed for the manifestation of phenotypes related to the condition studied (such as pathological phenotypes of the disease). Phenotypes include behavioral, morphological and molecular phenotypes. The effects of the transgenic parasites are revealed by comparison to animals treated with parasites not expressing the therapeutic polypeptide and to sham-treated animals.

[0362] For instance, mice model of Rett Syndrome treated with T. gondii parasites expressing the therapeutic protein MeCP2 are assessed by known phenotypes of the disease which include impaired social interaction, increased scent marking, hindlimb clasping, reduced lifspan, anxiety, respiratory problem, hypoactivity, impaired motor coordination, miRNA-mediated IGF1 deficit, decreased level of BDNF, impaired cortical plasticity, glial dysfunction, GABAergic neuronal dysfunction, decreased soma size, decreased dendritic spine density, decreased synapse number, decreased activity (Ca2+ imaging), decreased sEPSC and sTPSC frequency and amplitude, decreased Tuj1+ cell number, decreased PAX6, SCN1A/1B expression, decreased dendrite complexity in cortical neurons, decreased AP frequency in cortical neurons, decreased total transcription in cortical neurons, decreased expression of neuronal, synaptic, highly-expressed genes, immediate early genes and mitochondrial genes in cortical neurons, decreased mRNA translation in cortical neurons, decreased BDNF secretion from cortical neurons, decreased AKT/mTOR pathway activity in cortical neurons and decreased oxygen consumption and maximal respiration in cortical neurons [de la Torre-Ubieta et al. Advancing the understanding of autism disease mechanisms through genetics. Nat Med.2016.]

### Example 5

### Generation of Constructs and T. Gondii Strains for Delivery of Customized Transcription Activator-Like Effectors (Tales)

[0363] T. gondii are engineered to express and secrete customized Transcription activator-like effectors (TALE). Customized TALEs can be used for a wide variety of genome engineering applications, including transcriptional modulation and genome editing. The DNA recognition and binding region of TALEs are made up of tandem repeats of 34-aa sequences (monomers) which determine the sequence of the recognized DNA sequence. There are 4 types of monomers which differ in their repeat variable diresidues (RVDs) which determines the nucleotide they recognize. The monomer termed “NI” (SEQ ID NO: 4508) is specific for the “A” nucleotide; the monomer termed “HD” (SEQ ID NO: 4495) is specific to the “C” nucleotide”; the monomer termed “NG” (SEQ ID NO: 4509) is specific to the “T” nucleotide and the monomer termed “NN” (SEQ ID NO: 4494) is specific the “G” or “A” nucleotide. More recently, the additional RVD NH (SEQ ID NO:4504) was shown to provide higher G-specificity. The tandem repeat DNA-binding domain always ends with a half-length repeat (0.5 repeat). Customized TALE DNA-binding domains can be used to generate custom TALE transcription factors (TALE-TFs) and modulate the transcription of endogenous genes from the genome, by fusion to the synthetic VP64 transcriptional activator. Customized TALE DNA-binding domains can also be used to generate custom TALE nucleases (TALENs) and can be used to generate site-specific double-strand breaks to facilitate genome editing through nonhomologous repair or homology directed repair, by fusion to the catalytic domain of FokI endonuclease. The TALEs are made by constructing a DNA-binding domain from the monomers (SEQ IDs NO:4508, 4509, 4494, 4495 and 4504), which is inserted into a TALEN backbone or TALE-TF backbone. Because the backbones also include the 0.5 repeat at the end of the DNA binding domain, there are 4 types of TALEN backbones (e.g., SEQ ID NOs:4500, 4501, 4502, and 4503), as well as 4 TALE-TF backbones (e.g., SEQ ID NO:4496, 4497, 4498, and 4499). The backbones also contain cytomegalovirus promoter (CMV), nonrepetitive N terminus from the Hax3 TALE (N-term), nonrepetitive C terminus from the Hax3 TALE (C-term), type IIs restriction sites used for the insertion of custom TALE DNA-binding domains (such as BsaI), negative selection cassette containing the ccdB negative selection gene and chloramphenicol resistance gene (ccdB+CmR), nuclear localization signal (NLS), and either a catalytic domain from the FokI endonuclease (FokI) or synthetic transcriptional activator derived from VP16 protein of herpes simplex virus (VP64) followed by 2A self-cleavage linker (2A) and enhanced green fluorescent protein (EGFP). All are followed by a polyadenylation signal (polyA signal) (Sanjana et al., A transcription activator-like effector toolbox for genome engineering, 2012). The resulting TALE sequences are inserted downstream of the coding sequence of a T. gondii endogenous secreted polypeptide as described in the GENERAL MATERIALS AND EXPERIMENTAL METHODS hereinabove, and the resulting constructs are transfected into T. gondii to produce transgenic T. gondii strains that express and secreted the TALE.

[0364] For example, in order to target the TACGTACG (SEQ ID NO: 4505) sequence in a genome of a subject in need thereof, the TALE nuclease construct or the TALE transcription factor construct can be used. In the open reading frame of these constructs the monomers which are specific for targeting the exemplary “target sequence” (SEQ ID NO: 4505) are arranged one after the other, as shown schematically in FIG. 6A (for TALE Nuclease) and FIG. 6B (for TALE transcription factor). Sequence information of these constructs is available in the sequence listing (SEQ ID NOs: 4506 and 4507).

### Example 6

Generation of T. Gondii Parasites that Express Mammalian Therapeutic Proteins and Localize them to their Rhoptry Secretory Organelles

[0365] In order to generate T. gondii parasites that express mammalian proteins and target them to their rhoptry secretory organelles the present inventors transfected type I RHAHX tachyzoites or RH (co-transfected with the pDHFR selection plasmid) T. gondii with plasmids containing sequences coding for the protein of interest fused to the rhoptry protein Toxofilin. The mammalian proteins tested in the Toxofilin fusion system were: glial derived neurotrophic factor (GDNF), parkin (PARK2), galactocerebrosidase (GALC), galactocerebrosidase fused to a TAT protein transduction domain (GALC-TAT; SEQ ID NO: 4487), methyl CpG binding protein (MeCP2), aspartoacylase (ASPA) and Survival of motor neuron (SMN1). In an attempt to improve protein expression and targeting, the present invenotrs also tested codon-optimized versions of some of the proteins, including GALC, MECP2, ASPA and the additional gene TFEB which was tested in the codon-optimized form (SEQ ID NO: 4604).

[0366] ASPA (SEQ ID NO: 4483), ASPA codon optimized (SEQ ID NO: 4602), GALC (SEQ ID NOs: 4486 and 4601), GALC-TAT (SEQ ID NO: 4488), PARK2 (SEQ ID NO: 4478), SMN1 (SEQ ID NO: 4479), GDNF (SEQ ID NO:4489), MeCP2 (SEQ ID NO: 4476) and MeCP2 codon optimized (SEQ ID NO:4477) showed variable targeting of the fusion proteins in the parasites, which included rhoptry targeting as well as other patterns of targeting, resembling endoplasmic reticulum, golgi, nucleus, cytoplasm, apicoplast, microneme and other localizations in the parasites (FIGS. 9A-9N).

[0367] GALC-TAT mutated form generated primarily rhoptry-like fusion protein localization. From GALC-TAT mutated the present invenotrs also generated clonal lines that strongly expressed the fusion protein and targeted it to a rhoptries (FIG. 9H).

### Example 7

Generation of T. Gondii Parasites that Express Mammalian Therapeutic Proteins, Localize them to their Dense Granule Secretory Organelles and Secrete them into the Parasitophorous Vacuole

[0368] In order to generate T. gondii parasites that express mammalian proteins and target them to their dense granule secretory organelles type I RHAHX T. gondii were transfected with plasmids containing sequences coding for the protein of interest fused to the dense granule protein GRA16. The mammalian proteins-coding genes tested in the GRA16 fusion system were GALC [human forms (SEQ ID NOs: 4486 and 4601) and codon-optimized (SEQ ID NO: 4603), GALC-TAT (human form SEQ ID NO: 4488), MECP2 (codon-optimized, SEQ ID NO:4477), ASPA [human form (SEQ ID NO:4483) and codon-optimized (SEQ ID NO:4602)], SMN1 (human form, SEQ ID NO: 4479) and TFEB (codon-optimized, SEQ ID NO:4604).

[0369] GALC, GALC codon optimized and GALC-TAT were expressed in the transfected parasites (FIGS. 10E, 10F and 10H). ASPA, ASPA codon optimized, SMN1, MeCP2 codon optimized and TFEB codon optimized were expressed and secreted by the dense granules to the parasitophorous vacuole (FIGS. 10C, 10G, 10D, 10I, 10J).

### Example 8

### Delivery of Mammalian Therapeutic Proteins to Human Fibroblasts in Culture Using Transgenic T. Gondii

[0370] The present inventors have engineered six Type I and Type II Toxoplasma clonal lines which in addition to secreting the fusion protein into the parasitophorous vacuole, were also able to release it from the parasitophorous vacuole and target it to the nucleus of the host cell in amounts detectable by immunofluorescence staining. These clonal lines are: RH GRA16-MECP2 codon optimized (RH GRA16-MECP2opt), RH GRA16-TFEB codon optimized (RH GRA16-TFEBopt), Prugniaud-GFP-Luciferase DHFR-TS GRA16-MECP2 codon optimized (Pru-GFP-LUC GRA16-MECP2opt), Prugniaud-GFP-Luciferase DHFR-TS GRA16-TFEB codon optimized (Pru-GFP-LUC GRA16-TFEBopt), Prugniaud GRA16-MECP2 codon optimized (Pru GRA16-MECP2opt), and Prugniaud GRA16-TFEB codon optimized (Pru GRA16-TFEBopt). In addition to the transgenic lines expressing the fusion proteins, the present inventors also generated 2 control lines expressing the carrier protein GRA16 fused to the HA epitope tag alone: RH GRA16-HA (RH GRA16-HAstop) and Prugniaud GRA16-HA (Pru GRA16-HAstop). As MeCP2 and TFEB are both nuclear proteins, host cell nuclear targeting means they were targeted to their site of activity in the cell. Secretion and host cell nuclear targeting of the proteins in all the lines described above was detected in HFF human fibroblasts by infection of HFF cells in complete DMEM with tachyzoites of the respective line, fixation, immunofluorescence staining and analysis by fluorescence and polarized light microscopy (FIGS. 10B, 10I and 10J).

[0371] In order to quantify the efficiency and the dynamics of GRA16-mediated protein delivery in vitro, the present inventors quantified delivery over time and multiplicity of infection (MOI) for tachyzoites of the three type I lines RH GRA16-HAstop, RH GRA16-MECP2opt and RH GRA16-TFEBopt, as summarized in FIGS. 11A-11C.

### Example 9

### Delivery of Mammalian Therapeutic Proteins to Human Neurons in Culture Using Transgenic T. Gondii

[0372] Immortalized Human Dopaminergic Neuronal Precursor Cells, also known as Lund Human Mesencephalic (LUHMES) cells, were grown in media containing F12 advanced DMEM media supplemented with L-glutamine, N-2 serum-free supplement and βFGF (beta-fibroblast growth factor). The cells were differentiated in culture into morphologically and biochemically mature dopamine-like neurons using F12 advanced DMEM media supplemented with L-glutamine, N-2 serum-free supplement, tetracycline, GDNF and cAMP (Cyclic adenosine monophosphate). On day 6-9 of differentiation (at which point the cells are mature neurons), tachyzoites of the clonal lines RH GRA16-MECP2opt, RH GRA16-TFEBopt and RH GRA16-HAstop were used to infect the neurons. 16-22 hours post infection the neurons were fixed and immunofluorescently stained and analysed by fluorescence and polarized light microscopy. All lines tested presented clear secretion of the fusion proteins, which were targeted to the nuclei of the human neurons (FIGS. 12A-12C).

[0373] In addition, human neurons were infected with RH GRA16-MECP2opt tachyzoites and collected 24 hours post infection. Infected neurons were washed with PBS, scraped using a sterile cell scraper and pelleted by centrifugation, residual PBS was removed and the pellets were snap-frozen in liquid nitrogen. Nuclear proteins extracted from the infected neurons were immunoprecipitated using magnetic beads bound to an MeCP2 antibody. Immunoprecipitated proteins were immunoblotted with the same MeCP2 antibody following a standard Western blot protocol. The resulting blot presented 2 strong bands, of approximately 75 kDa and approximately 130 kDa. The ˜75 kDa band represents the endogenous untruncated MeCP2 from the human neurons (predicted size: 75 kDa) and the ˜130 kDa band represents the parasite-delivered GRA16-MeCP2 fusion protein (GRA16 predicted size: 55 kDa. Fusion protein predicted size: 75+55=130 kDa) (FIG. 14).

### Example 10

### Delivery of Mammalian MECP2 to Mouse Primary Cortical and Hippocampal Cultures Using Transgenic T. Gondii and Binding of the Delivered MECP2 to Heterochromatic DNA

[0374] Neuron-enriched primary cultures from the cortices and hippocampi of P1 (day 1) mice pups were cultured for 5 days and infected with tachyzoites of the transgenic line RH GRA16-MECP2opt. Twelve (12), 24 and 48 hours post infection, the neurons were fixed, immunofluorescently stained and analysed by fluorescence and polarized light microscopy. In all listed time points, the GRA16-MECP2 fusion protein was secreted and targeted to the nuclei of the neurons, and it also appeared in foci corresponding to areas of dense heterochromatic DNA, recognizes by intense DAPI staining (FIGS. 13A-13D). This is a classical marker for MeCP2 functionality as it suggests that it successfully binds on the heterochromatin. Notably, in culture systems T. gondii can infect both neurons, glial and other cells. Because the primary cultures were not purely neuronal (according to NeuN staining), the present inventors could see that non neuronal cells (presumably mostly glia) infected with the transgenic T. gondii also received the MeCP2 fusion protein and presented the same characteristic foci pattern.

### Example 11

### Expression of Gra6 and Gra16-MECP2 Fusion Protein in T. Gondii Bradyzoite Cysts

[0375] During the normal course of infection, after the initial acute phase in which the parasite replicates and disseminates in the body as tachyzoites, immune pressure causes T. gondii tachyzoites to differentiate into bradyzoites which resides in the long-lasting quiescent cysts in tissues, and mostly in the brain (Carruthers V B, Suzuki Y, 2007. Schizophr Bull. 33(3):745-51. Effects of Toxoplasma gondii infection on the brain). Therefore the present inventors investigated whether the transgenic T. gondii continue to express the GRA16-fused therapeutic proteins after they differentiate into the bradyzoite form. An in vitro differentiation of the transgenic T. gondii into bradyzoites was induced by stress with alkaline media for 3 to 5 days. Alkaline media contained DMEM medium adjusted to pH 8.1 with 10 mM HEPES and 1% fetal bovine serum supplemented with penicillin-streptomycin (Tomita T, Bzik D J, et al. 2013. PLoS Pathog. 9(12):e1003823. The Toxoplasma gondii cyst wall protein CST1 is critical for cyst wall integrity and promotes bradyzoite persistence). The present inventors tested differentiation of the strains Pru GRA16-HAstop and Pru GRA16-MeCP2. Bradyzoite cysts, identified by DBA (Dolichos Biflorus Agglutinin) staining of the cyst wall, continue to express both the GRA16-HAstop (Data not shown) and GRA16-MeCP2 proteins (FIGS. 15A-15C). This finding shows that the transgenic parasites can continue to express GRA16 and the GRA16 fusion proteins after differentiation into the bradyzoite stage, which is important for continuous secretion and protein delivery from cysts in chronic infections.

### Example 12

### Probing the Molecular Interactions Between the Heterologous Polypeptides Delivered by T. Gondii and Endogenous Proteins in the Recipient Cell

[0376] By performing co-immunoprecipitation on cell lysates from infected cultures and from infected animals, the present inventors can decipher molecular interactions between the polypeptides delivered by the transgenic T. gondii and endogenous proteins and nucleic acids.

[0377] For example, in mammalian cells MeCP2 binds both DNA and proteins from the SMRT/NCoR and SIN3A co-repressor complexes. Binding to DNA can be probed by immunofluorescent stainings and by chromatin-immunoprecipitation, and binding to other proteins can be probed by immunofluorescent stainings and by protein co-immunoprecipitation. The added epitope tags on the delivered fusion proteins can be used to distinguish between copies of the protein produced by the host cell and copies of the protein delivered by the parasites, while antibodies against the protein itself can be used to probe both the endogenous and the parasite-delivered protein (e.g. for comparative assays).

### Example 13

### Testing the Ability of Transgenic T. Gondii to Deliver Heterologous Proteins-of-Interest Continuously (/Chronically) in Animal Models

[0378] The transgenic lines of the parasite are tested for their ability to affect phenotypes in whole organism. Testing the transgenic parasites in animal models allows the assessment of the system in the presence of an immune system and a functional blood brain barrier (BBB). This is done by following the standard infection protocols established in the field to infect mice with the transgenic T. gondii (Cabral C M et al., 2016, PLoS Pathog. 12(2):e1005447. Neurons are the Primary Target Cell for the Brain-Tropic Intracellular Parasite Toxoplasma gondii; Berenreiterovi M et al., 2011. PLoS One. 6(12):e28925. The distribution of Toxoplasma gondii cysts in the brain of a mouse with latent toxoplasmosis: implications for the behavioral manipulation hypothesis; Tait E D et al. 2010. J. Immunol. 185(3):1502-12. Virulence of Toxoplasma gondii is associated with distinct dendritic cell responses and reduced numbers of activated CD8+ T cells; Koshy A A et al. 2012. PLoS Pathog. 8(7):e1002825. Toxoplasma co-opts host cells it does not invade; Jensen K D et al. 2015. MBio. 6(2):e02280. Toxoplasma gondii superinfection and virulence during secondary infection correlate with the exact ROP5/ROP18 allelic combination). The transgenic T. gondii parasites are administered to the animal model intranasally, enterally (such as orally), subcutaneously, intra-muscularly, intravenously, intradermally, intraperitoneally, intracranially or intracerebrally. The transgenic T. gondii parasites are administered in the form of tachyzoites, bradyzoite tissue cysts or oocysts. Animal models can be wild type animals or model animals bearing a condition treatable or otherwise affected by delivery of the protein of interest expressed in the transgenic parasites. After the initial stage of acute infection, the animal develops chronic bradyzoite tissue cysts, primarily in the brain. This mode of delivery relies on continuous expression and secretion the protein of interest from the transgenic T. gondii at the chronic stage of infection.

[0379] At different stages during development of the chronic infection (first 3 weeks to 2 months after infection, depending on strain and route of infection), as well as in different time points after the chronic infection has been established and stabilized (time-scale of months to years after infection), brain histological stainings are used to assess the percentage of cells infected, distribution of parasites and the delivered protein in the brain and in other tissues and to quantify the levels of delivered protein. Co-immunoprecipitation and cellular morphologies can be used to confirm molecular interactions between the delivered proteins and endogenous counterparts in the receiving cells and to provide evidence for their function.

[0380] The condition of the treated animal model is monitored and characterized at different stages of the chronic infection and at different stages of the disease progression using physiological, behavioural, cellular and molecular measures in order to assess manifestations of disease phenotypes and efficacy of the treatment in alleviating them as well as any potential toxicity arising from the treatment. The effects of the transgenic parasites are assessed by comparison to animals treated with parasites not expressing the pharmaceutical polypeptide and/or to sham-treated animals.

[0381] For instance, mice model of Rett Syndrome treated with T. gondii parasites expressing the therapeutic protein MeCP2 are assessed by known phenotypes of the disease which include impaired social interaction, increased scent marking, hindlimb clasping, reduced lifspan, anxiety, respiratory problem, hypoactivity, impaired motor coordination, miRNA-mediated IGF1 deficit, decreased level of BDNF, impaired cortical plasticity, glial dysfunction, GABAergic neuronal dysfunction, decreased soma size, decreased dendritic spine density, decreased synapse number, decreased activity (Ca2+ imaging), decreased sEPSC and sIPSC frequency and amplitude, decreased Tuj1+ cell number, decreased PAX6, SCN1A/1B expression, decreased dendrite complexity in cortical neurons, decreased AP frequency in cortical neurons, decreased total transcription in cortical neurons, decreased expression of neuronal, synaptic, highly-expressed genes, immediate early genes and mitochondrial genes in cortical neurons, decreased mRNA translation in cortical neurons, decreased BDNF secretion from cortical neurons, decreased AKT/mTOR pathway activity in cortical neurons and decreased oxygen consumption and maximal respiration in cortical neurons (de la Torre-Ubieta et al. Advancing the understanding of autism disease mechanisms through genetics. Nat Med. 2016, 22:345-61).

### Example 14

### Testing the Ability of Transgenic T. Gondii to Deliver Heterologous Proteins-of-Interest Transiently (/Acutely) in Animal Models

[0382] Similarly to Example 13 hereinabove, the transgenic lines of the parasite are tested for their ability to affect phenotypes in whole organism. Testing the transgenic parasites in animal models allows the assessment of the system in the presence of an immune system and a functional blood brain barrier (BBB), and can be conducted by intranasal, enteral (such as oral), subcutaneous, intra-muscular, intravenous, intradermal, intraperitoneal, intracranial or intracerebral administration of the transgenic T. gondii in the form of tachyzoites, bradyzoite tissue cysts or oocysts. Animal models can be wild type animals or model animals bearing a condition treatable or otherwise affected by delivery of the protein of interest expressed in the transgenic parasites. This experimental design focuses on assessment of transient delivery that does not rely on differentiation into bradyzoites and establishment of chronic infection and/or chronic cysts. Some examples include: delivery by attenuated parasites that cannot differentiate into bradyzoites and/or cannot replicate and/or cannot persist in vivo longer than a few weeks, or otherwise cannot establish a chronic infection; delivery by local administration to the target tissue or to an area close to the target tissues followed by clearance or inactivation of the parasites. These can also be repeated multiple times for repeated dosing. Immunosupressive agents can be administered before, concomitantly or after infection with the parasites to enhance infection and to aid re-infection of animals that have already been infected with T. gondii before. This experimental design also includes delivery by transgenic T. gondii capable of establishing chronic infection, but in which the collection of samples or analysis are performed at the acute stage of infection before establishment of chronic infection. This form of delivery relies mostly on secretion of the protein of interest by tachyzoites of the transgenic lines. At different stages during the acute infection (first days to about 2 months after infection, depending on strain and route of infection) brain histological stainings are used to assess the percentage of cells infected, characterize the distribution of parasites and the delivered protein in the brain and in other tissues and quantify the levels of delivered protein. Co-immunoprecipitation and cellular morphologies are used to confirm molecular interactions between the delivered proteins and endogenous counterparts in the receiving cells and to provide evidence for their function.

[0383] The condition of the treated animal model is monitored and characterized at different time points after initiation of treatment and at different stages of the disease progression using physiological, behavioural, cellular and molecular measures in order to assess manifestations of disease phenotypes and efficacy of the treatment in alleviating them as well as any potential toxicity arising from the treatment. The effects of the transgenic parasites are assessed by comparison to animals treated with parasites not expressing the therapeutic polypeptide and/or to sham-treated animals.

### Example 15

Introduction of Further Modifications that Will Increase the Safety and Controllability of the Transgenic T. Gondii

[0384] Although the parasite is generally considered harmless in healthy humans, additional modifications to the parasites may be incorporated in the therapeutic strains in order to further attenuate their virulence. As the model organism of its phylum, there is a wide range of highly developed genetic tools for modifying the parasite (Jiménez-Ruiz E, Wong E H, Pall G S, Meissner M. Parasitology. 2014, 141:1390-8. “Advantages and disadvantages of conditional systems for characterization of essential genes in Toxoplasma gondii”) which may be used to generate attenuated and exogenously-controllable parasites (Moe-Behrens G H, Davis R, Haynes K A. Front Microbiol. 2013 4:5. “Preparing synthetic biology for the world”). One approach may include engineered auxotrophy. Secondly, attenuated parasites may be developed by targeting and disrupting specific virulence mechanisms of the parasite which are not essential to its ability to deliver the protein drugs. Another approach may include active control through engineered induced lethality such as inducible “suicide switches” (self-destruction element) that eliminate the parasite upon administration of an activating molecule. Some examples may include utilizing the widely-used tetracyclin-inducible promoter for drug-inducible activation of lethal or apoptotic pathways in the parasites in vivo, or the rapamycin-dimerizing diCre system for inducible knock-out of essential genes or for inducible activation of lethal or apoptotic pathways. Such drug-inducible control may also allow differential clearance of the parasite from specific tissues, regions or cell types due to differential permeability of the tissues or cells to the drug and its different distribution in the body.

### Analysis and Discussion

[0385] The invention is a protein delivery platform that utilizes the machinery of the brain parasite T. gondii, which allows it to penetrate the blood-brain barrier and delivery proteins to cells, and especially neurons, within the CNS.

[0386] To enable delivery of therapeutic proteins to the CNS, the present inventors reappropriate the parasite Toxoplasma gondii for the synthesis and delivery of proteins of interest to cells in the CNS. The present inventors thus establish a versatile platform for specific and controlled delivery of proteins to cells within the CNS.

[0387] The engineered parasite has the following novel capabilities:

[0388] (1) It can be easily modified to synthesize a range of therapeutic heterologous proteins and secrete them with specificity into target cells within the CNS.

[0389] (2) It can contain modification that reduce or exclude elements of the parasite that can mediate deleterious effects on the infected host.

[0390] (3) It can contain regulatory and/or self-destruction elements that allow control of its distribution and spatiotemporal activity once in the host.

[0391] Following is a non-limiting summary of alterations in the parasite's genome that are described herein:

[0392] (i) Fusion of the selected therapeutic protein to a specific endogenous secreted protein of the parasite. Additional accessory elements and modifications may be added to the fusion gene/protein that may increase the effectiveness of the therapeutic fusion protein, such as cleavage sites that may allow detachment of the therapeutic protein from the endogenous parasite protein, after it is no longer needed for its targeting or activity, or mediate detection and assessment of efficiency and distribution of the Toxoplasma and of the delivered protein, such as epitope tags and fluorescent proteins.

[0393] (ii) Removal of virulence genes that are not necessary for the therapeutic role of the parasite. These modifications reduce the potential deleterious effects of the parasite on the patient, and makes it relevant for safe clinical use.

[0394] (iii) Insertion of regulatory elements that can be induced to cause the parasite to self-destruct in response to an externally administered drug, or to manipulate the parasite's activity. These elements augment the safety features of the technology, and also provide increased control of its spatiotemporal activity.

[0395] The initial strains which were developed with the method of some embodiments of the invention were based on the Galactocerebrosidase and Galactocerebrosidase-TAT proteins for Krabbe disease, GDNF protein for a range of neurodegenerative diseases and other conditions (among them Parkinson's disease, Supranuclear Palsy, Multiple sclerosis, Alzheimers disease, Amyotrophic Lateral Sclerosis, Huntington's disease, retinal degenerations, Traumatic Brain Injury and hypoxic/ischaemic CNS disorders), Aspartoacylase protein for Canavan disease, MeCP2 protein for Rett Syndrome, SMN protein for Spinal Mascular Atrophy, E3 ubiquitin-protein ligase parkin for Parkinson's Disease and TFEB for lysosomal storage diseases and neurodegenerative diseases.

[0396] Though the present inventors have selected a number of therapeutic proteins that are currently being tested clinically and have known supplementary functions, the platform may be adapted to a wide range of proteins.

[0397] The possible applications of the technology include, but are not limited to:
[0398] 1. The treatment of conditions through the delivery of therapeutic proteins;
[0399] 2. The supply of proteins to the brain in healthy individuals for the purpose of augmenting brain functions or promoting neuro-regeneration;
[0400] 3. A general solution for highly specific and efficient targeted protein delivery for supplementing protein synthesis.

[0401] Although the invention has been described in conjunction with specific embodiments thereof, it is evident that many alternatives, modifications and variations will be apparent to those skilled in the art. Accordingly, it is intended to embrace all such alternatives, modifications and variations that fall within the spirit and broad scope of the appended claims.

[0402] It is the intent of the Applicant(s) that all publications, patents and patent applications referred to in this specification are to be incorporated in their entirety by reference into the specification, as if each individual publication, patent or patent application was specifically and individually noted when referenced that it is to be incorporated herein by reference. In addition, citation or identification of any reference in this application shall not be construed as an admission that such reference is available as prior art to the present invention. To the extent that section headings are used, they should not be construed as necessarily limiting. In addition, any priority document(s) of this application is/are hereby incorporated herein by reference in its/their entirety.

### REFERENCES

[0403] 1. Pardridge, W. M. Targeted delivery of protein and gene medicines through the blood-brain barrier. Clin. Pharmacol. Ther. 97, 347-61 (2015).
[0404] 2. Cox, D. B. T., Platt, R. J. & Zhang, F. Therapeutic genome editing: prospects and challenges. Nat. Med. 21, 121-131 (2015).
[0405] 3. Persons, D. A. & Baum, C. Solving the problem of 7-retroviral vectors containing long terminal repeats. Mol. Ther. 19, 229-31 (2011).
[0406] 4. Schambach, A., Zychlinski, D., Ehrnstroem, B. & Baum, C. Biosafety features of lentiviral vectors. Hum. Gene Ther. 24, 132-42 (2013).
[0407] 5. Gray, S. J., Nagabhushan Kalburgi, S., McCown, T. J. & Jude Samulski, R. Global CNS gene delivery and evasion of anti-AAV-neutralizing antibodies by intrathecal AAV administration in non-human primates. Gene Ther. 20, 450-9 (2013).
[0408] 6. Templeton, N. Gene and cell therapy: therapeutic mechanisms and strategies. (2008).
[0409] 7. Dimmeler, S., Ding, S., Rando, T. A. & Trounson, A. Translational strategies and challenges in regenerative medicine. Nat. Med. 20, 814-21 (2014).
[0410] 8. Abbott, N. J. Blood-brain barrier structure and function and the challenges for CNS drug delivery. J. Inherit. Metab. Dis. 36, 437-49 (2013).
[0411] 9. Malhotra, M. & Prakash, S. Targeted Drug Delivery Across Blood-Brain-Barrier Using Cell Penetrating Peptides Tagged Nanoparticles. Curr. Nanosci. 7, 81-93 (2011).
[0412] 10. Bradbury, M. W. B. Physiology and Pharmacology of the Blood-Brain Barrier. (Springer Science & Business Media, 2012).
[0413] 11. Solaro, R., Chiellini, F. & Battisti, A. Targeted Delivery of Protein Drugs by Nanocarriers. Materials (Basel). 3, 1928-1980 (2010).
[0414] 12. Sanecka, A. & Frickel, E.-M. Use and abuse of dendritic cells by Toxoplasma gondii. Virulence 3, 678-89 (2012).
[0415] 13. Carruthers, V. B. & Suzuki, Y. Effects of Toxoplasma gondii infection on the brain. Schizophr. Bull. 33, 745-51 (2007).
[0416] 14. Feustel, S. M., Meissner, M. & Liesenfeld, O. Toxoplasma gondii and the blood-brain barrier. Virulence 3, 182-92
[0417] 15. Montoya, J. G. & Liesenfeld, O. Toxoplasmosis. Lancet 363, 1965-76 (2004).
[0418] 16. Dlugonska, H. Toxoplasma rhoptries: unique secretory organelles and source of promising vaccine proteins for immunoprevention of toxoplasmosis. J. Biomed. Biotechnol. 2008, 632424 (2008).
[0419] 17. Carruthers, V. B. & Sibley, L. D. Sequential protein secretion from three distinct organelles of Toxoplasma gondii accompanies invasion of human fibroblasts. Eur. J. Cell Biol. 73, 114-23 (1997).
[0420] 18. Boothroyd, J. C. & Dubremetz, J.-F. Kiss and spit: the dual roles of Toxoplasma rhoptries. Nat. Rev. Microbiol. 6, 79-88 (2008).
[0421] 19. Koshy, A. A. et al. Toxoplasma secreting Cre recombinase for analysis of host-parasite interactions. Nat. Methods 7, 307-9 (2010).
[0422] 20. Fox, B. A., Sanders, K. L. & Bzik, D. J. Non-replicating Toxoplasma gondii reverses tumor-associated immunosuppression. Oncoimmunology 2, e26296 (2013).
[0423] 21. Fox, B. A., Sanders, K. L., Chen, S. & Bzik, D. J. Targeting tumors with nonreplicating Toxoplasma gondii uracil auxotroph vaccines. Trends Parasitol. 29, 431-7 (2013).
[0424] 22. Elliott, D. E. & Weinstock, J. V. Helminth-host immunological interactions: prevention and control of immune-mediated diseases. Ann. N. Y. Acad. Sci. 1247, 83-96 (2012).
[0425] 23. Rothman, J. & Paterson, Y. Live-attenuated Listeria-based immunotherapy. Expert Rev. Vaccines 12, 493-504 (2013).
[0426] 24. Reeves, A. Z. et al. Engineering Escherichia coli into a protein delivery system for mammalian cells. ACS Synth. Biol. 4, 644-54 (2015).
[0427] 25. Meng, X.-L., Eto, Y., Schiffmann, R. & Shen, J.-S. HIV Tat Domain Improves Cross-correction of Human Galactocerebrosidase in a Gene- and Flanking Sequence-dependent Manner. Mol. Ther. Nucleic Acids 2, e130 (2013).
[0428] 26. Otto P. van Diggelen. MOSCERDAM SUBSTRATES, Laboratory protocol for enzyme analysis fir Krabbe disease; Galactocerebrosidase. MOSCERDAM SUBSTRATES, Laboratory protocol for enzyme analysis fir Krabbe disease; Galactocerebrosidase.

The application's sequence listing, which the Patent Office published only in electronic form, follows.

SEQUENCE LISTING (4625 sequences)

SEQ ID NO: 1 - DNA, 2202 bp, Toxoplasma gondii
  source 1..2202: mol_type = genomic DNA
atggagggtatggggtcgctgcgcaggcggtgcgctgcactaccgctcgtcgcggggttccttgtttttctgggttcgattggcgtaaaagcggatcttcccattcacgccacggtacatgacatcaagggagactggacgttctacttgtctccagctgtacccggagatgttagcaactgcggctccccaagcccaaatacaaacacttcgaatctccgcgaagaactcaaggactacaagtcattcttgagcactcaagggggaatcaagaaggaactacgggtgtcactgactgacattccagtctcgttcgcaactactcgcactgccgccgcactcgagaatccccacaggcgcacctggaaaacgttgggtgttttcgatggccaggataagcggaagcttgttggcagctggacaacggtatacgacgaaggttttgaggtggacgttggtggccgcatgaggctcatggggttcatgaaatacaacccgcagaataactgctcgatcgtcgacggggacttggagaactctcaaggaatcacagactgctacgcaaccgacccgacgcgaacgcagattggttggtacatccagcaggcagaagatggctctcgtttgtcaggatgtttctatgcggagaaacccaaggctgcaagttcaactcccgccgcgttcgtcgcgatcaaggaaaccacgagagttgaacctgcttctggtgccttgattggcaccgacctgaaagactcaacttcgtacatctctcagtcgttcgtggatacacacaacgcgtctcctgcctcaagctggcgcgcgggtgtcaactccgtttttgcgaacatgaaccgtcgagatctttctcgctttgtgaaggattttggcttcaaaaaaatgcgacctgcaggtgacagtgccgatgggctttcgttcatgcagtctagcactgacatttcaactgcagacggagacgccgcctccacacaggtgtatgcatgcccgtgcaagaaaggcgaaaggtccctagacacgcgaaagttggatgagtccgaacagactctggaggtgctgtctcctgtgagcgctctggaagttggacacacaaactttttggccgcaatcaatccccacgttcacgagagcacagccacgaacggactcgacgctcaaggcacgcaagctgtggcaaaagcagcactgtccggcgcgggtgcaacgaacactcaggagcccctgctactccccaaagacttttcgtggtcggatccgttctcgaatcaggcatttgatgagactgtcaccaaccaaggcagctgcgggagctgctatgccgtggcagcaacctacgcgctgcagaagcgtttcgagattgcagcttctcgcatgcttgggcaggaaatccgacttttcagcgccgtccaggacgaggcggacggagcgttgtcctttttggaccttggcagtacgagccaactcggcgagttgtctgcacagtcaatcctgtcttgctccttctacaatcaaggctgcgacggaggcttcccgtacctcgtggggaaacacgcgcgagacattggtgttccgcaagccagatgtatggagtaccaagctgaccacacacaaggctgcccatttcaaaagacggcttcggcctcagagagccaatcgatgttgcaggctgacgcgaatgcaggagcgtgttctgagcacgcaagatggtatgcgaaggactacggctacattggcgggtgctacgagtgcaatcactgctctggtgaaaaacagatcatgttggagatttacaataacggtccagtgccagttgcgttcgatgcaccgccttctctcttttcctacagatccggggtctatgatgcgaactcgaatcacgcgcgcgtgtgtgacaacgatttgccccaccacaccggaattctcaccgggtgggaatacacgaaccacgcagtcacaattgtgggatggggagagacagatggtgagaacggaaaaccgcagaagtattggattgttcggaacacgtggggtcccaactggggtgtcgacggatacgtgaagattgcgcgcgggaagaacttggggggcatcgaaagccaagctactttcatcgacccagatttctccagaggtcaaggcttgaaagtggcgaaagctattgaagctctgaaaagtaaaacaatgtga

SEQ ID NO: 2 - DNA, 2262 bp, Toxoplasma gondii
  source 1..2262: mol_type = genomic DNA
atgtcggcggctgtggagcctcgcggccgtctttctgatggctgctgcagacgacggctgacgccggcagcggtcctctttctctgccgcgtactcgtcttgttctgggtgaacgaagcagaaccggcgaacggggacttgcctgcccactgtctcgtgaaacatgtcttaggagaatgggagattcaagaaggtctctggctcccctgccaagaagaaggaaacctgacgactgacgcggcccgactgcacgatccgtactgcggatacggcatcccagacagagttgacgcacatggtccgatgacgcctcccaatgtttcggcgagtttccacgcgctgcggacctcgcgcttcactctgtttccggatttccgtatcgaatttgaggacggctcctccggtctctggactctagtgtacgacgagggccttcacttcgaggtttcgactccgcaaaacaggcgtttctttgctttcttcaaataccaactggctccggacggtcagaaccgcgcctggagctactgtcacacgactttggtcggctggtgggaacgccctgctgccccaaacctgtctctccaagacgtcgagaaagctccgccggtctacgacatcccggagcccattgcccccgatactgctgctgacgcgttgctgaagtcggtcaaacgaggctgttggtggggaagaaaagtaggcgaagacctttccgttccgaccaacgaagtccccaaggaacgccgcacccctctggaagtccctctgtggcctacttctcgtccgcctgacgtccgaacggttgctgctgtcgtgaggaagaatctcgccgcggatgccccatgggagcctttggacgaggagtatgtcgaaattcgagggagaaagctgcgcacaatggaggaggtctgggcgcatgcaggacaccagcctctgttgatttccaggcaaaacatagagtcgacgcacttgacactcagtgtcagacctccccttcatttgctcgctgggataaagccttttggaagtcctgcaggatccgatccgccctggcgaaccgttcgcgacttcgactgggctaacgaagaccatgtcgctctcaggatcggacggcgacagtcagttattccagatgccccgaatcaaggaggctgtggttcttgctacgcgatcgcaactggaactgtcctcacttcaagactctggattcgatacgcagcgaacgacgacgttttcggcaaggtcaacgtcagcgctttccagggaacaagctgcaacgtgtacaaccaagggtgcggcggcggctacgtattcctggcgctgaagttcgggcaggaacatggcttccgtacagaagactgcgtcagcgaataccacgccatggctgacaagcacaaaggttcactttcgccgaacttgcagacttgtttcgaccttggcggccagctcgggacctcagcgttcggctgccaggcacctccagctcgagcttctctgccggattcctgcaatttatctgtcaaagtgacttcttggcactatgtcggaggcgtttacggagggtgttcggaggacgacatgctgcgaacgctctgggagcatggtccgatggcagcatccatcgaacctacgattgctttcactgtctacaagaagggcgttttcagagctgcgtacaacagcctcgtcgagcagggggacaactgggtctgggagaaggtcgaccatgccgtggttatttccggctggggctgggcgaagcacggagattcgtggctgccgtactggaaagttcggaattcatggggaacgaaatggggagaaggcggctacgcacgagtgctgcgaggtgtcaacgaaatggcaatcgagcgcgtcgctgttgtcggggaagtttcgctttttcgcgggggggaacacattccacccttgctcgcaaggtctctcgattcacagggaagttcgaacgcttccaaagacagcgaaaggggggagacgctggtcgaatctgtgagtcccgttttccgcggaagcgcgtcgggttccgaaagtggaaacccaagagacgcggcgacgaatgaaagtgcagacatgtcggagtctgcagacgcagacgcagagtcttcgtcggggagtgacgatgacgaagacggggatatggagaaaggtgatgtggagtcgacaacaaaacaaacgactcttttccggcctatccagcgtcacggcgaagtgttggaagaaaagagaacgggtgaatga

SEQ ID NO: 3 - DNA, 2685 bp, Toxoplasma gondii
  source 1..2685: mol_type = genomic DNA
atgatgctgctgtactaccggctgagcagcgagcacgcggggtcgtaccggcagtgcccgctgtcgtgtagcgcgctgtctctggcagaagtgaagcagctcctcgcggcgcgttgcggattggcgaacgagtatggtcggaagatcgactttcggattttcttggcggggagtcaggtgccaggcggtgctgcggaggctgaggagctcactgagatcgtggacgagaaccagatgatccacgcgtactccaaggtcgtgttgcagcgggtggccatcacatacggcgggagcgggcaaagtgtgttgcacaaagcgcgctcggagctctctcaggaggagtggaaaactgcagaggagcggaagctgagcagccggctgaagcggctgcctcccgagtggctctgtggcctttgtcaccgcgtgatgacgaaccccgtgctggtcagatgcgcgacgaactgtgcgcagtctgcctgccacgcgtgtctcgaggcgcacctcggtccgaatcgcatctgccccttctgcaacagtccctttcgccaggcgattcgcaacaaacgcctgcaagaaataattgctctcgcgaacttgtcggaattcgagtcggcacccggcgccgcatgcgcggtgccgcagctccaggtccaggcgtatcaggcaggcgaccctgcgagcagtgcagtggcgccaggagaaggcagcagatcaacggacctgattcgaagcgcttgccgagagggaccgtctgacgcgagcagactaggttccggagagagccacagtgcaacgggggcgggtgtagcagaccgggtttctggaggaaacgtctgcgaagatagagagactgatgacgacgtgggagcggacgggagcagaggcgacagcgcaggagccagtgacagcttccgcagcgaggcagactgggtccactttgtgtatttggtgcctcaggaaaacctgaaactcatgcgacaatacgacatgatggtcgtcgagagctcctcgaatctggccgtcgcgctggtgagaaaagccacgcagagaggcggaagcgggaaccctgatgccgctgcagagctaggggaacctgcggaaggcgccttgcgtgatggcacagggaactccggacccacaaccgcgacgggagagactgagcagcaggaacaagtgcgtaccacggggagtaaaaacacggatcacgaggtttttgtggtgcccctctgttccgcggggggaggaacgtcgttttcaatagcgggctttgctcgcatcaacagcgcgaggcaggtagaccccgaggccgacagtgccgcggcgactgtcgtgcagcagtggcagagctcctcgggtcgggcttcgaacttgccgggacacggggccggactcgcgttcggcgtgtacaggatatcgtgggacaacaagttcaatccgatgcccatgctaccctcgcgaaagcagcctctgtgcagtctgctgggtgcccacagacggcagtttcacagcaacgcgtctggtgtacctgcagttcctgggcttctgaagcgcgaagtgttcgggggcgcgggcgcaggcatgattgaggccgctgtggaggcggccaagtacgaggaagtcctcgcatgcataaaagactatgctcagtttgggagtcgaccagcggaaccgtggcaacatccagcgtctcagacgtcttctgcagctgctgcaactccaggtctgccgaagaaaggcgtccccgtcggcgggattggccaagaagggtcgcgcgtgcctccgcctccgccgcctccaccgggcagtgtgggggaatcgggcttttcgctttcatctggtaatggtgtttcagttgtcgagaaacgtgatgtatcgtccgaaggaagaggcccgtctgatggtgtgtcgatcagtttcaatgctcggggggcgtctctgccaggatctctcggtgacgagaggaaggctctcgagacaggtgtgtttggcatccccgtgagcctggggccaccgtcgctgggtttgcgtggcgatcctggcgagcctagcaacccgtacttggggtactgtgcgttgcttccccttctcacagaagagcagtttcggcacattcgacggctgcagaagagagccatggtactctgcggttacacacagtctccacctgaatctaggaagaagagacgccgttcaggcaaaaagaaacggggaaagcacagtgtcagcagccacagcacgggtagtggaacccttcctagtgacgagccagtcgacgggtgcgaccgcgtacgtgaggaagcggagaaagagggaacggggtgcatgagtgcagatgcgcctgcggtcgacacaaacacagaagcgttgtcaattcaaaacgcagcaacttcggtcacacgccaaccactgtccgatcccgacagtgccaacgcgactggctcccgcgtgcgtgcgggccgcagagctctcccacgtgtacctcccgtgctcaaaatatcacgcataggcgacaaaaatgacaccgataccacccaaaacaaggacacaggatccatgcagtcgcaaagggccaattctgtcatcgaaacgtgcagcgttgtcgaggaaaacaccatggcaaagattccgggtgccgaggcaaaacctgaaggtgtacccgacaacggaccttgcgaactcccgtag

SEQ ID NO: 4 - DNA, 660 bp, Toxoplasma gondii
  source 1..660: mol_type = genomic DNA
atggcagcgcgtgcgggaagcagcggcgtcagccgccgatttctcttcgtgctcttcacggttcttgctggttcctcgttcgtgtccgccgacgacgccttcatagacaatgtgaagaagggtgtcggtgaacatatcggcggaacccctgttgaccttgtcctgaatgacctttaccccctcattgtcaagcaaggcctcggtggcgtgttaggaaagatcatgtacaaggtcaagggtataatgtactaccgcctggccgacggtgtcgccgatgttgtcatgtcggagctggagttctacctgttcggtgagaagggtgcgaatcaatcatccttcaaagagctgcgaaaactttacgaagcctacatgcgcaagttcttcgctgagtctccggaagatcccgttgatgcccttaccacaggtgtctggaaggggctgctgcagcttttcaccgaaaagcttcaagatgctttccgcggcagccccaagggccaaaagatggcggatttgcttttcgactccaacctcacactggtcaagagctggaccgatgccgctcaccttcagatcatgcagctctcctccagttcggctcgcgcgaatgcccttcggctccttcgcgccaagcaaaagaaaccccttgcgcgaaagaactag

SEQ ID NO: 5 - DNA, 573 bp, Toxoplasma gondii
  source 1..573: mol_type = genomic DNA
atggtgcgtgtgagcgctattgtcggagctgctgcatcggtgttcgtgtgcctgtctgccggcgcttacgctgccgaaggcggcgacaaccagtcgagcgccgtctcagatcgggcgtctctccttggtttgctgagtggagggacagggcagggattaggaatcggagaatctgtagagctggagatgatggggaacacgtatcgtgtggagagacccacaggcaacccggacttgctcaagatcgccattaaaacttcagatggatcgtacagcgaagtcggcaatgttaacatggaggaggtgattgatactatgaaaagcatgcagagggacgaggagattttctttcgtgcgttgaacaaaggcgaaacagtagaggaagcgatcgaagacgtggctcaagcagaagggcttaattcggagcaaaccctgcaactggaagatgcagtgagcgcggtggcgtctgttgttcaagacgagatgaacgtgatcgacgatgtgcagcagcttgaaaaggacaaacaacagcttaaggatgacatagggttcttaacaggagagagagagtaa

SEQ ID NO: 6 - DNA, 2259 bp, Toxoplasma gondii
  source 1..2259: mol_type = genomic DNA
atgtcccgccgcatggcatccagatctaggctgctttttgcagctttttgtgcgggcggtgtgctcctcggggccgggccgcctgccgcgcggcagagtgccttcaccgtcgccagcacggtagctggtggagagacgggatataccagcagtttggaagtcgagtctccggaaaatgtgggagttcatgagggcgacgagaactctcaacatgcacatgatgaaatccccgtcgaagctgccgagggcgaggaggtcggctcttcgaggttgagctcctctaaccgcagcagaactactcacgccacgtcggccacgcgcaggggatccagaagccgtcttctgcttcccgcagccctcatttctgctttggctttgagtggattgattggctcctccatgatgaaagagaccgccgaggaaactggcgagcccagagctgccactcccgagaagcaagccgacgcgaaaggcgcaccgccagaagaggcgaaggtcgtagagcaagagggcgcgcaagttgcacatccagagggcgcgcaagtcgcagaagaagactcacgatccaggcagcgtcgcatgcaggccgcagtcttggctgcagttctggtcgcagcggtcatctacggcgtgtacgacaaggcttcattgacgtcgccgaccaccacatcttcagaatcggggacctcgttccgccatccggagctggccctcgaagactcagaggcggacctcggtgggcagctggagatggccctcattgatgcgtcgcacgagacaccagggggagcgccatctgagggcatggctggggctgtttcgtcactcatagctcgtgtggtcgatggagttgtgcaattccttcaagaccccgcttcacagaggaagagcctgggaatggcggcatctgctgtcgccttggcttttctggccgctggtgctctacgggcccggcaagctgcaaaggcattgacacaccgcccagcgccaccccctgctagcaaggaacaaggggaaagcgcgcaggaagctctggaagaacttgagccggctcccgagacacagaccgagcaggtggatcaggcttctatgccactgcccccggcccccgaagactttgacctgcctcctatgccactgcccgaagcacccgaagactttgaccaggctcctatgccactgcccgaggcagccgaagtctttgaccaggctcctatgccactgcccgaagcacccgaagtctttgaccaggctcctatgccactgcccgaagcacccgaagtctttgaccagcctcctatgccactgcccgaggcagccgaagtctttgaccaggctcctatgccactgcccgaagcacccgaagactttgaccaggctcctgagccactgcccgaggcagccgaagaatttgatcaggctcctaagccagtgcccgaggcagccgaagaatttgaccagcctcctgagccactgcgcgaggcagccgaagaatttgaccaggctcctatgccagtgcccgaggcacccgaagactttgaccagattcctaagccagtgcccgaggcacccgaagaatttgaccaggctcctatgccactgcccgaggcacccgaagaatttgaccagattcctaagccagtgcccgaggcacccgaagaatttgaccaggctcctatgccactgcccgaggcacccgaagaatccgagcaggctcctgagccactgcccgaggcacccgaagaatccgagcaggctcctgagccactgcccgaggcacccgaagaatccgagcaggctcctgagccactgcccgaggcacccgaagaatccgagcaggctcctgagccactgcccgaggcacccgaagaatccgagcaggctcctgagccactgcccgaggcacccgaagaacttgaccagcctcccatgccactgcccgaggcacccgaagaatttgaccagcctcccatgccactgcccgaggcacccgaagaatttgaccaggctcctatgccactgcccccggcccccgaagactttgaccagcctgctatgccactgcccccggcccccgaagactttgaccaggctcccatgccactgccgcaggcacccgaagaactcgagcaggctcccgcttcacaccccgaggaggcggagcaggaggtgcctgagagaaaaactgacgcaggaagtgaacctgagaaggatcccgaaacaaacttgttagaggaagaggacgagttgaagccataa

SEQ ID NO: 7 - DNA, 1416 bp, Toxoplasma gondii
  source 1..1416: mol_type = genomic DNA
atgtcccaccgcatggcatccagatctaggctgctttttgcagctttttgtgcgggcggtgtgctcctcggggccgggccgcctgccgcgcggcagagtgccttcaccgtcgccagcacggtagctggtggagagacgggatataccagcagttcggaagtcgagtctccggaaaatgtgggaggtcatgagggcggcgacagctttcaaagtgcacctaatggcgtcccagttgatggtgtagaggaggatggccgttcgacgttgatctcggctaaccgcagcagaagtactcacgccgtgtcggccgcgcgcaagggatccagaagccgtcttctgcttcccgcagccctcctttctgctttggctttgagtggattgattggctcctccatgatgaaaaagaccgccgaggaaacagacgagacaaaagtggcctctcctgctacaggcacacagcaaattcaaaagaaagtggcacagccagaggacgcgaaagtcgcacagccggacgacgatcaagtcgcacgagacgccttgcgagccaggcggcgtcgccagcaggccgcagtgttgatggcagcactggtagcggctgctgcctacggtatgtactcgtccttgtcaggctatgaggatgcaggctctctctcgtcgccggagtctgcatctccagaactggatacgttgatcatgcagcagggaacgcaattcgctgaacagctggaggcgttgcacgagatgccagtgggagcggcaagtgaaggctccgctgagcaatcgtcactcagtcatctgctcgctgaagttgtggacgcgcttcagcaaccttccctgcagaatatcttgctcgggggagcgtcagctgctggcttggggcttctgggtgctgctgctgctcgacggcgcagaagacaggcacagccagacaccccagcgccaccccctgctagtgaggaacaagtggagagtgcggaggaagccccagaaaaactcgatgaggctctcgagacacaccccgaggacacgcaaaaggcggcgccttttgcactacttggcgcacccgaagaacgagagtcgtctcccgagacgcatcccgcggcatccgaagaatccgagcaggctcctatgccactgcccccggcccccgaagaacttgaccagcctcctatgccactgcccccggcccccgaagactttgaccaggctcctatgccagtgcccgaagcacccgaagaatttgaccaggctcccatgccactgccgcaggcacccgaagaactcgagcaggctcccgcttcacaccccgaggaggcggagcaggaggtgcctgagagaaaaactgacgcaggaagtgaacctgagaaggatcccgaaacaaacttgttagaggaagaggacgagttgaagccataa

SEQ ID NO: 8 - DNA, 1260 bp, Toxoplasma gondii
  source 1..1260: mol_type = genomic DNA
atggagactggcctaaaggaaaggggcggttctcgccatgctccccggctttggcgtgggccgactcggcacttgctgtcgattcgacttgcggctttcgccggcttgacttttctgctcgcggcgtcgcgagtttctgcagaagtgggggctttcgagggaggcatcggcgaccacgtaacgatgcatttgatagggagaagctgggagatgcacggaggcgcgtgcttcgttggccggccgaagaacttggtggtcgacccggtgttcggtacatatggcagacagccccaagttctcgagacacacaaaaccggtcctcgtctgtgcaaatggctagacgaactttttgagcaacatcaggcgcggcggtctgagtgggaaagggcgcacgaagctgccaagtcgcaagtgtcgatgttcaacgcggtgcggcgcttcaagaacgccgtcacagttttccccgagttccaagtggagatcgagtcgaactacctcagtctcttccacgacgactggtacggcaaccaactgccctggatggccgccacagtcaagtacgttgagccgaaggacggatacggcgtcttccagcacctgaatcgcgtcttcgctgtgccgggagttccccaggcgcaactcgtattctttctgctctaccctgcgccgacgttcaatcagcctgtgaagctggagaaaccggggaagggcagcatcgtctccggcttcatcggcggaacgggactcggggcctcggtgtcgcacatgcgccgaggagacatcggcgacctggttgacctcggccgtgtcatttacgccgcagtgaaaaagaatttcaccatccaagcctctctctcggacttctggctgaacgggggcaactgctacatgggatcacgcttcaaggtaaagggcacgatccagggcgtgactctttgtcagtttctcgcgggtgaggcgagcaaatctgtgtacggagcgtacaaagctgccaagctcaagtccgtccatctgacagtgacaggcgtcgatttgtttaaccgcgcgcagcctgagctgcggtgcctcgtcacggaggggctgttgcttcacgatgtgcacgacttcacggtgagtctggcggtcgatacgaatccgcaactcattcaacactttcagcgcactacgcgtctggccagcatgttcaggtgggtgaagctgataggcaggttcctcgtgaagatcggctcgacgttcatgaaaccttcacaaaagaagtag

SEQ ID NO: 9 - DNA, 1311 bp, Toxoplasma gondii
  source 1..1311: mol_type = genomic DNA
atgagggcgatcgtggcatcgacgcagcagtttttgcgtccagttggctctcggcccctcgcgggtatttcgatcgttgtggtggtcgcgttggcaatagctttagggactgcagctgacgttgggcgacatgttggcggtttctcggggccgtttcccatgactctgcgaagtggccagtggagactcgatcacggagcatgcttcgttggaaaagcaaagaacctggtagttgaccctcttccccgtgtatcgcctcaggggcctcagccgctcgatgtcacgaccacaggaagcgctctgtgctggtggctggacagtatgtatgcagcgcatatgtccttgaaagcggcgtgggaaaggcggcatcaagaagcgaagaacagaacctcctggttgaatttatggaggcgcttcgccaattggtgggcctcgtttcctgagtttcagatcgacgtttctgtactctacctcgatctgtggaacgacgacttctacggccaccctcttccgtggttcagtgcggaattcagttatacccctccatcaggcagatacgcgtacaacctcttcgacaaactgcagtctcattttgcgtctgctccgggaacggcggttcaggaagttttccttttgttagcccctgcgccgacattcaaccagcctgtagagaaacggtcttccatcgttgcccgcgcagcaactgttgcagccggcaacgaactatttaaggaagcattggggcatcaacgtgttgatgaagttttgtcgatggtccccgccgacccgtttcgtttgatgttgagcaccagtgctttctcatttcaagctaaaatcggggatttctgggagcgcggactggattgcatgctcggcagccgcctgaaccttcgctgggatcaagttggtacaagtgtgtgccgctatatgactgcaaaagccagcgaaaccggctctggtttggccgcatccttcctcaataccgtggaggtccgggtgactggcatggacttcttcaatcatgcagcgccggtcttcaaaacagaattcatcgagggaatcattaccaaaagggctacttacatcccggtgagcatgtatttaagcacggatcctacgctcacgcacgagtacgaagccgcaaaaactgtcaagcgggcggtccaagcaggccgtgttggagcagctcttgctcgaggtttggtgaactttgctagagcgacgaatcaaaaggctgatgagtcacatgaaggtcaaaccaaaacaccaacatcaggagtgcgcggctctgcaggcagcaaacacaactga

SEQ ID NO: 10 - DNA, 1227 bp, Toxoplasma gondii
  source 1..1227: mol_type = genomic DNA
atgcaggcgatagcgcggggggaccgctcgtcggggtggtcgagttgtagctggcttttctatttttcgtttctgcttctaacgagtgaagcagtggctgcagctgccagtttggagcagacaatttcctattctgtccaacatcaaccgcagcaggaaggcatcctcggcacacagaaaccccagactgccccaactcctcagcagctcattgtgcccgtaagctatctaggagatggtttgtcatacttctctggagttcttaggcgtttacccctcgatgttgcattggaacgtttaactagtgctcgggaaataccaactgtggcaggttttgttcaaaaatatgtgctggcggcccagctatctcgatcccttcagagcacggcgaacggcgtgaagaagattctaatgcgtctcgatgcagccaaaaatgaagaaggatttataacagatctgttgaagtccgctcctgaggttcaagaagttctgagccgtttccttggttctgttgcgtctgcacttgctcttttggacatcaatggtctccatgaggcggttgacgctagtctccccgtgacaaaagcagtggtcatgctgtacttacatctagtgagtgtcgtaccgccgaaacaacgggatcctttctctcctttccttctttatctgcaagatgccgtgggagagttcaagatcatggaggaccatgtcgcctctgttgttgctggtgaggcacaggaggaaaatgttataaacagtcaaccacagggaacggaaacgtcgcacagggcggtagtgagagggggcataagaatgctacaatctgggacctccgaaaccacgaagctgcggaggacgtggtggaggttatttaaagtggctgctctcgccgtcttaacgatggcactgctgaaatatggtacgcctcgtgtgcgcgcttttctcgagagaaggcggatgcgccgaggcggaggtggggacagtggagactttggagaagaggggcgctcaaaaggagacgtgtcaacttctgatgatatgcccagagagccgccgccgccgtacgttccgcccatgtatccgttcgccgaacctgaacacagatgggctggtacgtacggaacgtctcatggaggttatcgagtacaaccgacagctccacccgcccctgcgtctatgctatatccgagtttacacaggctgggctaccagagaccaagcgaatag

SEQ ID NO: 11 - DNA, 1653 bp, Toxoplasma gondii
  source 1..1653: mol_type = genomic DNA
atggtgacaacaaccacgccaacgccacccggtgcgccggcagtggtgcccatcttcgacgttgtctatcaactgaatccgcacgtgtttagaagtcgcttttccaggaggaatcgcgccaggcgtgttgcgagcagcaagtcacgctcgataattcggtggcttgggtatcttacggtgctcgctgccgtcattttgctaggagcgtatgcagtaaggcgtgtatcgcgcgatctgtccgactcagtgcgggaaacacgacgaggcaggagaattacaggcagcgtacctcccgggactacccgtccccgttcagagtcttgtactggcacacaagtggacggcggctgcggcgctgacacgtcaaccgatggaaagtctgagagtgaacagaccgaaaacggggaggactcacgcttttccacccggacccctattcatgtcactgcatcgacttccccattcgcgacgcgcaaggcggcggaagaacgctcttcgagtccgagagacagaaaagttccggagggtgcccaactccccacgtcgtcgacacctcatgcacaaagaaaggactcaggtagtgatagccggaacccatctacactcataccttcaccaggtaccaacacgtttaacatgaacttttatattatcggagcaggctcttcagcgctcgattttattttcccgcacactccggatgctcaggctacagtcgtctcccccccccgcagcgcggcggccgcaccaactgtcgaaacagttccaagggttcgcacttactcgacaccaacaacattaaccctaccaacggcaccagcgaccgccactagcaaccacatgcatgcctcagcgactccctcgccaccggaacgtcctcaaaacttccgtgggggactcatgcggcaaaacggcatggttgaggggacatcgttaacgactaccgaggctgggatgccagcgccgttacaaagccctcaacacattgagacggaggcgaggttaacgtactcaaatcatctcaagagcccgcatacaccagaaactccaactgtccactcaatagaccccgttgtcggcaccagtggccattccgtagcggtgggatcgcagtctccagccggtggacctcctacagatagccgcaccccagcggcactgacccccacaagttcttctttctcacatgcagattctcttgaaacctctgagcatccgcaaagtggaccgtcgcttcatccattaatctccgggatacaagatgccgtgcaaagccaacttccactatcacaacaggagactctccctgtggtagaaaatgcgactttcttcgggccgcaacagactccaccgtggatggacgaaactgcagctgctgcaattccactcgctccctcacaaccagggtcacgtacacaacccatctcgtctccgcatactctactttcccgtagcggcggtgtgtcagctgtgccaggaccacccagaacagaaaaccctcggcaaccacaagttccaggcgaaaactcttactactctgtaccaactgagcggacgatctctgatccaggtccccaaagggcgggtgcggctcaggctgatggtatcggggctggaggcccacgggacacacaatcagcggtaactccatga

SEQ ID NO: 12 - DNA, 558 bp, Toxoplasma gondii
  source 1..558: mol_type = genomic DNA
atgttcgccgtaaaacattgtttgctggttgttgccgttggcgccctggtcaacgtctcggtgagggctgccgagttttccggagttgttaaccagggaccagtcgacgtgcctttcagcggtaaacctcttgatgagagagcagttggaggaaaaggtgaacatacaccaccactcccagacgagaggcaacaagagccagaagaaccggtttcccaacgtgcatccagagtggcagaacaactgtttcgcaagttcttgaagttcgctgaaaacgtcggacagcacagtgagaaggccttcaaaaaagcaaaggtggtggcagaaaaaggcttcaccgcggcaaaaacgcacacggttaggggtttcaaggtggccaaagaagcagctggaaggggcatggtgaccgttggcaagaaactcgcgaatgtggagagtgacagaagcactacgacaacgcaggcccccgacagccctaatggcctggcagaaacccaggctccagtggagccccaacagcgggccgcacacgtgcccgtcccagacttttcgcagtaa

SEQ ID NO: 13 - DNA, 663 bp, Toxoplasma gondii
  source 1..663: mol_type = genomic DNA
atggaccgtaccatatgtcccttttttatacagagtttcacaatgtcaactgctttgaagcggctcattccatttctagttccctttgtggttttcctggtcgctgctgccttgggaggccttgcggcggatcagcctggaaatcatcaggctcttgcagaaccagttacgggtgtgggggaagcaggagtgtcccccgtcaacgaagctggtgagtcatacagttctgcaacttcgggtgtccaagaagctaccgccccaggtgcagtgctcctggaagcaatcgatgccgagtcggataaggtggacaatcaggcggagggaggtgagcgtatgaagaaggtcgaagaggagttgtcgttattgaggcgggaattatatgatcgcacagatcgccctggtttgaagcgtgctgtgattttatctcttgggacaagtgcattgatagctgggaggatgttttccagtacgttgcgagccgctgtaccgtggtatgcagttgcgttcaatgcgattgtcgccgcctactacattcgcaaagttcttacctatcgtcgtcgagtgatgacaaagaggcaacccttcatgagttcggtaaagaacttttttcgccgcaggccaaaggatgggggtgctggggtggacaaagcctccaagaaataa

SEQ ID NO: 14 - DNA, 1038 bp, Toxoplasma gondii
  source 1..1038: mol_type = genomic DNA
atgcagggcacttggttttctttatttgtcgtcgtcatggtgtcgcatcttgcgtttggaggtgagtgcagctttggttcttacctcgcagatatggcgggcctcacggggcgggaagacaaagaacaccatgcggcgaaaaagagatactaccactcgatgtacggaaacaaaactccgtatccctacgcagacggacagcagggctctccacctcctcagggacagctacttattatccaaaaccctgatggatctttcatgatcgtagaccaacaaggcgtcccgcaggcgccccaggcggcgggaggcccgggttctcccatgaatggcggttactatatgcctgcaggtgtctacactgcacaagtcgttccaggaacacctggtcaccccgtacaggcgattccgcagcagcctcttcgcacacaagcaacggccacctattatcacccggcagcagctcctcctcccggtccttcagtttttgtcttcaccccatcctctgttcaaccgggtgcggaggtgactcccggttattctggtctgcagttgagacaacagtctcaatacgattacagctatccaggtactacttctactcccacgcctccacgaccagcgtcgtacggctacccagcgtttccggcatttccacggctgcccgcgttttctgactcagtttcggtttcaactgaagatagtgggcttacagtcgtcagagactcgtcatcctctgaatccacggtcacgccggcagacgaagctgcttcggagtccgaagagggagacaagacaagcaggaaatctaaggtcaagaagggagtcctgacggggttaggggtagcagcaacgctggcagcagcagcggccgccgcaaaggctgtcaagggatttggcggcacccgcacttccacggcgcctgctgaggctggaaaaacggagttggacgacggatatcgcccgcccccattcaacccgcgaccctcaccctacgccgagttattgaaggatttggaaagaatgcgcaaagagtga

SEQ ID NO: 15 - DNA, 363 bp, Toxoplasma gondii
  source 1..363: mol_type = genomic DNA
atggcgtctgtaaaacgcgtcgttgtggcggtaatgatcgtgaacgtgctggctttaatttttgtgggcgttgccggttcaacgcgtgacacagggtcaggcggggatgactccgaaggtgcttgggggggtgaacaacaacaggtacaacaacacggacaaagtgaagaccgatcgttattcgaaaggggaagagcagcggtgactggacatccagtgaggactgcagtgggacttgctgcagctgtggtggccgttgtgtcactactgcgattgttgagaaggaggaggagacgcgcgattcaagaagagagcaaggagtctgcaaccgcggaagaggaagaagttgccgaggaagagtaa

SEQ ID NO: 16 - DNA, 675 bp, Toxoplasma gondii
  source 1..675: mol_type = genomic DNA
atggcacacggtggcatctatctgaggcagaagcgtaacttctgtcctttaactgtctccacagttgctgtggtctttgtagtcttcatgggtgtactcgtcaattcgttgggtggagtcgctgtcgcagcagacagcggtggtgttaggcagaccccttcggaaaccggttcgagcggtggacagcaagaagcagtggggaccactgaagactatgtcaactcttcggcgatgggcggtggccaaggcgactcgttagctgaagatgatacaacctccgatgcggcggagggcgacgttgacccttttcccgcgctggcgaatgaggggaagtcggaggcgcgtggcccgtcgctcgaggaaagaatcgaagaacagggcacaagacgacgttactcctctgttcaagaaccacaagcgaaggtgcctagcaaacgaacacagaaacgccacagactcattggtgctgtggtgttggcagtatctgtggcaatgcttaccgctttctttcttcgaaggactggacgacgctctccccaagaaccatctgggggtggtggtggaaatgatgcaggcaataatgctgggaacggtgggaatgaaggcagaggtgaaggaggcgaggatgacaggcgcccgttgcacccgggaagtgtgaatgagtttgatttttaa

SEQ ID NO: 17 - DNA, 711 bp, Toxoplasma gondii
  source 1..711: mol_type = genomic DNA
atggcccgacacgcaatttttttcgcgctttgtgttttaggcctggtggcggcggctttgccccagttcgctaccgcggccaccgcgtcagatgacgaactgatgagtcgaatccgaaattctgactttttcgatggtcaagcacccgttgacagtctcagaccgacgaacgccggtgtcgactcgaaagggaccgacgatcacctcaccaccagcatggataaggcatctgtagagagtcagcttccgagaagagagccattggagacggagccagatgaacaagaagaagttcatttcaggaagcgaggcgtccgttccgacgctgaagtgactgacgacaacatctacgaggagcacactgatcgtaaagtggttccgaggaagtcggagggcaagcgaagcttcaaagacttgctgaagaagctcgcgctgccggctgttggtatgggtgcatcgtattttgccgctgatagaattctgccggaactaacagagcagcaacagacaggcgaagaacccctaaccaccggccagaatgtgagcactgtgttaggcttcgcagcgcttgctgctgccgcagcgttccttggcatgggtctcacgaggacgtaccgacatttttccccacgcaaaaacagatcacggcagcctgcactcgagcaagaggtgcctgaatcaggcaaagatggggaggatgcccgccagtag

SEQ ID NO: 18 - DNA, 810 bp, Toxoplasma gondii
  source 1..810: mol_type = genomic DNA
atggctttaccattgcgtgtttcggccacggtgttcgtggtcttcgctgtctttggtgtagctcgcgccatgaacggtcctttgagttatcatccaagcagttacggagcgtcgtatccgaatccgagtaatcctctgcatggaatgcccaagccagagaacccggtgagaccgcctcctcccggtttccatccaagcgttattcccaatcccccgtacccgctgggcactccagcgggcatgccacagccagaggttccgccacttcagcatcccccgccaacgggttcccctcccgcggcagctccccagcctccatatccagtgggtactccaggaatgccacagccagagataccgcctgttcatcggccgccgcctccgggtttccgtcccgaagtggctcccgtgcccccgtatccagtgggcactccaacgggcatgccccagccggagataccggcagttcaccatccgttcccctacgttacgacaaccacgacagctgctcctcgtgtgctggtttataagattccctatggaggcgctgcgcccccccgtgctcctccagtgccaccccgtatgggcccgagtgatatcagcactcacgtgcggggtgcaatccggcgtcaacccgctaccgccaccacaaccactactacccgcaatgtactactcaggacagcgatactggctgcagcggcagcaaccttgatagccctgttcagacaaagacctttgttcacggagggggtacggatgtttccagatttccaatacagattcaccgtccaaacgacgcagaattaa

SEQ ID NO: 19 - DNA, 957 bp, Toxoplasma gondii
  source 1..957: mol_type = genomic DNA
atgcggtcactcaagtcaatcgtcgtgcccctctcggcagcgttggtcgcagcggcggaactcgaccttttcctcggtgaatcgggagtctacttattcgggaaagcgtctgagtccgacgtcgctctgaaggttccagaggatccggttccggaggaaccgcgccgtgaacccgagaagcacgttgacctcttcggcgaagactggaaacagttcggcggttccggattcggagatttctcgaaggtggagttcgagaatcttttttcgcaagtgcatgaaatgatgagacgccttatgggacgaggtgtggatggatttggcccgtctcttctcggcgactctcccggtttccacttcccccgcctcagagcgttgcaaccgaaaacgaagctcgagaaaactggcacgtgccagtacgtggttacttgggcgccggaggtgacggcggagaacgttcgtgtgattctgcacttgcagaggcgccaggttgaggttcagtaccgcgcagctactcgccgtgatgagaagacggagggcggcgagagccacagcatgtcgaaggagcagtcttctcagctgatgtctgtggacccgcaatgcatcatgacacgagaagttgtcgcacagaaacttgctggctggacagacaacactcacaccgcaacagcggggacgccgaaaaagctcctcatttcgtttccgtctccggatcacatcaaggaaatggtcaaggaggggtatctgccagacaacgcgctggaacgcgttcttgcgggcgattttgagggattctcccggacccagatgtgcctggtgtccggcagaaaccgaacggagtgtgcgttcgcagagggccaagaggtcgaactcgaggagaagccgcttccctcggattccagccctgtgacgtccgtcgaactgccccgactctcgcaggaagaccgaggactctga

SEQ ID NO: 20 - DNA, 903 bp, Toxoplasma gondii
  source 1..903: mol_type = genomic DNA
atgaaatcgggcagttgccctttcacgttttcgcccactctttctcaccctcttgaaatagcctggcgagctcgtccacttcagtggccggaaatcgaacgccagcccgaaccagctgctccctgtggcgcgttgtatcccgcatctcgcgttctgtccttttcacccacgatgcgagcgattcgttccgttgtcggccttcccgttatgggggctgcagttttcttgggacttctcagcggagaactgcccaactcctccgtgttgcccgtccccgaggtggcgagcacccccttcctcctcagcgtcgccgctgacggcgatggcggcaaaaactatgcggaagtcgccaaggtggaagcgttgacaaatatgatcagcactcccattgagctcttcgtgaaggacgtctggcaacagctgttccataaatctggcaagcccgtgtgggaaaacatgttgttcaaattcggcagtatgatccgacaccgcgccgcacacaaggccactctcgtgattatgtgggaactgaggcacttcctgtatggcactgccaaagtgaacccctcggcgtggaagaagttggagaccaagttcgagacctatttgcgtgagtggtggatgactgtccctgaggacccatgggctgcactgcatgcaggggcgtggaagtcgctcctcaagctgtacaacgaagacctggagccgcttctgagaggcagcccgaagctgaaggacctggagagtatcctgttcgactcgaagctggcgacgatccgcagatggaccgacgaggcccacatcgaagtgatgaagggccggacttctaacatggttcctcggcttgaggccctgagtgcgaagatggccgtgaagcagaaggccatgcagggcaagcagtga

SEQ ID NO: 21 - DNA, 1518 bp, Toxoplasma gondii
  source 1..1518: mol_type = genomic DNA
atgtatcgaaaccactcagggatacggcttgcctgcaggctcttcgaagttggagctctcgttttagctttagaaaatgtctctggtattcaccggttcgtcgccgggattgagtggaacgaagggaaagaggattttcagtacacgacgtctccttgggtgattccacctgacggattagtcagtcggcgacttgctgaggaacctcctagaaagcgcttgcgaaaaacaaacaaatcagatcgtgactcagattctgctcaaggttccaggacgacttctcctggcagtctgggcggttttggtgcaacaggtgggcgtgttgccgctccgcgaatacggagtggtgttgtggcgtcggaggcgatccgaggtacaatttggaggaggccaggtgaagtcgaaggcaccttgaagcttcgtagaaccaggcctcaatattcacaaacagatggagatggcttgcaggggaacaggctttcatcgacaggggaacgatcaggaatatcgcatggggcgcagtctctggcaatgcgcccaaggacaatgggacaaacaatgaaatctttggagagctcatgggattcggatccactcgaaggaacatcacgggattggctctatgtaacaacgagtgagacaactgcttcgcccggccttaccggctttggagggattggtaaaaagcttgcccctctttacgtacgagataggaaatttgacttacttcaatttgtgaatctgacgaggagcaagaaacaaaaactcttaatgtcatcaaagagcccctcgctcagaaagctcctcatgaacgacatggcccaggaatgggctctaggaattttgcagatcgtgttgcagggacgacaaagagctctgcaggcttcccacaccacgcgaactacagaacccgcaagtggtactgacggcactagtaaatcgtcggaagacgaagcaacacgagccagtgagggcaacgcttccgtcaaccagacatcccccgccgcgtcatatccgcgacggccctcttccgacgaagggcaggacagcggacgtagaaagtgttcaaagcgaagtccgtctcgtctcgtacagaacgctcctctttttctgaaggatgatagtcattcactgaaggacacgctggatttagtaaaaaacaagaaccgggagctgacggagaaggggagggtacatgccacccccctgagggtcgttttgttaaatagtatcatgatgaagaaacttgagaaggtcttgccagtcgtcgaaagcatggacagagcactgatggctcgtcagacgtcttccgaagcagcgactgtggacgactctagcacttcaatttcacatggtatgcagggtagtaccagctcaggtgcagctgctgtacagggtcccagcacttcagttccaggtgcttcgggaggtcttggtccttcgggggggaagcggaaacccgacgacgaagatgattttgactgttcacgcgcgaagcggaaaaatgatcagatgtga

SEQ ID NO: 22 - DNA, 1242 bp, Toxoplasma gondii
  source 1..1242: mol_type = genomic DNA
atgcatagccggaactgcgtcggaggatcgttttatgacggggccgtgtgttgttcgcctccatcgcgtgctttcggcaatatgcacaacctagtcctggtgttgctggcgtttctgtcttcgtgggaagacaacgaaaccaggcgcggcgatgtggtggaacagcagaatccttttcgcctagcgattcacggcaaaactgagagagaccgtgacgggaattgcacacaacacggcgtgagatcaaatgatttccgtttcgtggatgaaggtgacatgtctgctgaagtaggtcgtggtctggctttacagaaacatgtccgagttccgctgcaggcttcgattgctcggcggctttctgacagggagtcggaaaagaggagccaaggttccgacaacggaaacggcactaccccacctttgccaccacggcggaccccgtctccgcggccttcaggagccagtggagttgtccaacaaggagctgccggtgtgggcacgcctacgatgttggggacaggtggccaacatctctctgaccagggagctacaggttcagtcgcaccatcagtgcaatcttcctcatctagtgctgtcagtgttgagggtgcattgcctctaatccagtttttcggaagccgtagcagttctcctgaagtccctctatgtcatgcgtgccacactgtagaggcagctgtaggcgtgcttcaaagcataagacaccgcagacgggctggcgcgcgtgaggcagctgagcgaatagcggcactggagtcccaacatgctcttcttgtcagttcctccacccagggagagcacagtcaaggtgcacggccaagtgatatccttgtgagtcaccgggcgctacaacgggcgcgccgagaggccacccgacaggaagaaacgctacggggagaagaagcctccctggaagcgtttatacgcgtggcctctgaaaagcgtgaaagagaagggcagaggtctctcgaggtgctccgccagcgcgtggaaaatcagactgcagaacttgctgtgttacgcgtcgaggcagcactagagcggcaacgtgaaatggtggagctcgagaggaggcgcggagacttactggccctggccttagtcgcagaagacgacgaagaatatcttcggctgagtgcagaagaagaagcagtccaacggcaaatcgagcaattggcggaggaaacgaggagaccgcgccgtggccgtagaaagcccgcgtga

SEQ ID NO: 23 - DNA, 1506 bp, Toxoplasma gondii
  source 1..1506: mol_type = genomic DNA
atggaacgcattgttgtactcgtgtcagcgacatttctctatgccgtcgtgggcagggcatctatggcatcagcagagatggcgtccagaacaaagcgactatatatcctcatttccttccattgtgtgctttctgagattttaagcggccacgccgcggcggaagccacgtcgaagccagcgcgccagcccgaaggtgcgggacggtctgcttccccgtcaccttcactgtcacacgcttcaggtgttgttgtaggggcacgccggcggaggcttgccgaaggcagtcccggggaggagcctgatcccgtccgtgaattgctcgatcttgaggaggagctcgaaaaccttcatgcactgcggttcaaagaacgacttgcgtttaggcaatgtgtgaggcactggggtactttcgacgcctactgtcgagaacactcgagatggaaaagcaagatggcggcggatccagagaggatgagagatgcattcgaaaggaaacaagcaaggaagcagacggcttgcaacgtttgggcggcattgctagatgccgcccgtgagaaaattgaggccatggacagggagaggaaacagatgcaaagtcgactcaccaaggaacaaacctccctgtatcttgccgcaaaagctgcccgcggtcgagctcaaatcgggggtgatagttcgcataccgctgtgggtgaggcagcagttggtgcgagcacgagaccgccggctactggtgaaagtcctacgccaggtgactctggttccctggacgccttggataacgaattagcgcgactaaggcaggtaatttcactggcgttaggcaaatggcatcgttcgcgccgggctctgaaggatcacttagagcgccgtgtaccgtctactccgccgggtgtgccttcacctgaacgagaccgtgccggtgaagcccgagccgtatgggaggcgcaacacctccaactcgaacaagatgctaaacaggcacgcgaggccgttgataaatttcgtgagcggttgcgggaacttaacgcacagaaagctgcacatgagaaggcgcacggtgtctctccgggcaggagaggctgtgaaaatgctcctgtccgcttctcccgtcttggcattaccgttgacgcacgtgaggcggctataccgtggtttcaacgccctaattttttgaccttgagccaccgctggagtggcgcgcctcctgatccagctgcacgaccgcctcctcgctacagatatactgtgtttactgctgaggtacaacacgtatcacgtccaactctgaagccacgcagcaagcattctcgccttcgtgtagctgatccaacccgcgagacaggtgccgaaacgaaggcaagcacgagtacgtctggacttgcaggaccatcagagttccaaaatgaacgagtgcactgcgctctatatgggactgacgaatccgtcctcgacagtagcgagtcgttggcaaaaccgtgttttgtgaaatggcacggctga

SEQ ID NO: 24 - DNA, 1629 bp, Toxoplasma gondii
  source 1..1629: mol_type = genomic DNA
atgctccagatggcacgatataccgcaaacatttgtgccgtctctatttgtagcctggtattggtggtggcactttctgttggtattcttccaacgccagactggaaggaccgggtgaagatgggcggcactgaaagcgggcctttcgttttacaggtctgcgctagtgatcccctactccatgacccgaaggaacgagagtctggatcagattcgaccagagggtatcacggcggaagctccagcggaggtagcagtagcagacagggtacgacggtaagaagcgacgcgggactttcgtcccagagcagtcagtcttcggcgtccactagcgccaagactagcgaaaatcaccgacaggggccggcgttcctgacatcggtattccgaaaaggtgagacccctgcgctggactgggtaccctacggcactctggaaggcgcaaaatggcacccagggcagcaaaaatcgaagaggcgctcgtctgctaccaccagcagacgacagggagcatcgcattctgggaatcctggacaactgcccgcgccgcgtggaggcctccagccaacaacgacactcagcgggactggtggacaacccaggactgactcgacagacgagggggctgccgcgacgtcggtaatcccaaatcgttcagggtatccccagccagtaccgtatcttatccaccctgttggatttttgagtggagattatagatcactagggatgcttggtctcgtcccatcagtttataccgctacttcggttcagcacatggtaggccaacccggcacaataatccccctcgtgctattgcccggaaagcaagagccggaaggactagtatctacaggaactctgtctgattccttagtctatgagccacttggggttgtgaatcttgggaccgaaatgccgaatcaaggttcgacttcacagtctggcgccgtggctagcaggaaacgaccagcgggtggggccaatggtccggacaagaggcgtcgtgtggaaccagcaggactcacagaatcgcgtctgcggcctgaacccagcttatcctcactcacggaaaaaggttcaacagcgttttccaccaggccgccgtcatcccgcagtgctctggaaggactcacgcaggagacggtagaaatgctgctggacactccatcatatcccatatcgtcagtggtatcatcaccacctccagctagaaagtcatccacctcgtcatcccaacatctggaagctcgactctcacaatcaagaggtcctcccaggacgaggcctcctttcaacccgtggtcaacgaagactggtcttcttgagagacgaggagtgtctgagcttccaccgctatacatccctcgtcctctcgcttcaggctacaggaatcctgcggacagtcgaaagcactccacagtcactcctcaaaccacacctccagctagaaagtcatccacctcgtcatcccagcatctggaagctcgactctcacaatcaagaggtcctcccaggacgaggcctcctttcaacccgtggtcaacgaagactggtcttcttgagagacgaggagtgtctgagcttccgccgctacgcatcgttaaaccacccactaagggtaattaa

SEQ ID NO: 25 - DNA, 948 bp, Toxoplasma gondii
  source 1..948: mol_type = genomic DNA
atgaagcgtttctggttgtgcgcgctgctttcgctgctcgagttttcatggggctgcaactctctcggtcccagcctgccgtctttccaggtcgcagaaggggcatttttcggtcgccttcggaactggttcggaaagaacgcggagcagaagccagaggtgccggtcgctcccgtagcggacgatgacgctggaagtgaggaggagagctcctcccactacggcgtcaagactctcacggcatcgactactactactacgacgacaacgacgacgacaaccgtgacttccacgaagcctgagggcgtctgggaggaagagtatgactccatggaggtcccgtacaccccactcccgcctctccgggggattgggctgctggggggtgcgatcttcgtcagtctcgctttcaatttgggcaaactacctctacttatggggggaataggtgtagttcagtatatcaactcggttgtgcaacgaatgcacgcgcgccgcgccgcggacgccgcattgagacgctttgaggatcgccgggagctcgttcgtgcaagaagacgacgacggtggatccagacgttctactcccacaacgcgttgcagcaagaccgcgcgacaaggaagggagagacacaaaacgaggaaagcaatgcaactctagccaacagctcaacgggtaaaggcgacggcgggactgcaggaagcgaggcgccgcctcgcgggatacatgcagacgctgcgtcagaaaggacatggaacactggtggaaaaaagggctcgcttcatgatagtggtcttcacgccgaaggcagcgacaaacgtacaaacccttctgagactcgagaggtcccgaaaacgcggctcaggaaaccaacggaaaggaacaccaaagcacaggtgaagaagaagaccccgagggagaacctcccggaattcgatagaaactga

SEQ ID NO: 26 - DNA, 5715 bp, Toxoplasma gondii
  source 1..5715: mol_type = genomic DNA
atgaaagtacgttctgtgctctcggttggtttctgggcggctgcatgcgtagcctttcagacaaatcctgatctcgataatctatgtcatgataatagcagaaattatgagttccgcttgttggattccgtgtttctcacgcgtgagggtctatggacatctttgcggatcgtcggcacggaggccgcagcgcactcgccaactagcacaaaggaggaacaggatcccgggtcgtcgaacagtccaggtgaagacaccagcggaacccagttgccacaaggttcgactcagtgtgactggagaaagtgtggcacaagagagcaggtggagaaaacgattaaggaaatagaggaggaatggggagatgagtcggcttttgtgacgcgtaagcttcaacggcgtatgagcaccccttgcaggttaaaaaaacacccctgcccaaaacaacggttgacatgggagcgtgaaattagggaagaattccgacgggtagcgccgcgtcaccttgaacgcgcggccacgctcagaaaagctcttgagcagcgacctccaagtatgtctggcagccttgggacacagagcacgggaggtactttaccgcaggcgactcctgaggacacaagcgtatctaggatgagtgccactccgggtaatgcagtcgaggtagaacttataggtttcgctgttggtaacgatgatactgatatccctgttttccgcacaccggggcctccgggtacaacatcagctccgagcgagccgcaggccggaattccagcgacattaggcggcaagcccgcaatcctcattctgcccaccaccagcgatgcttcaaccggtggacgttctatttcgcagtcgggaactaatctcacgcagcaggcaagcttccagcaaccaggcggtactgcatctgggccgtcaacgtcgtcctctgtttctacgtcacaaacagcgttaccacctgggaacgtaagaggcgccgccggtctgggcacatcaaccccatcaaccacgaatctgcatcaggcatcctcgaaaaattcgactgtcgatccaggagcttccagcagcagtggagtatctggcgtcgcccaggcttttccgggggtactacctggatctgttatgcatcaggcactacagcgaagcggtttgttgtcacaaccgccaccctcagagcgccccgccgcaagtaagagaaggcggaaacgaagaggtggcgaaggtgaccttgccagccagggggtggggcgtacaggagtcaaccagccggtagcagtggatccgtacgacaatacaccttctccaaaattacgattttcccctctgcgaaccgcagagggcgccgcaggtgcaacaaaaccaccacatctgttagccagcttgccaagctccgacccaggcatgttttcgagcacagggtctagccctactggcagctcgcgtctaccttcaccccaaggcagcagttcgtctacttcgttgtctttgggtaccgctcacaggaacagtcagaccacttttcctttgaagcgtgaaccgctgcctccgggcacactagtggaaccagttgtaccgttggtcccttttgcggcaaacaaaaacggacgcctggaaactgtccttatccccagtgctgcggtagttgcaacaggcggatcgtcttttccgcaatcgggaaccgatgccacacagcaggtaggctctcagcaaccacgccgtactgcgtcggggccgccaacgtcgtcctttgtttctgcgtcacaaacagcgttaccacctgggaacgtaagaggcgccgccggtccgggcgcaccgccccctcctgccacgcatccgcatctagcatactctaaacgttcgactgtcgatccagaaccttccctcagcagaagctcacgtggagtcccccaggcgtttccgaaccttcagcagcagccacaagggaatgttgtgcatcaaccactacagcagcagccacaagggaatgttgtgcatcaaccactacagcagcagccacaagggtctcttgtgcatcaaccactacagcagcagccacaagggactgttgtgcatcaaccactacagctgcagccacaagggtctgttgtgcatcaaccactacagcagcagacacaagggtctcttgtgcatcaaccactacagcagcagccacaagggaatgttgcgcatcaaccactacagcagcagccacaagggtctgttgtgcatcaaccactacagcagcagccacaagggtctcttgtgcatcaaccactacagatgcagccacaagggaatgttgtgcatcaaccactacagcagcagcaacaggggtctcttgtgcaccatcgaccacagcatcagccacaagggaatgttgtgcaccaaccactacagcagcagccacaagggtctgttgtgcatcaaccactacagcagcagccacaggggtctcttgtgcaccatcgaccacagcatcagccacaagggaatgttgtgtatcaaccactacagcagcagccacaagggaatgttgtgcatcaaccactacagcagcagccacaagggtctcttgtgcatcaaccactacagcatcaggcacaagggtctgttgtgtatcaaccactacagcagcagccacaagggaatgttgtgcatcaaccactacagcagcagccacaagggtctgttgtgtatcaaccactacagcatcagccacaaggggctcttgtgcaccatcgaccacagcatcagccacaagggaatgttgtgcatcaaccactacagcagcagccacaagggaattttgtgcatcaaccactacagcagcagcaacaggggtctcttgtgcaccatctgcaccgtcgaccacagcatcagccacaagggaatgttgtgtatcaaccactacagcagcagccacaagggtctgttgtgcatcaaccactacagcagcagccacaagggtctcttgtgcatcaaccactacagcagcagccacaagggaatgttgtgtatcaaccactacagctgcagccacaagggtctgttgtgcatcaaccactacagcagcatccacaagggtctcttgtgcatcaaccactacagcagcatctacaagggtctcgtgtgcatcaaccactacagcagcagccacaagggtctgttgtgcatcaaccactacagcatcaggcacaagggtctgttgtgcatcaaccactacagcagcagccacaagggtctcttgtgcatcaaccactacagcagcaggagttgttgccacctggggtgcagccggaaacttcggtgtcgtggaagcctgcgttggcttcagctgacaaaggccaacaacgttcatctggtaaaatgcttatgacgcttgacattcctgggtcgtcaaggcgggcgagtgagcgtgcgtactacgcgccatcacgtgatggcgcgttgctttttgaccagttgtttcccgaatttcctttcgaaggaacatcgatgaatcaccctcagcattatgctggccatgacactgcaaacgtgggtgatagcagtcagcccaagacagcgtactcaacaggagaagtagcgggaccggcgtctagttttgattttctctcacccacgggttggaagcgtacgattcgcagtattgagacgccgcatcctggacatggttcgcaacaacccggggggggaggtacagtccttccgtcttaccctcagttaaaagattttgatctcacgttgttatcgacccctatgccagctcctcaatgggacacttcgacgaacgcaccttctgaaaatgtcgcggcgaagacacaagctgtgccaacacggggcgacgagagtggcagtgtgacatccccatatgaccaactttttagggaagccgctgccttcaacgaaagcatgcgttcagatgaagctcctaaaagttatttgacttccacgtcaatgcactttcaatcagctgccccatcgagccagaatcgaccaggatccctccaaaacaaaccatcggaaagtggaagaaccagcggtgtttctgctgtcggacacaaagcagccgctccgcacgtgaagccttccgacagggaacaaaatccatttcagctttttgttgagccactgcctagtgcaccaaaaccaacatctgcttttgcttggccagaagcagggacctcctttgagccagttacatcagccgagtcgatgactgtctccggggggtctggtaagaaacaggccaaaaggagcacgtctcctgtaacggcttcactggagcagtcaccttttgagaccgtatctgtctccagcgccaccgagcttcaagcgccttcaatttctgaatacggctcaccaaggacacatctgtcctctacgcccgcggtgaaaggtccgtctgcgggcccggtatcttccacgtcaaacgaatttgggagtctccttgcggctgcgttacgggacgcagggtggtcggatggcatgacagaagacgaagcgaccgacttcgttctcgattcaattaaaaacttagaagaactgcaagtggcaaatgaatgggatgctgcatcgacggagacaagacctgctgctgaagggggtacgcaacatgcgtctttcaacttagtgtcgacgctactaggccccgacgccactccgacgccaccaggatcgcgctctacccctcctgggggaccgacgaagaaaccatcagccatgggacgtcagaaaccaagctcacggtccacttcagattcgaaagttgaaggccgaagttcaacgcgcgattcgagtctcgtcgcaccatcgacttccataggagcagcggttcgtgagagaagcaaaacttcttcgcctggtagctcctctccgcaatcaaaacaactcacggaagagtccttctctctgggtaccaaagaggacgatagcgcatctatggttgaaggggatgagtcacaggttcaatcgtccaaggctaccgcttccgccacaagacgccgtgcttggcaagggcagcgtctgaatatatttggaatacagccggaaacaccgggaacacagcctgttctgcagttcatgagggaaagcaatagagggtcagtctcgactgcaaaatccccggatactccagtcacatctgcaccggggggctcacagggtgacagcggcaatgacggagtggggttagtagccggatcaagcgtgctgccttcagcagtgcaaggtaagtcatatgcctccatctccggcatcccttctcacagggagagtctttcgtcttccatccaggatgtgcagccagggggtgttagaggtgcaggccgtcgtacaccaaatgtcaggacgccagtaagtgcctccccaactaccgtgtttccttttgccagtgaaggattgttgaagaaaactagcaaaagacagacccctgggttagaaggctatacaccttcggcgaagactcgtagggagactggtaccgttcttccatcgagtctcggagagtggcaagggctcacgcttagaacaccaatgaagtctacaagtccgggtgcttccgaaatgcagcctttgtccagtttggtggcttctacgtcccgtggtgcactacagcctgccttgcctggttcgatgtctccgagcagtagcgctcgcccccaatctcttcgagcgccgtctcgcggtagctccagttattccgaatag

SEQ ID NO: 27 - DNA, 2598 bp, Toxoplasma gondii
  source 1..2598: mol_type = genomic DNA
atgcgaccgttacgtgtggccgttgccctgttctgggcaatggttgcggtggtggggttttgggcttcgccggatagccgcttgaccgtgcgaggtccacagtttgcagacgcggcgacacggggagttgtgaaatctttgaaacgagcaatgaaccagggctggcgcaatggagcccacagcatttgcgcgatcctcggctgtgactacgagcatgtcaaagcgcatctaacgcataagcccactttcttccattcattcaaggcagtgtgcgctcagttggacgagttcgaggaggaggttacacacgccaagatgcgagaggaagacttgaccccgagccagagagagtaccgctggctcctcctttcgaagggggccgccttgatcaacgatgctctgggaacgcagttcgaagtgccggcttcctacgttcctcacaacgcgaagaaccgccactacatacctggccagcgcggggagggagacgagaaggagaagttgaagacccgaatgaggggactgcaggtggttgtcccgcttccaaccctcgaggagattcaaaaggacgggatggaccgccttgcggccgtaagggagaaacacatggcccaaatcaaggagctggaggatgctcgtcatcgaaagttcttgctgcttcaggaggaacacgaccgccagacagaccagctggtttctgaacttagactgaagcacaccgaagagatggacacaattcgtcgcgagctggctgaggagaggcgcctcttcgagcagagcgtgaaggtgtgggacgcagtcaaccgcctgctcactgacgctcacgtcggtatcgagacgctgaccgaccgtgtccacacgatgagtcagcatgtgttcaagttgaacgtgttctatgagaagctgcactcgttccaacagacggcgaaggaaaatccgactggcgctgcgccgtactctgccctttcctacgctttccagagtgaagcggctgttgaccaggcgatgcaccagattgtcgcgatctaccaagaagcgtccgcaggcgtcgcccgagttcaggagattttgaatcaggccgatggggtcatggcgacggctccgacaagagacgacgccgcgtggtttcagcaacgccagcgcggctacaaagaccggctggagagcttcgtcaaccttctctccgacctgtcagtgcgactggaggactacatgcagaccgctgaggagcgaaaactcgtgacgctgttcctcggagacgaggtccgcacgcaaatcttggctctgcttcaggagcggaccactgagtggtcgacgcgcctcgcgacattgcgcgaacgcacgcaaggcatcgagactgcggccaacaagttcttcgagagcagcacccagctggatcggacgacaggcgaggttgtgagtgcagttctgcagaaccctgaggcattccttgtccaggtttccacgtacgcgacggagtctggcacccttcgctcggcggccggcgtcatcgaagaagacttgaaggccgtggtcaaggcgttgcaagacttgggaagagagatgactggactgacggaaggcgtagcttctgcgcaactccctcctgctgtcttggacttcctcggactacccgggctcttcaatgccctccaggtcgacatgcaagtgaaggcgaagggccagcaactgttgcaactcatcaagggccgtttgagccaaactggcgagataacgcgaaaactggagatgttgaagagcgaggtgaagaacatcaggagccccgcggtgcgtgaacaggcggaatgggcactcaccgaggcgtcgacaaagctccaagatgtattgcggaccaaggctgaagtggagctggagatccagcagatcaatctccagctgcagcaggtccaaggcaccgttactcaacttgaccagagaatcgctcacgagcgcgtggtggcacagcgagcagcggccggcggctccgccgctgcagggttgcgcggaggttcgcttgcgcttggcggcagcgctaccggttctatggtgggactcggaggctccgtgagcggacttggcacagattctcgagctgctatcgcggatttggagcagaagcgacagaatgagaaggaaaagattcaagagctgcgccacaatctgtcctcgaagcaacgtgaaagcgtcagcctagacaacgaagcccggcgcctggaggtggaagtagcaaacaaacagcgtgaactggcggaggagcaacagagagtactgcgcgtggcgactctggctcaggcgctaacaactggtgcatccccaagtattggaatgtcaatggcaagcatgcgtggagggcttggcttgactggaggcttagcaggcagctctgcggctctcatgacacaagggatcatgggttccagagcggcgggtctgttgggaggaagcacggctggacttgcgggagcaagcatgggtggacttgcaggaggaagcatgggtggactcggaggtgcaggtatgggcggctatggaggcggaagcatgggtggtcttggaggcagaagcacggacggacagttgggaagagggacacgttaa

SEQ ID NO: 28 - DNA, 1914 bp, Toxoplasma gondii
  source 1..1914: mol_type = genomic DNA
atgcgtcacatttttcctgatgactcggcgactagcatgagggctctcgtttggggtctcggggcccgtgtcctctggtttttcttagcaggtgttctcgctgctaccgtggacatcgctggcgccgatgggattggacagggtatgcctgacagtggtttcaaccatgtggatgcagaggcgcagccgacggtgtttatccgtgaagagcacgatgacagtgcaagctctgaactcgtcgaggacgacggaacatacagtgtggcccggcgctttcgtctgatggttatggccgaccacaaaaaggacggacgtgcatgcgaaagggacatggttctgcaggccgcggatattacaagattgagagtggggggttcgcgaacatctttcagtgctggactcgtccctctcgtcggtctccctttgttggcggcggctggcctgaaagactacatcctcggagtgaacgcccctgttgatgagctgcgcctccccggcgccagggctctgaccccgcatgacgtggtcgacggtgttgtttcggttggtcccggacctccaccacggcccgacggtgaaacacccagaatagtgccttttgggggtacgcaagataagcctttctggaagtcaaagaccttcatcggatcaggagttgccttggtcgctgccattatcgctggactcgcgtcttcgtatagggcttcaaaacaggagcggtctcgacggggtttgctaggcggcgaacagacggcagtgtgggatttgtctgattgcatccttttagtcgacgtgggccaagcgcagtcccgaaagtccatttttggcaccttcgtgccggggtccgcgagactcatcgttgactaccgtcggcagcgtgctcgcttactgtacgaagaacgaccaccgcttgttggaaatcttctattccgtcttcggcggaagagcctcaacaggttcgaggactttcagctgaacacaccgcactgctattttcgaccagacttccaaccgctggcccagaaagagaggacagaagtttctacgaaaaaggaagatagacatgcccccctccctctgacctctggaaatcttttcttccgtgagctgcttgattctaagggcaaaaaaaccgagggcatcgcgatccatttcgtcaaaaaccccgggtgggtggcccctaaagaggctctaccccttgcagcggcagcgcgaagcgccgcgtcagaccttgatttcaccctgttgatgcgccgagcagcagccagaaatctggtgtgttcagaaagcgtaaaaggaggaagtggcggcatatcaatgtgttggaagtcgtctcccccaacaggttcgttgcttttgtggcacgaggaggtcttgcagcatagctgtcgcgtcgtggctgcctttcgaggcagtgttaatcattcggtctgggcgaactttgcaactcagcaactctctataggctccgatgcgccttctacgcgcagtgataatgtccgttccgtgctgagcaagtgcttgctcctcgagcggaatcctcccacgtatggtgttgcgctgaagagagcaacgatctcgtgtccggacccagcaacggtgccatgcggcagtatcctcttcagacagaagactgacgtaggagtactggagggtcactccggcgcttcaacgtcgtcgaggaagcctactgaggtagcttctacggtcttgcaaggaaaggaagagcccggtcttgtaggcgcaggtgccgcgacccaaatggactacagagggaacaaggagacttccaaggtgatacagtcttcagtagagttttttacggtattcatagtcgattttcagcgcaagccctccgattggccagtactgcttgagatgaggaaaaaggatgcggcaagaactagaacctga

SEQ ID NO: 29 - DNA, 1581 bp, Toxoplasma gondii
  source 1..1581: mol_type = genomic DNA
atggaagtcagacaccgttctgtccagttattctgggtggtcgggttgctggggtttttgatttatgtagtgtcacttcatggttccccggtgaatgccgcggttgttgccgaatcagaaagtgaggctggagacactgcccttgtgcttcatgacactgaagtcatgagctctggcggtacctccagaccccagaaattggtgaaaagagtgcaagggtttcttcggcgctattcggctcctatccgagttaccgtgtcggccattattattttcctcctagggtattacgctttccagtacggcctccggaggcgtcctcaggatggttctcggcgggggcgtcaaccccccgatgaggatagacaaagaggcagctcgccggagactgctcctgagcgaggaacgggggaaagcgattcttcgggtagtcggagtcccgaaagatttcctctgggctcacctcctgcttcaccagaccaagccgacgatggcgatgggtccaagaaatatagggtggacgcatcctctcttttggggaccagaagtgacttgacccgtccatcgggtagtagtgacgaagcaagccaagtacacggccgtcaaggcttggatgtttcggcctccagatcaccaccttctccagcatctggggggaaacccgtagaggggcctttacattccacacctgcaacggggagtccttcagagactgtccttgtaccagcagacacacaaagtccgtgctgcggcgcaaagggctcgcttccaaaggaaacatccccgacaagagacatcggaacacacgttcccggaaaacgttcgccgccatcaccgtccccactgcaaggcccgcgtcttgcttcatttttcgtgggctctgaaagcgggccagagggtgacgtcgtcataatccactcaggtgggccttcttcgtcgtcaggcagcagcggcttgggcgacagctcagtttcaccgtcagatggtgactcaccgacgccaagcgctcctgcacgaggcatgcagcaagagggacctgtggggggcagcagctcaccggagcaaggagggaggcaggcacaggcacccattagtaccactactgcttcctccccacaaacaggggtgcctccagggaaagcagcgccgacatccagaagcgatggcaagccgccgccagggcgaacgggcgtcgataaggtcggagggccttctcgtggaagggggtcgccttcgcgtagcccgggtacccggttgagcctttcaaagaccccacggggaccagttgcctcaccgacaggggggctacgaggaaggggtggcagccatgcagcatcggctggacgagggccgttaccaggtcctcccgggaaaccggagcagcgtccaggagttcttggcccacggacgaagcccttcacaccaaaaccttcgtgggtgccaccatacggaacaccatcatcccggcgtgtaggaagtcgtactcgggaaccgccacaaagtcaagaacagcatccgcaggccccgtctggcgaggggacgcgtgacttagacggtagagaccaagacgacagcaggtga

SEQ ID NO: 30 - DNA, 2052 bp, Toxoplasma gondii
  source 1..2052: mol_type = genomic DNA
atgtctgcccagggtcagcagggtgtccggtcaacagtagcggctggcaagaaccgcttctggcaaccggcacctatcaccgttctgcttgttctttcatcatcatttctcttcgcgttcgcggctaataccccacagaacagttcgacgacggggcagagcacgcctagtgatgaccatggcgtgtcaacagaacatatccacgatgccgtcacggtagatgcggctgaacacgctggagaggatgagatgacagcttgttcaccggaggcggctcgcgtaatcgaagcacgcgtggcgacgctgaaggcggagactgaggctgcggtcgcggaagtgcgcagaacagaagccatgcaaagagagttgttcggtcgtctcaacgcgaaagtgcgcgcaatgaatgaccgcctcgatgagctttctgacgcgcagaaaagcctagcgaagcgcctggaaaccacaggtcagctgcttattgcggatcgtgaagaacaagcaaaacggttcacaaccgatgtcgaaacgtacattatcgagtcggggctgaagaaggccgtctttcagcaacgtgaaattgccgccaaactacagactcttgccgagtcaaaccagaaaagtaagcaggctttagatgctttgcttcagcatgtggacgacgaaaaggagcaaacgaagcagtggatatcaacggtcgttcgcgacctggagaagtatgtcgaggcacgcactcaaaccacgctcgagagtctccagagggacgcgcaggagcacgcgaactttatgcagcagcagctgaatgacatgaaactggatcacttgcttctactgcaagctgtcagcagcgcagagacgcagctgaatgaacgcgggattgccggggtagacatttcccagctggacgagtcagcgtccttcgagaggatgatgacgacgttcgagaaggtcctgaaggaacagctcaaggggaaatttgtgttgccgatcttcgtcgtgacgcagtgcccggactccatggagagagtggcgttcatgaatacctacctggtgccatcgaaacgcaactttcgcgccgtgtttcaagctttgggacatacacctcaagcctctgctgttgtcatccggattgagtcagttatggttgaggcttggatggaggtgaatggaaaagtgacaggcatgcagtacctcacgcctcctgctcacgaggcgttgaccgtgaccaccaaggatcggttcggcttcgaatttctcaggcgcgtgagagagcttgaaacaggggattttaaggctgatccacacggacgcagcgtcgttattgcgtttgtggggaatcggaaggggcgtattggaggactgccgctgacagatgtaaccgagttcaacaagttccaagccctgcgtaccctggcaaccatgcattcctctccgataaaggaaacaaataatctttggcaaatcatgaagacggaggtggatatagtagccaccttcgcagccatgccacgagttgaagttggcgggagttcactacgcatttaccaaggaatcgcgccggagccgaggctgcccgcatctccgttttgcagaaacgcgttcacgctcatccgaatagaggtcgcaaaatccccccgtgggaagcaagaatacgtctatcctaaggcgtcactgctgaagaaggtgttcgacatccttgtatctacgaacacatcgcaggattcaggcggtgatggtagctttgccgtcatcagggcaaacgttagcaatgctggttggctgcagtctaagctctatgctacggcagaccgaatggcagtcgaaatccatcgtcccgtccctgggacagctcctccctcgttctccagtgaggatgttgcgggggaacaccgtgccaatagtatggctgcggttgtagaccaaatacgaaaacaaatgaccgatgtcgtccttcccaatattgatcctgaggacagcacctctcgtaggcaggtgcttgtacacatttgcgaaatcggcgttacctgcaactcggatcgccacccggaggcctga

SEQ ID NO: 31 - DNA, 1137 bp, Toxoplasma gondii
  source 1..1137: mol_type = genomic DNA
atgcggcatcaagaacggttcgacctgcgaacgggtgtgttgttgtgtattggactcgtcgggtggagtggttttgtggtgcaacattgtgcctgctccgacggagttttttctgtgcagtctccaagcgcaccccagcatgacatcttgtgggatgctaggaaaacacaggacgagttacgtgcgttcaacggggaatcttcgggagaactggcaaagggtgctggaattcgagctacagaaggtgaagtattcgctggaggtagggctgcagcaggcgtaatatcagctgaaattccagctgaagagggtggagaagcagccgcaaatccaacttcagagcgtgaaatagaagctccagctgcagaggatgaagcagaagctgaaatctcggacgcgagtggtggcgttgcagtcacaagtccagctgcagaagaggagcgactgtctgcacgcagtgccagtcgtccgagtggcaggcgcacgggacccgacggagttcctagcacccggggacttgtattcactgctggtgggagtattctagcggcggctgtcatgatgttgttaagtcgtctttcaaggcaaagatctatacaagtttggactgtctggcgcgaagagcgacagtccttgggattgtccgttgcatcagacgccttagttgtcgccagcgccctcgttgctctactaggtggtaaacgcgtagtcaaaggcgtaatgcggaagcgagaggctactaggcgaagacgtagagacgaaattcctggagttgaaatgccagccaagcgcaaacgacggagaagtgaagctgagggtgcacgggccactgaaggtgtcaaagtttcggagcttgttgaagatgaaactccgtctcacgtctcagccccaacggaaccaggacggacagcaatcgctgcaacagctgtgacaggggcagcggccctggcaggaagtgtagcactggtgttgggttctcgtcgatggttcaggtactatcaccaagtcgaggaagagtcccgaaggctagtggccgccggtgctttattcactggtgctttgtttgctgcatacaagctatttaagcaagtcagggcaaaattagctgcaaggaggaagaagagcacgaaggcgtga

SEQ ID NO: 32 - DNA, 1137 bp, Toxoplasma gondii
  source 1..1137: mol_type = genomic DNA
atgtatcccctgactgtttactcgattcttgctgtggttggcctcagccttgtctgccgagggattgcgacagagcaagtggtcgcagctgccgccaaatcaaactccgaagaaaccgtttccacaggaatcggcgaatctgcagaagcaagccccgttaatcgccccaggccgaaaccgccttcaggtgatgcgaaacgtgctaattccgtggcagtcgcgaataccatcatcccccgatacggggaagcctccgtcgatgacacacagcgacggggtctcgcgcgggtaacaccgagacctcgactccgcaagtctcagagacggtccagctcactgtccagacgacagcgactgttatataaagttggcgcggttataattgcagttgtaggggcggcaatagccttcaaaacctggtattcgaagcgtcaatatgagcttcgtgaacgagcgttctgttacacgcgtggtcgcgctgatgtagcacaagcattagttgatggacttctgacggagaggcacaaggtgaatattctcatcaatcgtgcccggcaagaagagtctgaggccaagggtactgctgaacaccgggaacttgtgaaagtacgggaagctttggaagattttgacgtgctactggaaaaacagcggcaaaatgcagaagcacagtggagcgagttatctgccgcagcagctgaaattggcaacaaaattgacgttagaacccttgtcagaactgacccggacaaagcccaggcgtcagaggaaggacgcttatatcaagcaaaacatttctggcagcagctccagccggaggaggaggcactccgaggccagctattaccagacgtagtcaggttggagggtgaagtcagggaagctcgcgacagagaccttccttcattgagcatgctttatcaacagttggagcaagcgaaccgtcggagggtagtaagcactgtggacgaccagctggaaagactcaatcgacaactgccgcacatggtgggtatggatccagactacgccgaggagcacatcctgtacacgcagcttcctctcagaggccccgcctacgttcggatgtcagaggacgtactgcgacaagtacaggcggaaccgaaacagacttga

SEQ ID NO: 33 - DNA, 1359 bp, Toxoplasma gondii
  source 1..1359: mol_type = genomic DNA
atgcattcgatagtgtatgtggtggtctccgttctggctgttctgggccgcgtagacgggcagcccctggggtcccggaaggcgaagccgggtgccggaagcgcgccgggaccttccgtgctgccttccagcttgccacacatcatcatgcagagtccaacgaagaacccacgtaaacaacgaaaacactccatggcttccggagacgctggcgcaaaaacagcaacagtagcagaggaagccgcaaaggcggtcggcgtcagaggggacactcctggggaccaggcctcggcacgaggtccagatgagaaggaaaagcgcgagactgcggcacggacgaagcaaaacaaaagcacagcaactgcgaacaaaccaggggaaaccaaggacccctccactccattagccggggcagagggcaggaagcctgaattctcgaacggacaagaaaatgtggttgacgaaagcgacacacgagggtggcgcgatggttcacgctcgctgattggcacggagaatcctgggaaggcgaaaaccaggcgcctgactcggccggcgtgcaggcgactgcggtatgctattggtctcgctatagggactgttcttgccttgttgtcattctacggttatcggcgctatcgtgatgctgagatacgtgcggagagaaacaggaatgcttcagcgtatttctatcttactgggcgaaggaatgccgctgtcagtctggctcagcagctccgacatgagatggacagggtttcagaagcaatcaggttccacgaacacgaacaggaaagatatgaaagggcaagattcgacgaggacgcgaaggcagcgatggagacgacggcagccttggaggatgtacttgagtattttactgaaaaacggaaggaagtggaaacactttccgtccggttagctgccgcagcagatatggtgggtgcagatatcaccaggcaagacatgaggagactcacgccggagcaacagcttcagattgtgcggcaaggacgtttcgatgaagctcgatcactgttggaatcgacctcacgtgaagctaaccttctgagagaactatatgtgcctggtatagtggaagcggaagaggaggtggagagagcagaacctggctccgaggagctattcagacgacggcgagacctcagagaaaagaaggaaacccggcttggcagtgcagtcgatcaccacttggctcgtgtagtccgagagataccattcagcgtcggcattcctgaagaacaggctgctcagctacgtgcacctcccggtatagagccggtacccgagcatgttctggtagccatgcaggcaattgaaagggcacagcgtacgtag

SEQ ID NO: 34 - DNA, 657 bp, Toxoplasma gondii
  source 1..657: mol_type = genomic DNA
atgtataccgaaagatcttcgctctcagctgcagttgtgatggaaaaagaaggggtgacgccgagccagtgttacgcaattccccctgaacgggaagacgccatgacgctcgtgactcagatgttctggcggtggacaatcgcctttctcgccctaatatacgttgttgcaactcaagcgaatgcttcacggccagccacagtgaggaaacaatcgaatgacgcagacggagaaggagaggttgacactggtgtcgcaggtcgccagacatcaatgcctaccactcacatcgggggcctcgctggacgtggacatcggggaaaacaaactagaaaacagtacattcatctagacgcgttgaatgaggatgtggaaccggaaatcaaggaaccgtcactgcggcccctctcccagaaagcgactcgaagagccaaatggtcgagacttcttttggagttgcttcccgcagctgttttcgttagccttctgataaccatgatgtcccgggcacgaccagtgaccagggtacacgagacggtaactaattttctctatcgtcaaggcgtcgatgtttccaggcaactacaggagttaagggatgaacgacagcgtgagatagaggcagaattcgtcgatattcccccagacttggaatag

SEQ ID NO: 35 - DNA, 3261 bp, Toxoplasma gondii
  source 1..3261: mol_type = genomic DNA
atggcgatcctccgtctttccttcgtgttctctctctcgttgctcatcgctctgtattcggtgtggcagcatatgctgcatgcacgggcgtccaagccagccgtgttgaggaagctgcctggcgcgagtgagctcctccgatctctttcgggttcgagtatctctgcgtggaggcgcgtccgcgctgtgtttcacgaaacgctcgttttgacagatgtcgacgacacactgtggtcctcgggggcctggcggttgggggggaagactctcgggggagttgacgaggacctctctaggggtcaaacgtaccccggtataggggctctctacttccttctttctgcaggaccgcacgtgacagcagctcctgtcaacaagttcctgccgacttgtccggtgcccctcgtctccccgctgttcgagacctgccaagtgggagacgcgcggaggtcgctggccggagcaaccggccgagtcacagacacttgggtgtttggaggcggggaaagagcgaaggaattgcaggactctcggaggaagcctgcagagaagagaccgctgctcccgcctcgcgttgggctactgacagcccgggcgtccagtgcagccatgagatctttcacgcgatccccgtcgttctacgcggccgtcaccgccgcactcattcatggagcaagacagatctacggccccggagtcgacgactggggacgcgtgcgttttgagaataacatggaacttcttcgagatgtgattggcggccaacactcgcgaggccgggggaaagtcagtggcttcaaggaggccctcgaaaggtttcctaaacaaacgccagtctttgtcggagactctggcgaacgagacgtcgaagcggcagcggggatggctctctttgcacaggagaaactcgcagccgtcttcgtccatgtcgtcttcagtaattgggaaaatgaaaatccggatgagatcgagcaagcaatcgcggctccgagagctactcctttcaacctcagattcaacaatcggcggattccagccctgcagctggcatacgacgtccaggcgaacttgcatcccagcgatccgaaaccagaaagtttcgcggcgctttcagacacacatttatattctgcaggcatgcgcgtggcgagtgtcatgaagccgctcatgattgcgtacggccaccagagccggcggcaaagggcgaagcctacggagagacacgacaggaggacgaacaaggatgaggaaggcattggagacattgtggcgcttcctatctttttcctcaaatttcgggatttgactgtgaaacgaagtatgtcggttaggcggcaaacgacttcaaacccgttcaggaagctgtactcccacctctccacggggttgaaaaacagtgtctccaaggtggtcgacctatgggctgaggaagaacaactccgcagctatacggaccttcgcacagttcccgctgacgagttaggcgtcagtagcgatccaggcgttccgttcatcccgtacagaacggcattgggggctggtatatcggcgttcattctcgaaatgattacgttccaagatttaatcaacttggcggtgtcttcgatccgagacttccggtccctaggcccgcctcagtcgtgcgcccagcagcagggtttggaggatttgtattttgacctgaggtacatgctggaggtcaccggggaggccttgcagtcggtacatgtggagaatcgagcgattttcgaagacggggtcgcggcgatgcgaacctttcacaccaaagctgtcgacgcatgcatcccatcgggtccggccgagccctggactgtgggcgaagaaatcggcgcctgtctcgcgctgttccgaactccgcgggcagctgcgagcccccccagggaccccacagacagcctcccagaggcggcaggcttaggcgacatcccgcatgcggttctgccgcttgcgcgagtggtgtgcactttcgtggatcaactgaagcactggcgaagcgcgggtgctgacgagactgaggtattgagtttggaattctcagtcgcgttgaatgaagcggtggacatgagcaacagaccgttcggcatcggcggacagccagtgacgagtctagccaacctctctggagacagcacctcccgcgaagttccaaggccctctggaactttgcgtatggaatcacttcccatgtctccgctacgcgacgcggacgtcgcgtctgtgtttcctcgatcgctgcgttctcgcccaacgtctggcaccgtgaatctttcgttgccaataccacctggctcgccgggaaactcttcgtttcctcaggtctccctcacgggtcagcctggtgatgaggcagatgcaaggccatctggacgaggcaacgagtccaacttcgtttcttcgtcgggattctcgccgctgtccgccacctctcccgcctcagaccccgcaccgatgtccccggatcgggcgcatctctattggacaaaagaggcagaacgtcaaaacgtcgaacgccgaagttccggagctatcgcgacatcaactcaagccccggctgcatctcgggatctaccggactcactgcagatagaaggaacggtagattctccttcgtcgttccagagtcgaggcgcctccgcagatcgtcagaggcctcagggtcggatcgaggacggcgcctttgcttctccgttcttgcctggcctgtcgactacggcagggccatcgggacagggacgaacctcggtggatctcgtgcgaagcggagcgcttagctcgcgtcttaacgcggcctctggggcagctcttggcgatgttatcagcgccgcgccgagcgactgtccattcggggggctcaggaagttgctggctacaatgcgcccaatctgcgagcaccaaaagaagcttcttggagatgcctcgccgtgtgcattgatgtcacaccttctctacgaagagggtctgatgcacatcttcgccacagtcacggcgtggtacgaagacggcgctcgcgagcctctttacatcacgaaaatgcacctcactctggatccggcggaagccaaattagagacgctgaggaagagagaaagcgacaatttcgcgcatttgggtatgggcgtcttgaaacgcggcagggggcacagcacctacgatattgaccggctgcaggcgaaccatcgcgagttcgctcggtcctaccctgggttcaagaatctttcgtgcaaccccttcgaggcgtga

SEQ ID NO: 36 - DNA, 2766 bp, Toxoplasma gondii
  source 1..2766: mol_type = genomic DNA
atggagtcgaatcggcgaagagcaccctgcccccccgcctctggggtctctcccggcagtatcctgtgcttgtttctcttgtctcttcttccttgcgctctcggagcatcacagaagaactcagccgagctcctggactctctggcgtgtgtcggctctcctccggagacggcggagaacgcgaccgcgtcgctggggtcctgggagcaggttccctgcctcgatgcggcatctgtcagtgtgttcacttcgagaaaagaagtgcaggccggaaacattttactttttctcgacatcgacgacaccgtcatcgcctccggaggctggaacgaggtcatgggcaatagcctcggtggcgtcgatgaccgatatcccaggggatcggagtaccccggcttcagcgccgttctgttcctcctcgctctcggaccgcatgcgcggaacttgaagagcggacaactgacggagttcgcgcctccgtcgaaagccatggtcgttacagctcgacccaacttgccggtctttagacctccaaacctcatgcgacatctcacttccatcctcactcgaggtgccagacaaatcatgggcgacaatgcccctgagtggggcgtcggctctcagaacgtcatgaaacctgctagcgttttaagaggcacatacggccgaggagaaaataaactttccttcatgaccaaggtgctgacggaggggcgccccgtcaacgagtctcggatcgacgagaatacgaaggtcatgttcgtcggagattcggccgaaagggacctggaagtggcgattggcctctcggcgatggttccagacaaggtggcggcgcaccttctgcacgtcgtgtacagacacaacagtggcgatccgacgcagatgcatgcctctcacacagtccagacgggagagaagttcgacgaagacggcgtcttgagcaaagccgctgtgacactccaggaaatcatttcgggagcagcgcgcacggtcgcagccgccacgcgcgcgttgacggagaaggacgagcgcgagaagcaccgacaaactccaagagccttcacagagagtcagccgacaaacaagaaaatcagtttccaggaggctctcggcaacaccacgcgcttcggcatcagagtgggtcacgcgctggttgacgcgattgccttggtgtacgacgtgtacgtcacgagcgacgacgaagaaggcccgaggagctgcgccgagttgagtgcatctcaggcgttcgaggtgggcgtcttgaccgcacggaagatccgcttgattctggatctctaccgtcatcgctggcttcacacctactcgacctttcgcacccgggaggagcaggaggctgccggggcgtctgtgtcttcgcgaatgcttccgatcttcttcgtcaaatgcggaactgtcaagctgcgcgtagcccacgaggcgccccgacaggcgcctctcgacgtccttttgtcggaaatgaccggtgctcgagaccgcgtcaccgtgcgcttccgaagcgtcgatacactccacgcgggctccgaactggacgcagagaccgtgagaagcaacatgcttgacactctgggaatccccgtcgtcccctacgtcaccagcatctccgcggtcgcacaagcctacgtcctcggaatcgtcgacctcaccgatgtgctcgtcgtcgtcagaaagacttacgagatgctccgagcgcaaggccccctggcgcagccggcgcgtttgctgtctcttctggaccacttccacgacctggaggccctccgcgccatgctgttcccaggcgggaagggggcgttgcctgcgagtgcgccggtgcgcgtgcgggcgactgtcgactatctcgatgagcttggaaaggtccagaaggcgttcatcaagcgcgcggcttatcttcgggcagtcccgacccgcacagagatgtgcattcgcgagatggagcgaaatgctgagagccactacgaccgcagcctgaagcgtcaacgaggcgcggctgggaagagtgcgcccttcacgcggtcgcagttctccgccttcgtctctgcgtttgccgagctggtctgcaagtttgacgtcgagctgtcgagcgtccagtttgcgggaggcgccgaggtccacggcttgtccgtctacctcagccgcttggtgcgccaggccgtcgctgcgacagaaacgacgcctttttcaagcgcgcagaagaagaaggcgccgccggagagccctgtcagcaaggctgtggcagagctagcggccacgaacgcgggaacggagaaagaaaagaaagacccgaagaacatgggccgcggcaaaaccgcatgcaccctgtctgacgatgtgcgagtgacatttgccaccatgtacaaagccttctgcgcagacgtcgctcgagacgtctgtcaccttctagagacgcgattggttaccagcggcgttctctcagatttcatcttcctcgctcaggaacgtggaagaaagtatcaaggcccgcttcgcctccctcacctcggacgcgtcgttttcatcgacgaacatggcctcgatgattttgaagtgtctcaccagaagcctctgacggatgtgattgggtccatgggggcaaagctggacgaagcgatcatggagcaagcgtcggcgggattccgcttcgcaaagtggcctggcttggattcgtggaaccagtggacacaggttgcagcgtccctgcaattaattgtcgactgtggcttgttgaaccgcgggacgcagtag

SEQ ID NO: 37 - DNA, 2901 bp, Toxoplasma gondii
  source 1..2901: mol_type = genomic DNA
atgcgttttcctccagcaagctgtcattctgcatcccgaaaagaagagaagccctcgcgagacgccgagatgcagccccggctgatccggaccgtcctggcgaccccgggatcggcgccaaatagcgcgccactgcgtccgcgaatccgcagaccctcgttttcttttttccctcgtttctccaactcgttcgcctccgcccgctgtctcctcttcttttcgctccttctctttgtcgctctgccccccgctttcgctgctgtgcgcagcaacacaggcacctcgcgtgaagctggcgaagtcgacaacgcgcagccggcggctgaccccgaagtctctcgagcaccgcccgccttggcgcagccgaaagtttccttcagaggctggaagcacggtttgtcgaaccgcatcacccccattgtgcaggtcgaggatgttttggtttcctcgggcggcatcaggcgccatggagatgccgtgtatggcgaggacgctcgcctgcgtctaggcgagccgtaccccggcacagccgcgctcgtgaatctgctttccaggggaccgttccccgccgggaagacgccgcggagcagcatgacgcgaccgatggtgactgcccccctcttcgtcaccctgcccttcctcctgtctgccttcgtgccggcttgccgccccggcgagtgcaggcgaaaccacgcgcagcgtcgccgcgtcgagggcgaaggcgccgaggccgcagaggcagaggacaaaacggaggaccaggctcgggaggccgaagtcgcgcgaacgcgggaagtcgaactcgaactcgtccaactcatcgtcaaaaaagacctcaacgacgcagtcaacaagaccactcgagaagccagttccacgtggcaagccggtgcttggtggtcagacctcccacccagtgtcgacccgtccaaaacgacgcctcagcaggctgccactcacgtcgttcaactcttgcaaggtgctgcccacgctctgggaccctcgaactcttttgtctactttttctctaccagcacacctcggggtctcttggatgcctgcgcatccacgtttctcgaccgtaatatcggcgtgttcttgcatgtgccatcgctgtccgcggaagacacggtgtctcttccccacgaagccttcgtcttccctctggcgaccctgggacgatcgaggcccacgcctattccagctgtcgtgttgacctacgacgtgaccgctcgccagaccgtgacggtcgaccggccgacgccttctttgggagatgtgtcgcctgagctcttggggaaactcgcgacgcagttgcagccgcggcttttgcgagttctgaagttctttgggcaggaaccacgcgcacatggccctctgccggtcatctttgtcaggttcagaaatgtagaaattcagcagatcgtcgatccgtggcacggccacccgtcgaggtatctgcagctgcagagagaggggaaagctcccgcttccaacaacttcgcccgactcacgcccgtccctcctgaagaagcttctggaaagggccatgcgttcgaccccgagaaacacctgcaacacgcagtgcccatcatgacctaccgaacgacggtctctgctgccgcccaagcgcatgtgatgaatcttatcagcagcgctgactttgcagaacttgcgatcttgacagtaaaagacttgcgtggtcgcgggccactgttccagccggcgacgcacgagtacgtgtcggctctgaagagcgactggaaggtttatgtgactctggcgaagactccgaacctgattgaggacaagcagctcgccgagacccacgagttgatcttgcgggcgaacgaggacttttccgccgagcgcatgcactgcatcaagaagtacgtcctgacgatgagtcaggaggaccccttgttcgacttcaccaagacgttctgctacaacttccccgaggttcggtacccgtcgagcgccggtggcagcgagttcgtcgcgaatgcggtgacggcaggtctcgcgctccgggagctgtttaacttcacagtctggcccagtcggtcgagacaggagaacgaggacgaggcgcaggcctccggtttgtccgccgcctcgcagcacgttcgaggggtgcggctgccctcgccgcaccctcccatgcgcaaagaagacaggcccgcgagtcgcgctgaggaggcccgacgtgccgtcctcgagaggcctttgagtggctcgctgctgcaagcttcccaactcgaaggccagacctcaggggatgcagatgagaacgctgagagccgtctagctaagaaccaggaggtcgtggaagaaggagcaagaagtgtcgacagtgaaaaggaaggtcagggtctagaagccggtagccacggacagagcgagcacgcagaggtcggtgggcgtgaggaaacgcatagcgaagaagggaagggagctgcgaaagcagtgagggaggaagagaatctgaacaagcaccaacatgcaggcactgtggcgactttccacggcaccattcccgaggcgttcgcacaaaaaatgcaggaaaacttcggtccccgatggatctcactgctccaactcctaggaagtgtcagcctcactaacgactacctcagggtcctctcctggctagcgtctgaagctgattccgacgcgatgacacttcctgcgagacgattacttgtccgccgtgatgcggaggtctctctctcgctgtcggcggccctacggcatcacgttgctgtcttctacgaaaaccaagtcgaaggaaacttgtctcacccagttgtgcacaagcatgaacgacagtacaaggtggctgaggagggcctaaggcgctttcttagggatcttgtttcctattcttcaaagaagtga

SEQ ID NO: 38 - DNA, 561 bp, Toxoplasma gondii
  source 1..561: mol_type = genomic DNA
atgatgctcattgcgctcgtatgcatgctggttcatcgcttggatttgggggcggcagtgtcgcaagatggacgagatctttttgtgggacttcctaaaggagcgccgctgggtcccaccttcattgggcttactacacctcgaccccctttgagttcgttgtcagcattacagacttttggagctgaccagcgtctagatagaccaggtgactctcctggctactacgttgaggctaagcagttttaccgtgtgccgcctacccggtcatcagcaacgagaaataaggggacaagtgcactgaaggtcgcagctgctcttgctctgttagccgttttggggactgaggttgccgattacgttgatagacaacatgaaggcgaagtgacagatttggagtatgaccggaggatgcagacaactaggactgctttaggtgtcacccgcttagcctctcttgtgttagcaaccttcggtggtgtacgttttatgttggacaaggcaagcaaatggatgaaggcaagaaaagttgaggactcagagaaatccgagcgtcgatag

SEQ ID NO: 39 - DNA, 993 bp, Toxoplasma gondii
  source 1..993: mol_type = genomic DNA
atgaacactggttgtctgtttctcccggctacgagacacgcagcgatccagactatttgcgtcgttgcccttgcacgccaagtcgccgacccagacgcacttgtcttcgaacgtgactttctcgagtttatccgcattctttcgtccacacaaacagttttttcgtcgttcgggtgcccgcgatcgcacgtggcgttgcttgcccagagcgtggaacgtgttcgtgaggcaaacgcggttggtctgttcagcgagttcgcgcgtcgtctcgggtttccgacttcgggagacgacgcaggatgctcctgtgcttttttcgtttttacgggtagagcaatggtgtggagagtttcgatagggtgtgctgtacttgccactgtgctcgtggcaggccatgagccagttgcttcggcgccgtacaaagcgtacggaattccagcggagtcgacagacacgacctcgggagacgatgtcgaagaagcgttcaggaaacgaagcaggggaaacgtgctgaaggatgctgccaaggaagaaaaaaaacttcctcttttctttatcgacgtggaagataacaaggggcaaggccgaaattcggagaagggagctacagacgacgacgtcgccgtcgacaagacgaagcgcagttcaccttctgcaccgtgcactcgcctcgcagggaaagagaagaaatacccctgcgatcgatacgtcgtcaaaggcaagatgtctttcctagaggcgatcggcgcgttttttctcgcctcagttattcatgccgcagtctccgagcagcttcgagcccgatctaccggtggtgacatctggcggccgcgtctcgcaggttcagttatgcaggccgctctcgcggcgacaactctctggatggctctaaggcgcagactcccgactttctacttgttgcagcggcgggagtcttcggaagaaaaaaagaaagccaaagagaactcgacacgggccgcgtctgccgtgtga

SEQ ID NO: 40 - DNA, 660 bp, Toxoplasma gondii
  source 1..660: mol_type = genomic DNA
atgactcgcgggtttgctttctgtcttctttttctcgcccttttcgggctcttctccgtcgcacctcactcgatcgaagcgggagaaacgcctgaagaaacagaggccgtcgttgctgcgaccgaacagggggccgcggaagtggatgaagccaccgacgaacacgaagaagacgatgacgatgatcatagagccgactttgaatctttgctccagatgatgagcaaagacatgcacatggatttggcgaacaacaatatggccggtgtcgccaaagttctcaaggagctgacagaccacatcgacgccgctcataagcacgacccggaagcccatgagcacaagcatccgcttctgaagaagatcttgacgaagcgcacccacgacaagatggtgacaacactgcagaaaatctactccaatgtgccgcgagaggagatcaatgatcagctccaagctgtcatgtccctacttgaacatgtgaaacaggacccgaacatgtcgccgaagcaattgctggagaagacagctcatcaactggggatgcctctcacccctgacatgtacgaggacatgcagaaacacatggggtgggcagcgaagctgttccagtacatcgctcccggagggctagatgaagagaaggcggaggagctgtaa

SEQ ID NO: 41 - DNA, 610 bp, Toxoplasma gondii
  source 1..610: mol_type = genomic DNA
atgtggttgccggtgtatgtgcctctcttgctggtgtttggagttagtttgtccctcccacaaggaagccttggcacagactcatcgtcactccggggagtggacgctgacactgaaaagcggattaatgtcgggaagaaacacctgcagaccctccgaaatctggaaactcggtgccacgattccttgcaagcacttgttgtaatcgatgcaggcagtagttcgacgaggacgaatgttttcttggcgaaaacccggtcatgcccaaataaaggccgtagcattgacccagacagtattcaactcatcggcgctggcaagcggttcgcaggacttcgtgtagttttagaagagtggctggacacttacgctggaaaggactgggagtcgaggcccgttgatgccagacttctcttccagtacgtccctcagatgcacgagggggcgaagaaactcatgcaactcttggaagaagacacggttgccattttggactcacagctcaatgagaaacaaaaggtccaggtcaaggcgttgggcattcccagtatgctttgcagcacagcaggagttcgcgacttccacgaatggtaccgcgacgccctctttg

SEQ ID NO: 42 - DNA, 1000 bp, Toxoplasma gondii
  source 1..1000: mol_type = genomic DNA
atgtggttgccggtgcatgtgcctctcttgctggtgtttggagttagtttgtccctcccacatggaagccttggcacagactcatcgtcactccggggagtggacgctgacactgaaaagcggattaatgtcgggaagacacacctgcagaccctccgaaatctggaaactcggtgccacgattccttgcaagcacttgttgtaatcgatgcaggcagtagttcgacgaggacgaatgttttcttggcgaaaacccggtcatgtccaaatagaggccgtagcattgacccagacagtattcgactcatccgcgagggtaaacggttcacaggacttcgtgtagttttagaagagtggctggacacttacgctggaaaggactgggagtcgaggcccgttgatgccagacttctcttccagtacgtccctcagatgcacgagggggcgaagaaactcatgcaactcttggaagaagacacggttgccattttggactcacagctcaatgaggaacaaaaggtccaggtcaaggcgttgggcattccagtaatgctttgcagcacagcaggagttcgcgacttccacgaatggtaccgcgacgccctctttgtccttttgcgtcacctcatcaacaatccgtcgcctgcacacggatacaaattcttcaccaatcctttctggacacgaccgatcacaggagctgaggaaggcctcttcgcgtttatcacgctcaaccacctgtccagacggctaggcgaagacccagctaggtgcatgattgatgaatacggggtgaagcattgccgcaatgaccttgctggcgtggtcgaggttgggggtgcttctgctcaaattgtctttccactacaggaaggtaccgtcctgccctcttcggtccgtgccgtcaacctgcagcgcgaacgccttctcccagaacgttatccaagtgccgacgtcgtgtcagtttcgtttatgcagctgggtaggccagtccgcagga

SEQ ID NO: 43 - DNA, 1320 bp, Toxoplasma gondii
  source 1..1320: mol_type = genomic DNA
atgactgcaacgccagcaggcactctagtgagactatactcttcgttggtctctgggcagcacaagagtgcagatggcgactgcaattttgcattttcgccatacgccgtcagcgctgtcctcgctggcctgtatttcggggcgagaggaactagtcgggagcaattggaaaaccactatttcgacggccggtcagcagctgacgcagcagcatgcctgaatgaggcaatccctgctgtctcgcaaaaggaggaaggcgtagatccggatattcaatcttcggtagtacttcaagctgcaaatcgtctgtatgcgtcgaaagagctgatggaggcgtttctgccgcaattcagggaattcagagaaacgcttgaaaaggcacttcacacagaggctttgttggcgaatttcaagacaaacagcaacggggaacgagaaaaaatcaatgaatgggtatgctctgtaacgaagcgtaagatcgtcgatctccttccaccggcagccgtcactccggaaacgacccttctcctggtcggaacactatatttcaagggaccatggctgaagccgtttgtcccgtgtgaatgcagcagtctgtcgaagttctacagacagggtccatctggagccactatttcccaagagggaatcagattcatggaatcaactcaggtatgcagcggggctctgcgctatggattcaaacacactgaccgccctggatttggtctcacgcttcttgaggtcccctacattgacatccagtcatcgatggtgttttttatgccggacaagcccacggacttggctgagctcgagatgatgtggcgtgagcaaccagatcttctaaatgatttggtgcaaggcatggcagactcttccggcaccgagctccaggacgtagaacttactatcagactcccatatttgaaagtgagcggcgacacgatatctctgacgtcggcactcgagtctctgggagttacagatgttttcggttcgagcgcagatctatctggtattaatggaggaagaaacctgttcgtcagcgacgtatttcatcggtgcttagttgagattgatgaggagggaacggatgcggcagccggtgcagcggcgggtgttgcgtgcgtgtcccttcccttcgttcgggagcataaagtgattaatattgatcgttcgtttctttttcagacgcgaaaactcaagtgcgtacaggggctgagggcagggaactcgccggcaatgcgcaaggatgatgacattttattcgtgggccgtgtcgtcgatgtgggtgtgttacagagtggtggcgaatga

SEQ ID NO: 44 - DNA, 957 bp, Toxoplasma gondii
  source 1..957: mol_type = genomic DNA
atgggaaagaatcctcttttgtttcttgccggagttctggtttgttcgttcagcgtagctgtgtttgcttcgcccgaaacgaaagtttgttcttgtccgcgcaatctcgaattaaactgcggtggggatcacgtgacctacgcaaaccactgcatccgggagtgccacggcgtcggcctgttacacgacgggccttgcgctgaccaagaagaccaaggttcgtctgtcaacgaaccatccgaagtagccgatacaacggaacagcccagcataacgccatcgggagaggaggatcgtccgccaaaggacgccccaaaggaacggaagaggctgcgaggatgcgcttgcactcgcgaattgcgactcaactgcggtgtggacggcgtcacgtattcaaaccattgtgtccgcaaatgcgaaagagtcaagctgctacacgaaggtccttgcaggggaggtcccggacgcacactgttttcgcagcaggatgacgaatctgagaacgatgctctggaagaggaggaacaaagattacagagaacacagtcttcacaccagcatgatgatgctgagaatggtgctcgggcagagcatgaacaacgtttgaagggctgcccatgccctcttaacctgatgcttaactgcggcgtcgacggcgtcacgtatgacaaccactgccttcgacggtgcaggagagttgaactgaagcacgagggtccatgtgaagccgacgaacagaaacagcttcccgtgcagcacggtgacaatgagatcgacgtgccagaacggagaattgaagatcttaaagactgcgcttgccccttgatcctaacgccaaactgcgggacggaccggaagacttaccccaacaactgtgtgcgtgagtgtgctggagtcaaactgcttcacgagggcccctgcgaaggggacaccgaagagatctgggatgaccaataa

SEQ ID NO: 45 - DNA, 264 bp, Toxoplasma gondii
  source 1..264: mol_type = genomic DNA
atgccactgccgcaggcacccgaagaactcgagcaggctcccgcttcacaccccgaggaggcggagcaggaggtgcctgagagaaaaactgacgcaggaagtgaacctgagaaggatcccgaaacaaacttgcaggcttccgagacacagccgcaggagcaggtgcgctctcagcctggtcggagcgacggaaagtgtacggacaagagggacgaagttgacctcgatgtgctcgaggccgagatgttggagaaagcgccataa

SEQ ID NO: 46 - DNA, 1152 bp, Toxoplasma gondii
  source 1..1152: mol_type = genomic DNA
atggatgttcggtatcagacacgcggagcggttgccgcggtgtacgttctcttccgcactgtagtaggcgcagtactcggactccattgtctgaagattgtttcggcagaggtcggtcttacgcatgggatcatgtctaccgaatttgaggtagagcttagaggccacaactgggtcatcgactcgggtgcctgcctgttggggcagccgaggaatcttgtcgtggatcccgttctcgacagcgagttcatgacgccacagaagctgctcacagaccggacgggcccggagctctgcagctggctggagaaaatccatcggcagcacatggaacagaagccagcgtggttggcagcgtaccaaaagttcgagaaacgcttctttcttctccgccttctgggaatggtggggaagcccatcacgtttttccccgagttcacagtgaggataatcgtgaaacacttcagtttgtggggggacgatagatgggggaatgcgcagccttggattgccgcgacattcgagtacgctcatcctgaaggcgccggaggcgagctctttctccacatagaaaaggttttctcgatggagtttagcggccgggtggcgaagcttgtgcacatcctcttgaatccgtcggcgaccttcaaccaatacgtggaactccatagaagaaaaagcagtggggttcccggggactccggtgtctcagggatacgtcggacgctctacgagagggacttgaatattagccactttccgaccgcagacaccagtcagatcagtcacagcttggcccccgatatactcacgctgagatttgccaaacaggacttctggatggaagacggcagctgctacattctctcgagattcgttgcaacgtcttcgatacgagggaagactctgtgcaagattgtctctgactatggtcacagagaatcgtggatgcctttcgtggggagcaggaaaaaaacggttgctctggctgtgacagctgccgattttttcaatactcggcggccctctttggtagcacatatcaaggaaggagtgaagctggaagcgctcgacaaaactcctgtcgtgctggagcttgtcacagatcctgtaatactgcgctcctacgttgaagctgctaggaaagcataa

SEQ ID NO: 47 - DNA, 675 bp, Toxoplasma gondii
  source 1..675: mol_type = genomic DNA
atggcgaccacacacctcaacaagtccgtcatcgcgggcggaagtatcaagaccattaaagctctcaaaaagtattggaactcgccggtgtctgatatcgacgacaactcgagcgaggccaagtataccatgctgcagatggctatccttttgaacaagaaaaacgtcgtagagtatctgatctcgcaaaaagacgtggatttgactacccgagccacagacggaaccacggcgctcatgacagctgtcgggaaaaatgttcctgtagattggatacgagcgatgctcgaacgtggtgcggccgacaatatcaacgtagaagacaacgagggccataccgctcttgacagatgtgaaaaggacagcgaggtatacaaactgctcgtccaacacggagcgcagccaagaccttcccctccccctacgccgccgccggagcctgacgtggctggtggtgcgggttctacggacaccaatgctgcaggtcaaaacggtgcttccaaaccggtggacggaataacaggagttggtggcatgtctccaggcctggacgagcacccaggcatatgggctacaatgtgcggctgcgggggacggcaaggaaaaaacggaaccgaggttgtagaagtagtcgacgcgggtaaagcggagctgaaccctgctcaagcttcttag

SEQ ID NO: 48 - DNA, 1662 bp, Toxoplasma gondii
  source 1..1662: mol_type = genomic DNA
atgacgacgcaaacaaccacgaaagggtcgtcgcggatctcgcggtgcaccgttgccctcgtttttgctttgtcggcatgcgccactgacgcattgaatatcggcaaccacgctcaccaaacaagactggcgtccggaaaaacttcggcgaagggtgacgccaatccgtgggccaagatccttgaaagatacaacgtgcctctcgtgcacggttctggcgtctatgtcgacttggggaacacaaagattctcagcaagaaaaagtaccgcgagcctggcgggaagtgtcccaactatggcaagtacatcaagacgtaccagcccaccacgaacccggaaatttggcctaacgattttttgaagccagtgccgtacgcaaatacaccccaggacacgatgccgctcggaggcggcttcgccatgcccatgcatcagatcagcccggtgtcgctgaaagacctgaaggacgaggcggaggggctgaaaaccgccactggggtctcgtcgtatgccgttgagcatgccaagaacatcagagatgacttggggcattgcatatggtgggctcgcatgacgtccgcgcacgacacgtcgtcgagcgcgactaactcgaaagaagactactaccggtacgctttcgtctgggacccgaagaaggaaatgtgccacatcatgtacttgaacatgcaggagatgacgggagcaggaacgtactgcaagaggggggactcaggccccaacctgacgtggtactgcttccacccggagaagtccatcgagaaaaacctcgtctggggcagcgcatacgcgcgcctcgaccacgcttctgcgtgtccggaacacggcttaaaaaacgttcactgggggcagtggaacgggagaagttgccagaaaatggccgtccggaaacgcatctctgtaggcagtgctaccgaatgtgccatggagctgtttaacaacagtccgagcgacaacccgacgcagtacgtcggcgacgagggccgtgggtgggataaaatcctcgacgacgtggttggagtcctcatccccgcaggatccaccaagaaagaccagccgcacacgcgcggagttggcatcaactgggcgaacttctacaaaaagcccagcggttcctactgcgaaatgtacgatggcgtcccgaactgcctcacgtctgcgcctgagcagtacgcgttcgtgagtctcggcgatccaaacccagacaacgcacaacttccgccttgctcatccgccacagaaggcgttgtcattccctcccactgctcttgccctgaaggagagacaagcggaagcagctctggtgtaaagtgcgaagacggcaaatgggtggagggccatgtctcctgcacctgctcactcgatgaggacaccagcgtcaacatctggcttattgcgggaccgtgcattgccgctggagtgctgttgctcggaggactgatatactggatggcacaaaggaacaagcgcgaaccggctgttgaaaagcctcaaatcgtggacgagacaagggagcacgccgttcgaacccgccagaaccaagcagacctgctgcaggaagcggaaccttcattctggggagaagctgacaactatggcacaagcgtcattctcgactccgccaacattgacaaggacttttga

SEQ ID NO: 49 - DNA, 1710 bp, Toxoplasma gondii
  source 1..1710: mol_type = genomic DNA
atgatctgttcaatcatgggaggcttgcggagcctgagggcagcgcggccatacagtcatcaatcgaacactgagacgaagcacatggggctcgtgggcgtagcaagtttgctggttcttgtggcggattgcaccatattcgcatcgggactcagctcaagcacaaggtctcgcgagtcgcagacgctgagtgctagcacgtcggggaatccctttcaggcaaatgtagagatgaaaaccttcatggaaagattcaacctaactcatcatcatcagtctggtatttacgtcgaccttggacaagacaaggaagttgatggcacattataccgggagcctgcggggttgtgtcccatttggggaaagcacatcgaactccagcagccggaccggcctccgtaccgtaacaacttcttggaagatgttccgactgaaaaagaatacaaacagtcagggaatcctttgcccggaggcttcaacttgaatttcgtgacgcctagcgggcagcgaatttcaccatttccgatggaacttcttgaaaaaaatagcaacatcaaggcgagtacggatcttgggaggtgcgccgagtttgcctttaagacggtcgctatggataaaaacaataaggcgacgaagtaccgttacccatttgtttatgactccaagaagcgactgtgccacatcctctacgtatcgatgcagctgatggagggtaaaaagtactgttcagtcaagggcgaacctccagatctcacatggtattgcttcaagccccgaaagagtgttacggagaatcatcatctcatctacggatcggcctatgttggagagaacccagatgcgttcatcagtaaatgcccaaatcaagctcttcgcgggtacaggttcggtgtttggaagaaaggccgttgcctcgactacactgaattgaccgacactgtgatagaacgtgttgagtcaaaggcacagtgctgggtgaaaacctttgaaaacgacggggtcgcgagtgaccaaccccatacgtatccactgacgtcgcaagcatcatggaacgattggtggcctctccaccagagtgaccaacctcactcaggtggcgttgggcgtaattacggtttctactacgtggacacgactggagagggcaagtgtgcactctctgaccaggtacccgactgcctggtgtcggattctgccgccgtgtcgtatacagcagcggggagtttgtctgaagagacgccgaatttcataattccgtcaaatccctctgttactccgccaacgcccgagacggcacttcagtgcacggccgacaagttccccgactctttcggtgcctgcgacgttcaagcctgtaaaagacagaagacgtcctgcgttggcggacagattcaaagtactagcgtcgactgcaccgcggacgaacaaaatgaatgtggctctaacactgcgttgatcgctggactcgccgtaggaggggttctgctgttggctcttctaggaggaggctgctacttcgcgaagaggttggacagaaacaaaggcgtccaggcggctcatcatgaacatgagtttcagtcagacagaggtgctcgaaaaaagaggccaagcgatctcatgcaagaggctgaaccgtcgttttgggatgaggcagaggagaacattgaacaagatggggaaacacatgttatggtcgagggggattactag

SEQ ID NO: 50 - DNA, 2145 bp, Toxoplasma gondii
  source 1..2145: mol_type = genomic DNA
atgtgcccccgagtgtctgtagacgcagtaacggttctcgggaccgctttactgctgtgtttggaggggacacgcttgtcttccatcgttcctccttctagcgttccgttcgccttgcctgcacaatgtctgaacgcaaatcaaaggctgcagcagggagtgatggctagagcttggagcgcgactcaaagtgatgatgatgagagtccggctcccatcttccctgagagcgactgcacttatccagcagacaacaatttcgaaaagatcatcacaacggctcacctcacaacctttctagaaaacgcctcacagggcttttcgtacaaaggcatgacgcactcgagcgaggccgcggcgcagatccacaaagacctttcgtgcgcaattcaggcggacagcagattcgcgagtttctgcaactccagtgacaaatactcttacgaagagaacgcgtttgtcaacgtctccgagtgcgcggcgttcttggcccacgtctttgtgcacacgaactcttttacgcaatttgaggaaacgtcaaacaacagggagtgccgagagtcggaaaaatacccttgcgggccgtctactgcatcttatcacggccgaggacctctcatgatccgtggcaatgatgactacggacggctcggtgaatatttgttcgacgacgccgaaaaactccttttgcacccacgcctcattgagccccaaggtatcagcggctgggttgccgctttgtggaagtggatggaacaacgcccctacgggctgaactgtccggaaacgttcgtgggatcgggcaaggcgtcgtgccacgatgccattctgaatcaagacgtgtctccagaggtaactatggaggctctgacggataacgatagggagaagttgacgaagggcgtgagcggcttcggtctcacaatcaacatcctggcaggagaggccgtcgcatgctgtccgtctgctctcaaagatgcactcgcagccgttcccaagccggttcttcttccttctgctgcagtgccgggagtgataggagtggcagagtccgaagcagctactcgcgccagagctgatcttttgttgaagctcgccgagcgaggcgggttgggtgcaggcgcactgacaccagaggagttgaagaagatccttgctcccaacggagcgcgacaaggcggtgccgctcagacgctcgagccgtcagaggagttggagtcgccggattcgggtgatgcggatgaggaaagcagaccaggggaacaaaaacctaatcctcacgcggcgcttggggctgagcaacgtcagcagcaactgtttgaccaaattatgagtgcccctccgccgcctgccgacggaattcccgtgcaaccaaggggcgacggtttcctgcagacgcaagcactcgcgcttccttcaactcttactcgctttgtcgtgccttccaagggcatttttcccagcggtagttccgcatcgcagaacccgctgtcttcggcggctgccacgtcggcctttctctccttccttgcccaccttctgtatccgcatccgacaccaagtggcacagagaacacggttcctctgcctagcggcactgtccccccaacgccttttcctttaccaggagacgcgaatcgactctgcactacccgaggtgtcttgtcggccagagctgcagagtctaatgcagcaaatactgacgctgcgggtgcggctacagcagctgacacgttttgcctgtcggttgttcgtgggtgtcccgtaatgttcccaccgagtgccgtagaaataaatgcagaccaaggtgatgaagacacggtgaatttagtcaaggccgctgcttcgggaaatgcagctgcagtgataggtccagacggcgaaaagtgcaactttgtctgtgtagatgcatccaacaattctgcccagagtgcgaccaacggagctgtgagcactgacgcgcatgcggcggaagacgatgcgttggctgcaaagagtcacgcagaggctgttgcaaatttgaagacggaggaatttgaattgaaaagcttcgagtatcttcccaaatcgggtgttgtatgtggttacacctgtgtttcccatcacgacgagaccgaggggggaaccgttttcgaaggcgcgtga

SEQ ID NO: 51 - DNA, 2634 bp, Toxoplasma gondii
  source 1..2634: mol_type = genomic DNA
atgaagccctcatcgcttcgcattttgctcgtggcctggacgatcatctcagatgcagagttgaatcacttcagtagtcaagctccacttagctggccaaggtgtgtcgtcgtgtccgctgctgacgacgcccaacgtgacagaggcgacacaacggcagcttcctctagtagagatgaagaactggaggcagcaggacctgccgacgaagcgaaaaaagcagctggagagaacgctagagaatgtgctgggacttgcaacgagccgccggacggatctgtacatgtgcggtccagtgacggcagcgaatatttggatgagcaaccgggtgacggggccgggcaaatagtagagcagccacgttctgatgaagctgaaggcagcgaatcgcaggcctctgttggtgggcgatactacgaacaggaggcttctgacggcaagcgccacgacgaagaggagcctcctgacagacgtggatacgttgaaaaggcagctgtttcagatgatggggatgcagtgcgtcctacagtggtagaaggtgaggaccaagagctccttctgaagcccataggaaaagggaaagcttgtgagcgtgttattgtctctaggatccgcgatgggggagtgaagcgcggcaagaagatgggttttaatgccgttgggataaacatgccaatgtggagctgttacgggatgagcgtatccgaagctggaagtggattccccagggactggatggcctctctttcaagaagaaacatcctgaacgtcgttaacgaagaagctctacttcgaaaggcgaagaatcgaatcgggattgagctggcttgggagagtggggaaggtggcgaaaaaccgtatatgaagtgtgaagaaggtgggctgtacgtgccggtgattgtgaccaacgtagaggatcaggaaccctacagggtcgaactttctccgaccaagttctggtccgcggcctcatcaagaacgggtcgtttatatgtgataccagagcaggaggcaagtgtcacagagggtgacaaggaggacgagaagtctgtgtacattattccaatggaggcattggaaggtcacgtgtttttgcctcatgggtatctgaaaggacattactcggagatgccaaatgaactgaaccacgcccgcgagtttgaggttaacaaactttccgtagacgatttcctcacgcgtgggcagcgggtaacgctcgtctgtactgcacctggggagccggcacggattgttccgacagttgacgccgcaccacgaaccctgcaggtttccagacgaaaagacaagcgggagggagagatccgcggtcaaactccgccgaaggaaaatgctgcggccgacgccgctatacaagaggcagatggcaataagctctcacgagaccgtgtcacaccacaggggctcacagaacaagagtccagaacggttggaaaaaccgaggaaactgatactgctgcctcccgtagtgcagaactgacgggtgcaacacgaggactggtattgatgtttctcactgaggaggatggcctgggcttcgaactacccttaccggtgctcgtggacagagttcttttcatggtgaaacagactcaagaagcggcacctctacaccttcttgcatatctcactgtgcgtccgtgtaaacgaccgatacacgacccgatatttggacaaagctacgaacccgtacaagaaactactgtgaagaacaggatgggtggcggtggggaaggtagtggtaaggagagcggtggttttttcggcttcttcaagcaacagactcagaagccgaaggactttgaggctcaagagtctcgtgaagacatgagcaagcggtgcaggcctaagcgggtcctacctgtcgaattgataggcacagaggctcttcagtcaccgaccctgctaaacgcaatgttggaacaaatagagagtcgcctgaagtcggacacccagtgcattgttgccgcggcgccggctacaccaaaatccgactctccaaatcgaccacgtcttcgtgcgcggttggtctgcccctcacttgagcacctctttatcctgttaagagagaaggacgcatcagatcgcgaatacaacgcattcaagagaaccaaaaacaggcagatgataaagggtgctgtggtgggacttttcggcttgttcttagcttatcgggggttagttggtctcacacggaatccgatgatggcgagagaattatttgcccacgtaataggcagagaacatgttggaaatcaaccgtatcacttctttccgtcagaacgacagctgtacagattcgttggattgcgtagtttgggacgggctttgcaatttcggcggtacaatgaggcgatggggaacgctggtgtgagggcacaagtcggaatcagtttgtggacagtctctttgctggcgttgacagcccttctcgcgatacggttgggtagaggtaccagacactttgttagaaatcggaaacgggtgtccaacataaagggggaattacaacgacgtccaattattcatgaagagcaagctcccgtgcccgagctggaggaagcggaagacgagtgttccaccgtggacgtaacttatctcagttttttgtattga

SEQ ID NO: 52 - DNA, 873 bp, Toxoplasma gondii
  source 1..873: mol_type = genomic DNA
atgtcgagccacgacctgcggctgtgtcgtccacggcggcagtcaaagggtagccgacaaagccccgctttttctgctggacgactctgttcttcgtggggatctctttgtgtttgtcggagagtcccccgtacgaaactggggggttcgcctgctccccggactgcggggatccaccgagactcaaagtgctgtgcgactgcgatgatgccttttccaaaacgcagtttatctcttgtttgtctccttttctgcgtggtcacggctgccgggactcttcctcgacaacctgtagctgatgcgtttcgcctggagaaccagggagtacaggactcacacgcaaactcggacgccatgcagccctcgctaggaagcgcgacgaatcacaaggcgacaggaaccacgagctttgtctcagtgaatgaaaatgaggagggcatgtcccaaaaagcgatcatcgtgtttgttgtggctatttcggcgatggtcatttgtatcggcgtcgttttggtcatgtggtggatgtcatcggaacgcgagaagaagagacgccacgttgctcgagatgcggagcgagctccgggacttttttttagtgaagacgaaggcccaatgtctagcgatgaaaagtcggcaccgaaaaagccagcgggaggaaactctccaaatacgcgtgatgccggcgagtccatctctcgcgaaaggcagataattgaagaggacctaggaaaagttctcgttgtggatcctgtttctggagtgatgcggagtaggcaaaagtggcagcggaacgggaactcggtgccggacaaacgaatgcttgccggcacggagcgaacttgtcggacggggcaacaaaagttcaaaaagtag

SEQ ID NO: 53 - DNA, 2097 bp, Toxoplasma gondii
  source 1..2097: mol_type = genomic DNA
atgtctttcactcacgcgcccttgctcgacacggatgcgtgtctggagttcctaaacgctctagaatacgggaaagcgcatcccgtccacgagctgcaagactgcgcgactgccgagtatgtctggggcgcgctccacgaaatttaccctgcctggtttgacgagtctcttcacccgtcaaagttccccaatgcccaggaggcgctgtctcagatcctctattacctcgatgaatttcacgaaaataaatactctggagatttcagtgtcatcacaggacatctcgacgctttcctcaaaggcgatccctcactcattttgaaaacgcacgaattcatcttgctcgcggcagtgaatggagactcccagcaaatcatcgcaaaaatcatggctatgtcccagcctactcaagaaatcattcaggcgataatccaacaatatgcagatgcagataacggatcgtcgaacgatactcctacgaactttagccgcatggcctctgaggcggcagcggcgagacgggagccttcgattgcagacgacctcgggctcggtcggtcctcaagcgcggttggaggccacttggccccggttctccaaaaggttcaggatgagctttcgcagataaaggcggaacttcgcaagacgaagaacgcgctcacggaaagcgaaagccagagagaaacgctgtcggacaaactccagttggccgagaaggaacgagaagaagaaaaaacaaaacgcatggttttagagcagcagctctcggcgaagaaggatgtcctggtgaaagacttcacagagcagatcgaggattcggacaaacagagagcgaagctgaaggaggaactggagaatgaaaaaaaagagaggaagaaggcggatgagaagaaccgcgccgttgttgcagaactcaaagaagaaatggatctcttgaagcaggaggctcgtcgcgtgtccacgctagaagttcaggtgcaaaactacaagacgaaactgaccgaaatggcggccctgaaggagaaaatgactcaactcgaacttcagaacaaggcttacatggaccgaattgttgagggcgaggccgacagcgtcggagctttgggattgaggaagcagatcgattcgtacaaggagcgtgtcgcagatgtggaggagcgactcagttcgatgactgcggagaaggaggcgctttcgaatctcaaagaagaagtcgagaaacaactttctgcagcagaaaagaagctggaggtgaaggagctggaggtcgcacagttggaggcgaaaatcgaggcgaaggactttgaaatttcctcactcaacgacaaaatcaaggaactcgacaagaacaagggccgggatatcgcagaggagttggcgaacatggccaaaaagaacaaggcagatggtgtagacactgcagctcgaatcgctgagctgtccaatgaagtcgatgacttgaaacgcgtgaagcaacgtctggagaagaacgctgcggcttatgtagcacagatcgcctttttgcagaaggaattgacagttgggtgtgcgagtgcggccgatgcccagaagctgcaagacctggtggagaagactgcgaagcaggaagaggaaatcaagcaactcagagagagcaaagatgacatggcgaagcaaatgatggaggctttgagcaaacacgagaaaggctccggtggcgacgagacatcggcggcgaaggtcgcgatgctggagacgcagctcgagtttgagaagaagcaggcctctatgcgggaagatatcgtccgagccaaggtcgagaaggaaatggagaatgtccactcgactttgaagaatcaactgcaactccgagagcgcgagagcaatttctacagaaaggctgtagaggagaatgcggagagtagcaaaaaggaaatgaagctgctttcctctgtcctctacgaccttggactgcggtttcaccgtctgcaggcgtactgcgaccaactgaaaaacgaaaacgaagccatccagctcagagttcgactacaccagcagagcaacgcgtcgatggccgactcgattgcgacagattctgtcacacctcgggaggcgtga

SEQ ID NO: 54 - DNA, 1056 bp, Toxoplasma gondii
  source 1..1056: mol_type = genomic DNA
atgtttggtgaactttgcgttgagttggcgtttccatttttgcgtcaagcggtttctgtcatgttttcaagggcttcgcttggacggccgggtgtaccccgcctgccaggtcgccccgtatgcctcttgctatttgcaagcctgtgcagttgcctggttcagaaatgtacttttttgccagtctcagcttttcgacgctccgagggtaacttgtcccgcggactttcggctgaacagcatattcgcaacaaatcaggtaggcgacaactgtcagaaatcgatggaggaaatcattttgacgtcgaacccgccagcttcttgggcctcctcggagaaagccctgaagacgcagacagttcctccacaaaagcagaggactctgattcggaaggcggaacttcgccagcggcaactgaagaccagaacgggaacgaaagcgactctcaacagtcagaatcatctggagctgtagagaaacggacggcagcaaaggaggcgccagaggcgcagccagagaaacaggaggaaccaagcaagaatgaagctcaagaagcgaagggtactgcggcagctgcttcccgacaggatgacactgtgattggagaaggaaagaacccggaagagctaactgacgatgatttcaaacaaatgagcacgagtcaaggtctttctatcttgttcagccaaggaaagggcatgatgcaagaagttcagcacacgctggacggtgtcaatgccgtcgttagtattactgaactaatggggaaggtgcgcgaggatattaggaaagatgttgaagccctgaatcacactgtcactgaagagtaccaaaacatcgaacagctcaggcaactgcaagatgctcaaacggctgtccttcggtcgcagctgaactaccttattccattgaatcgtcaagaagccgctgccttacctgagatgcccggggaagtgttacagtctgggtcgtcttcactcagtttctacagccttttcgggtcagtgtgcgctgctgtggtttccgttctcttgtcggcagctcatgtatcctcgtga

SEQ ID NO: 55 - DNA, 993 bp, Toxoplasma gondii
  source 1..993: mol_type = genomic DNA
atgaaactcgctgccgtgtccagtgctgccttcgcggctgctttttttccagcagttgtcaatgcaaggaaagttggaaatccggcggcgcagcccagtgtccttgtcaacgaaccggtggccctagctcagctcagcacattcctcgagctcgtcgaggtgccatgtaactctgttcatgttcagggggtgatgaccccgaatcaaatggtcaaagtgactggtgcaggatgggataatggcgttctcgagttctatgtcacgaggccaacgaagacaggcggggacacaagccgaagccatcttgcgtcgatcatgtgttattccaaggacattgacggcgtgccgtcagacaaagcgggaaagtgctttctgaagaacttttctggtgaagactcgtcggaaatagacgaaaaagaagtatctctgcccatcaagagccacaacgatgcgttcatgttcgtttgttcttcaaatgatggatccgcactccagtgtgatgttttcgcccttgataacaccaactctagcgacgggtggaaagtgaataccgtggatcttggcgtcagcgttagtccggatttggcattcggactcactgcagatggggtcaaggtgaagaagttgtacgcaagcagcggcctgacagcgatcaacgacgatccttccttggggtgcaaggctcctccccattctccgccggccggagaggaaccgagtttgccgtcgcctgaaaacagcgggtctgcaacaccagcggaagaaagtccgtctgagtctgaatctgtcccgtctttgcctttgtctcaaattccctcagaagtgcccctgtcccaagagtcgccagtaccgcctcaggatggtgagaacccagattcgccacaaaatgaagacaattcgatgcaggaagtcgagaatagcgcttcgcagtcggatatcgaggctcagcggcaggccgagaacggccgtctgccgagtgacgatgaggcgtaa

SEQ ID NO: 56 - DNA, 1131 bp, Toxoplasma gondii
  source 1..1131: mol_type = genomic DNA
atgcacaccaaaatgacggacggagcaaaattatatcgtcgctcaatgacgacagccacaaccacaggcttttttctgttggcatgctggttcttgccatcgagctgtatccagggcagtgaggcattatccacgacagccactacgcagccgatatcaaatgtgactcgctatcctgagcaacatactgtcgccagaagtgccgccgacgtggctaaggcactggcggagaaggtagcccgcgaagcaatgaagaatgcgtataacgatgttttcaggaattggacaggtatcgctcatcccgatttccacaacggtgacgctgaaacctgcaagattgttctgagcttcgacgtagcgaagaagaaaaatgccatgggcagcgtcacgaagatcctgtcggtaactgtgaacaatgcaagggggcagctgacagtcaaataccttgaacgaccgaatgtccggaatgcaactaacgttagacgtgcctcttcttgggtgaggaggaagctcgctctagaaactgcagatgaggttgtctcagtgacggagaccattgatgtgccacaagcatgtatcgctgacaatcactcgcgctatttcgtcgtcacgcgacggaaaaatgtgatagacacccgtgttttcgctgtcgttatcgaactagagctacatcccggaccctatctcgttccacgagacatctcgaggatagcggagctcgaccggatcctcaaagagcacgaacgcgaaactttcacggaaggaaaatgggttactctcccgggttgcatgatgttaatcagggttagagagacattaaaaagggcaccgcgtctcacaattgacgcttaccgtgggtctgttcagtttcgagaagacgagctgaagagcttaggctcccaggcgctaccccaagggtgcacttgggatggccccagtgctgtaggcgttgtgacccgccacgacagatctgcggatgctaacctgtgggacgttctgttgttcatggccgatgccccctcgcatgttcagttcgaatacacacttcctaaagaggctgacgtcgaacggaacagtgacctgagttccgggttcgcttcaggtcctggcgagcaagatgacaatatatag

SEQ ID NO: 57 - DNA, 1371 bp, Toxoplasma gondii
  source 1..1371: mol_type = genomic DNA
atgggccaggcgttgtttctcaccgttctattgccggtgttatttggcgttgggccagaagcatatggagaagcgtcgcattctcattcgccggcatcgggacgttatatacaacagatgcttgaccaacgctgccaagagattgctgcagaactctgccaaggcggacttcgtaaaatgtgtgtgccctctagccggatagtagctcgaaacgccgtgggcattactcatcaaaatacacttgaatggagatgctttgatacagcctctttgctggagagcaatcaagaaaacaacggtgttaattgcgtggacgactgtggccacacgataccgtgtcctggcggcgtacaccggcaaaacagtaatcacgcaacgcgccatgagatactgtccaaattggtcgaagaaggagtacaacggttctgcagtccttatcaagcatctgccaacaagtactgtaacgacaaatttccagggaccattgcgaggaggtcgaagggcttcggaaacaatgtcgaggttgcgtggaggtgttacgagaaggccagcttgctgtactcggtttatgctgagtgtgcgagcaactgcggaacaacgtggtactgccctggaggacgacgagggacgtcgacagaactagacaagcggcattatacagaagaggaaggaattcgccaggcaatcggatccgtcgacagcccatgttctgaagttgaagtctgcctaccgaaggatgagaatcccccggtgtgtttagatgaaagtggccagatttcacgaactggtggtgggccaccgtcacaaccgcctgagatgcaacagcccgccgatcgttcggacgagagaggtggcggtaaggaacagtcgcctggaggagaagctcagccggaccatccaacgaagggtggtaacatagacctgcctgagaaatcaacatctcccgagaagacgccgaaaaccgagatccatggtgacagcacgaaagcgacgctcgaagaggggcagcaactaacgctcacgtttatctccactaaactggatgttgctgtaggctcgtgtcattcactcgtcgcgaatttccttgatggatttttgaagtttcagacgggctcaaattcggcgttcgatgtggtagaagtggaagagccagcaggacccgcagtgcttacgataggtctgggacacaaaggccgtctcgctgttgtcctcgactacaccaggctcaatgctgctttaggatcagctgcttacgtggtcgaagattctggatgcagctcaagtgaagaggttagtttccaaggagtgggtagtggagcgacgctcgtggtgacgacgcttggcgagagtcctacggccgtctctgcttga

SEQ ID NO: 58 - DNA, 597 bp, Toxoplasma gondii
  source 1..597: mol_type = genomic DNA
atggcgctttcttctttgaacaatatcaggccttttagcgggttgctgggttgcggcctgctgtttggcgcccttgtggtcgtggtggcatgtgttttcagcgttcctgtggaagcaggcgttcttcgtaaggtagcaggtgcaggaagtctccaggcgtctattggagagcacgatttttttaacgattacgatcaggacgaggaatacaggaagcgccagcaagaactgcagaatcagagtccagaagaagtcgaggaagcgaaacgcaaataccacgaagagctgagacggaaagcagaagaagatgcagagacgaaacgtaagcaagaagcagtcattcaagaactgaaagaggtggcaaagaaaagaggacttcgtgaagccgctgagcgtgaggagaagcgcattgatgagcagcaggctaattacgagcaacgacaacaagaactgagagacatggattcagcaatggaggagaggcttatgcagcagagaaaaaaagaccaggaagagagagaacttgcaagaaaaaacagcgataaggtcatggaggagctcaaagagaaactcgcaagacgcaggaaatcaatgtag

SEQ ID NO: 59 - DNA, 615 bp, Toxoplasma gondii
  source 1..615: mol_type = genomic DNA
atgcagctcaagaagctttcagtcgtctctatcacccttttggggctttttaagttcgttaatggagtctccgagggcgtggtcgtcccagtaagattcggatcggagacggcccgtgctgacctgttgaaccaagtgtcagagacagtattctccttagtagaaactactgaagatgacaaaagcgccgcatctatcgtgagaggcgccttcaggagtgccttgaaggaaatacttgttgcagtgaaaggagaggttcaacaaacatgcgaggagcttgcggatcttgcagcgcgaaaaatccacgaggccgaagaacgtggcgagggtcgtctcgacaaggaagaggccgttgacgatgagtcagatttcagcttcttggattccccgaagacgagtgaagcttctatcaggcctcacggttttcttcaagagagaaagttcgtagatacgttgaagactcttgcgaagggagcgctcaagacctttgttgaacctatgaaagctgcacttgtcgacggaataaggccaatgctgccgaaaattaaggaggtagctatagacgtctttagacaggcgtgtgaacacgcagaggagaagctccaggacgcgtaa

SEQ ID NO: 60 - DNA, 6549 bp, Toxoplasma gondii
  source 1..6549: mol_type = genomic DNA
atggcgattctgcggtcagggatcgccgtggcgacactctgtgtcgccctgggtttcacttcccaaagaggcgttgtagcagaaacatgccctgccaggttcactgcctggacgtactgcggcggccaaaacgccatgcaggaacgccacaacgtcgcttgcgcgaacatcgttgagtctcgcgaatgcgaaaagccacagtcatgcggtgacttcaccgaatgggtcccgagcgtcgcgaactgccgtgaaggccagatgcaacagcgccaccgtgagggttgcgaaaaccacgtcgaacgccgcatgtgcaccagcccagaatgcgtcggcaagtggaccgaatggacatactgcaactccaagggcattcagcaacgccacaacgcgagctgccatgttgtcgaaatccgcgggtgtggcgatgtcccagaaggctgcggcgagttcgggccgtggtctccgccactcgacgatttcaacaactgcaagcacggcgtggtgtaccgccgcaagcgtgaagggtgcgaccttgaagaagttcgcatgtgccccaagttcgactgcagcgcatgctcaccgaatgcagactgcaacaaggccgactcggtgtgcacatgccgcgagggctacgagggcgacggtctgacctgcgagcctgtgaacccatgcaagaaccacaactgctcagagcatgcagtctgcttcgccgacggtctccaggcgaagtgcagatgcgagaaggggtacgacggcaaggaaggtgcaggcacccaggacgacccctgcatcgaccgcgacgaatgcgccaccaacacgcaccagtgcccagctcactcgacatgtcgcaacaccgagggtagctacgactgcgactgcaagacaggctacgccatgtccgagactggcagctgcgaagacgtcaacgagtgcgccaccgaaaactcctgccccgagaactcgtcttgcgtcaacaccgccggttcgttcgagtgcgtctgtaacgagggcttccgcatgaatgccgaaacgcagcagtgtgaagacatcgacgagtgcgcagaggaaggcggctgcagtgccaacgccacctgcaccaacagcgtgggcagctacagctgctcctgccccgagggttacaagggtgagggaactcgagattccccttgcaacaagatcgactactgtggcgagggtctgcacgactgcggtgagcacgcgacctgccggaatgaggctgtcggcttcacctgcatctgcgacgccggctacacgggacttggcaaggtcagcagcccgtgtgtagacattgacgagtgcgacagggaacaccctacgcacgattgcgacagcaacgccacctgcaccaacaccgagggctccttcacctgcgcttgcaacaccgggtacacgggcgaaggccgcggcgccgacacctgcacagagatcgacgagtgcgccgatggcactgccaactgcgccgccgaagccacatgcacgaacacacctggctcgttcaagtgtacctgtctggagggctactccggcgacggcttcacgtgctccgacaacgacgagtgccagcaagaacctgcgccgtgccaccagtctgcaacttgccagaacacccccggcagcttcacttgcgcgtgcaacgccggcttccgcggcgacggccatacctgcggcgacatcgacgagtgcgcggaagacccaaatgcatgcggtgcacacgcagtgtgtcgcaacaccgtcggcagcttctcttgcaactgcgaggaggggtacggcaacctcgacgaacaccgcgcttgccacgatatcaatgaatgtgaggccgagcccgagaggatcccgccgaacgcgacatgcgtgaacaccgacggttccttcgagtggtcttgcaacgccggctacgaacatgtcggctcccagtgccagaaaatcaacttctgcgctcgcggcttctgctcgccgcacgccagctgccaggaagtgagtaacggcaccagctacgagtgtacctgccagcccggctacgtcggcgacggtgtcggccctgagggttgcgcggaccgggacgagtgtcagacggagaaccactgctcgacggacgagaacggtggcatctgcaccaacactgaagggagctacacatgcagctgcaaggaagggtacagacaactcgcggacggcacctgcgaggacatcgacgaatgcgccagcggccacgaatgccacgaaagcgcaacatgccacaacactgccgggtcatacacgtgctcctgcaaccccggcttcagcggcgacggccacgagtgcgcggacatcaacgagtgcgagacgaacgcgcatgactgcgggagccacacgacctgcgagaacacagttggcagctttgtgtgcaactgcaaagagggcttcgtccactccgacgagaagacctgccgtgacgtcgacgagtgcgcggagaacaagcacgactgctcagtccacgcgacgtgcaacaacaccgagggctcgttcgagtgcagctgcaaggcaggcttcgagggcaacggcaaggagtgcagcgacatccagttctgctccgccggtcgcagtgactgcgcggcgaacgctgactgtgccgagaacgaggccggcaccgactacgcttgctcttgccacgctggatacagaggcagcggtcacacgagcaagggcgcagccgacgggtgcgttgacatcgacgagtgtaccgagggcgtcgacacctgcccccgccaaggaggccgatgcgtaaacaccccggggtcctacagatgcgaatgtgaagagggatacacctacaccacgaaagaggacggtactgttgagtgcgtggatatcaacgagtgtggcgtatcagagatgaacacctgcgcctcgaaggcgaatggcggcgtctgcaccaacaccatggggtcgtacacctgctcttgcctcccgggctacacaccgtctgatgacgggcgcgtctgcacagacatcgacgaatgcgcgactgagaacggcggctgctcagagcactcgcaatgtcgcaacctccccggcagctacgaatgcgtctgcgacgctggctacgagaaggtcgagggctcggagcacctctgccaagacatcgacgagtgcgctgccggaactgcaaccatccccaacaacagcaactgtgtgaacactgcagggagctacgagtttgcatgcaagcccggcttcgagcacaaggataacgcctgctcgaagatcgactactgcggccggggcggctgcaactctctggcgacttgcgaggaaaccgctgatggcaccgactacgtctgcacatgtcccaagggattcgtcactcaaaatgaaggccgtggggctgacggatgcacagacgtcgatgagtgcgcggagaacggatgcgcagcctatggcagcgagggggtcatttgtgagaacactcccggcagcttcaactgctcttgcgccaacggctacctcctgaacaacggcgtctgcgaagaaatcgacgaatgcgcgggctccagctcgaacacctgcgctgacgaaggaggcatttgcaccaacacccccggatcgtacacttgcagctgcaagcctggatacgaccagcagggccacgactgtgtggacatcaacgaatgcaccacccaagagccttgcggcgacaacgcggattgcgagaatacctctggctcgtacatctgcaaatgcaaggccggtttcgagatgagggacaaccaatgcgttgacatcgacgagtgtgcgaccaacaccaacgagtgccacaaccacagaggccgttgcatcaacacccacggatcgtacacctgcgagtgcattgccggattcattggtgatggcaagatttgcatcaacaagaacgagtgccagagcggcgacttcgagtgcgggccaaactctcactgcgtcgacaccgaaggttcgtacaagtgcgactgcaacagtggctacaagcaggatccggagaacccagacagctgcatcgacagggacgaatgcgagatcgagggtgcctgcgacgagaatgcggactgcaccaacttgccgggaagcttcagctgcacttgccgcgctggctaccgccaggaaggagagctttgcgtgaagatgaacctctgcgcagacgatgagaacggcggctgctcaccccacgcggactgcgagcacctcgacaagatcgtctgcacttgcagacctggctacgaaggcgacggcatcacctgcacggacatcgacgagtgcgccctgaataccgacaactgcgactcgcacgccacttgcgagaacaccgacggcagctaccactgcgcctgcggctcgggcttcaccggcgacggcttcacctgcgaggacatcaatgaatgcgagaccggcgagcacgagtgcgactcgaacgcgacctgtgagaacatcgtcggctcctacagctgccactgccccacgggcttcgccggcgacggcaggagttgctcgcccgttgaagtcgtgcctggccaggaatcttgcaaccactggagtgcattcactcgctgcgatcccgagactcacctcagcagccgctactgtgtggacctcccagacaaggttgagtcgatcacctgcgaagtcggctccctgccccagcccccgactgtcgcccccggcgagggtggtgaggaagacggcaacgcatgcggaccgtggggtccgtggagcccgtgtcccggcgaaggaaacaacatgagcacccgccggagagaagacaccgagagcgaggcgtgcgtcaaccaagtcgaaaccatggagtgcccaactcaggctgggcaagcatgcggcaactatggtgccttctccgactgtggagtgcctcttcgcggcttcgccatggccttccccgagaactgcccagagctcgtggccttcgccgcctgcgatgctcccgcgcctccccaagaggaccgctgccattctttctcggcctggtccaagtgcacacacatacccggcactactctgtacgagcagacgcgctcctgcgatggcatggatttgaccgagtcccgcttctgcactcccgacgatgaggtcggctcggacgtttccactgacgtcgcttccgaatgcggttccctcggcgagttcggcgagtgtgtgaacggccttcaggagagaagctactcggactgccccgatcataaagaagtccgtcagtgctctgacgaatcctgctctgccttcggcgagtggtcaccctgcggggaaccccagcaaggcctgcgtatccgcaagagacgtgcatgcgacaacgtgcactgcgcctgtgtcgaggccgaggtctgcggcgatgccaccccagagattgaggaggaagaaggcgaacatttcccccctgaagaaggcgaggtcttgcctccatatgaagagggtcctggtgagggtgagcttcttcctcccgaggaggagatccctgaaggagaacatgttcctgaggaggaaatccctgaaggagaacatgttcctgaggaggaaatccctgaaggagaacatattcctgaagagctcccagaaggcgagcatgttcctgaggaggaaatccctgaaggagaacatgttcctgaggaggaaatccctgaaggagaacatattcctgaagagctcccagaaggcgagcatgttcctgaggaggaaatccctgaaggagaacatgttcctgaagaggaaatccctgaaggagagcatattcctgaggagctccctgaaggagagcatgttcctgaagaattccctgaaggagagcatattcctgaggagctccctgaaggcgagcatattcctgaagagttccctgaaggagagcatattcctgaggagctccctgaaggcgagcatgttcctgaggaggagatccctgaaggagagcatattcctgaagagttcccagaaggcgagcatgttcctgaggaggaaatccctgaaggagaacatattcctgaggaggagttccctgaaggagagcatgttcctgaggaggagatccctgaaggagagcatgttcctgaggaggagctccctggaggagaacttattcctgaggaggaaatccctgaaggagagcatattcctgaagagctccctgaaggagagcatgttcctgaggaggagatccctgaaggagaacatgttcctgaagaggaaatcccagaaggcgagcatgttcctgaggaggagatccctgaaggagaacatgctccagaggaagagactcctgcacctgaggagaccgaaaaggaggaggaagaaggcgttccagtcgcagcgattgccggtggtgtcgtcggaggtgtgttgctcattgctggtggtgcaggtgctgccgtgtacgcatcccaaggtggcgttgaagcagctgaagacgaagtgatgtttgagagcgaagaagacggaacccaggctggcgagaaccgcgagagcgagacggtcattgagatcgaagatgacgcatgggcagacatggactaa

SEQ ID NO: 61 - DNA, 1407 bp, Toxoplasma gondii
  source 1..1407: mol_type = genomic DNA
atggtgggtgttttccagctgtgcctcctaacgtgcctgctttgcttgttgaagggcagtgacgccatccagcttcgccagcatcgaaatggattgggtgtcgagcagagctttgtatctgaagaaactgatatcgtcggaggacgcatttcttccctgcaagccgagttggactcctactgccacaatcggtacaagcaactctgcgacggcggcaacaaaaaattctgtgacaaaactggtgtcgctcgctacggcacggggatccagagccagcagactgccgaatggagatgctactttgcggaggttttgaaaccctcaggccgcaaggtgcagtgtgtcgatgactgcgggaattatttcccctgtttgggagttgtggatccgaacgacactttccacgcgactgcacataatcagattttgaatttcatcaaggatggagttgaaaagcactgcagtccattccaaatggctggcaacaattattgccagggcgttcttgcggacacagtcgcccgcaaagacacgggcaccgcatctcaaaaggcgaaagcgtggcgctgctataagaaagacagtctcacgtacgaggctagatccatttgcgtggacaactgcggcggtgaaatagaatgccctggcggacgttcagaaacctctggagaactactcagtcagcattatactagggaaaaagagctgcagaaagtgatcgagtcacaaagtgccccctgccatgacgcatgcgttgcgacacccatcaacccaccaatttgcgccgacactgagagtctcctgcaaagtaccaaacgcagcagagcacagagattcatcgatgacgcgtgccagaaactgttcaactgccactgcaaaaaagacaagaaattctgcacgactgtagtcgcccgcaaggatcgaggtcgcgcaggcagtcaaaatgatgctgagtggcgctgctattctttagaagagttggactttcaaaaaacaaacccgtcgtgcattgatgagtgcggaaatgaactgccgtgccaaggcgcagtaccagaagagtctactcaccacataacgtggaccaagttgccgtctaaaattgacgaagctacgcaaaagttctgcactgaacgacaaagagctgcgaatgactattgcgcgtcagagttcgcagacagtctggcgcgatatggacccggcgcgggggaccaaaccagtcaatttcggtgtattaaaaaggcggcaatgcgtgcagatgccgaagggcaatgtgccgattcctgcaaaggaacggaaacgtgcggaggcggtcgaagcagacttgatggccctctctcagttgatgacgttttgaatgctcacgagggtatttcagaggctatgaaaagcgcctcgacagagtgctag

SEQ ID NO: 62 - DNA, 2907 bp, Toxoplasma gondii
  source 1..2907: mol_type = genomic DNA
atgagtgaggcagcatactcggcggaaagaggctgggaccctgaaacaatgacttgcaagtgccccaatgatgcacccgcgtgctcagcagaacaggctacatataatctgatcaaccatagttcggttgctctcggccaaggtgccatctgtgcagcagccacagggaccgtatctggtattgcccgccatttcaagagatcgactttagatttgtgcggcgacttgtcgaaattgtcacctttgagttgggaacagctgcccttacccccttatatggcggatgacgtcattctggatgatgaggtcatacggagcggccactatttgtgcaccaaatcataccatcatgtgttctgccgtagctccctgattaccacatcaacgactacacctgaaccgaaatgggactggcctgccagacaagactgtgtgccgggtgaatggacgagctggagcaagtgctcaatggactgttatgtaggaagtggtgcgctgccggtaaagtcgaggtcccgatctgtactaattgatcgacgtgggacaggaaacgtgtgtgtcctcgaggaccacaccctgtgtaaagtcggttctgaggtaccgtactgcgaagacttatgctggatcactgactggggtgactggagcggctgcgaacagaaggtgctgcagatcggacaagcggcagttcgagctcgcacgaagcttcggcacatctttatgggcacagggggcgtgtgtagttccgaccacatccagtacgattactccggttgcaagagtggtatggattctagcggggggcgggaggatgactcagcacattcgatggtggaacagaaatcacgggtaacagacgccggctgcaagaagtcttctggctggtccgcctgctctctgccgtgccagcagccaggcgcgaacgccgtgacacaacaattccagcttggactgccagaaacggtgacagcctctaccacctcgtactgtgcctctaggtcgcgcgcctgtgtggagaagaagccgccatgtgtgctggacgtcgcacccgattgctcccttgtgaagcccagatacgattcccccgaggaggctctgtactgccacgagctgtgtaataatgctctaacacgctgcagggaacaagcagcactgcaatttcagacacaatgggagtgcattatggcattcatcaactcgtcaggcgttactgggcggtgccagattcagaaaggcgcagttagcaaaacaaccctgcggccacctgtctgcttcttgagtcggacgcgtcaagtggatgcctcaaagagtctttcttttctgactaccgacaagactagtggccgcggttcctgcatgtgtgcagttacaaacagcgtaccgtgctctcctgaagaagtagcattatcgtttgatgactgggctaagcagctaggttcgaccgtttgtccgttcggtcagctgggagcgttctttaattcacctaactcgaagggctccgccgattctttcgtctacttcggcgcttccgacctgggacgtgtacactgccccatttccaagagttcagacttaggcagtcgctttcctactttcacagagtttgaaagcccggaaagcatgaacaacttctgcgaaaacggcctacctttctggcaagagaagcgggaacctctagtagattgccggcaggtgataccgaagaatgcctcaacaacggactgcccggggcgttgccacaaggcagtggtcaactgcatggtgagcaatgattcattagacaactgcattaacgaggccctatcagccggtgacttcgccgaaaattgcgaacttcagtcctcggtgaagctcggcaagggcttgatgttctgcaagcgtattcgcacggactgcgagtactccgaatggtcagaatggagcgaatgcagccgtacctgcagaagtggagatgatgaggagagtgttcgggtcaggggtcgcaagctgctcgtcgctgccgaacacggaggcagctgcgacgccgacatcgaggattctcatggtgggagcctgagcgacgtccagctgtgcgactggcttcctccttgcgacgcgctggcagatacagagacctacgttatcatgccaaagccggaaccaaaactggcagactggagtgcgacacggacaacgacaacgacagtgattccgggtcttcagaatgagaacaagatcttgtgcaccatcgtggacatggccgacttctccaaatctcaccgaggctatgacacggagacggagtcgtgtaaatgcccgtacaatgcgagagtatgcagtcgaacggaagcggtcaactcccgcgacaactgggacgaactcatgcagacagtttgcgagagcaatggccaaggccagatacttgcacagggcatggagacgttcagttgcagcgaccgcgtatttcggtcattcaggggcactttaggtcagacgcctgaagcgcactgcaaaagtgaagacgcaacgtatatcttctgtgaagatggtgcgatcgataacgacctcatattcacagaggtgatgatgtcgattattaccggcgtcgtcatgggaatagccgttgtctactgggcgattcagtacagtggggatgtccagaaagtgcttggtttggccggccgatacgtggagctgacgaacctcctgcatgaagtgtctcaagagccgcaggcgcacgaagaagagaaggcggaagaaggcgagggaccagatgaagacgcagaacctgaagcggcagtcgagggaaataatgaatttgactgcaacccacgggcgaaggaagagaatggagaagaatcggaacaggatgcctcggacagtgaatccggttccgatgacgacgatgatattgtatcggaagagtag

SEQ ID NO: 63 - DNA, 8775 bp, Toxoplasma gondii
  source 1..8775: mol_type = genomic DNA
atgggggttctgcgagttcggtcattcccgcttcaacagaggaccatggtctttcgggcgacgagggagccgtttcggcttcccttggtaccagcgtttattgctttgttcttgttaaagggtgtaacttgtcaactgcagttgggtacgagcaccttgcagaagaatatgtggactacggtgaagtttgacgagcccatgatagacccagtcgttttcgtgtcaccacctgaggttccgacgaacagttttgctttggtactgattggaggagtcacggcgtcaggctttcgcgcgcgtgtctacttcccgtcatgtgaatattcgcccagcggcgggacactgtacgccgtgcgatggcttgccgtggaagcgacgtcagccggatactatgacagctccaacagacaaacaattgactggacagcacacgcagtgaccctcgcttcatcaggcacaatccccgccggctacgtatggtcgcagtcgttttctgcatgggaggatagaccgggtactccaggcgtcctgattggcgtgcagaaccacagggaaatgatttcagcaatgtactcgtcgtcggaatacctgaacccattagtcatcaacagcaacagcggagggaccttgacgttttctttcctacgtcagattagtcatcggataggcttcacgttaaaagttggcatattccagtatgatgcgaggcgaggagcagttatcaatggagtcaatctcgtggcccagagatatgatttgaaagtgaatgaagtattgccggttgcagacgtggtagctggcggtacgacccctgcaacgtttgcagtccagtgggtaacgccgaccgaggcgcccttggccctggtggttaaaccaaaactcttaccagacggcagttactccgagagtctggtcgccgttgaagactgcagaaaaggagcaacctacgaacctcacgcattcgacgtcacacacgcgtttacaggcaatccggcttccaccgctcatcgaatcaacgggggtccaaactgcttcaggccatcggcgagcgttcccacttggcttaccgaaccgtgcaaattggcttgcgagagcttgtggactgccaactctgatgactactggaactgtgacgacgtaaacgcttgctttgagactgatttccggtcggcggagacgctgatggcccttccacaaattgacgagagcattgcagaagtgcttgtaacgtcgtgcaacttcgcgacaaggaccgcagatctgataaagcaatacgagtatgcggtgaacctgaaagttgacgatattgctattggcaccatgtggagtacgtcgtctcactgcggaggcgacaagatggaggttgagattgtcggcgctttctacgagaagctgggtgtctcgattttaacgggctccacatgcgaagttcaagatgttagcagggaggtagaggcgctgtgcaaagctgaaggaggaattggatgttctataagtggtgcacaaatctatgaactcataatgaattatccgggcgtctgcttcgctctggaggatgcagaattgcaaatcttcttcaactgcacctttgcttcaacttcgccttttgactgcgagctgtacgaatccaagggatttgatcaagaaaacggtgactgcatgtgtccgaacgccttggccgcgtgcacgcgggaggaggccacattcaagagcggctggttacagaaccttaataaatcatatcagtatatgctgcacggccagatccgctacgtggccaaaagctcagtcttccaagctttctatgaagcgccagaaacgtcaagtgccggggacaatacgctgtgtgctcggatgaacaccattgttgtttgcaagaatcccacgccagtgtccgcagtcgtgggcaaccgcggtcctaactgctacgtaatagagcatggctcccaatactgccatctgccgtgtttgacggcgtgggacgcgtttcttgctgccaaggacttgccacaacaatcggactaccaagcagagtttgaacgcttctggctcagcttcgatttccctgccattcctcctcacaccagccaaagcttgttggagcagttacagcgttgccgctttgctacacggccagctacagctcctctgcaacaatatgaggatgagatcgacgtgcaactcccggactacggagcggtgattattccgctcggctgtgacaagctgcaccatcgagaggtggttcaggcattggtcggatcagcttcgtccatcatgttgggcgttcatgagccaggttgccgctatgaagacgccacagagacagttcagagagagtgtaaagctgccgtgtctgcgcgcaaaaccacatgtgaaattgatagctccctgttcacttccaaagacatcctgtgcaacacgtcaaccatcaagctcatcattagagggacttgtattccagggccctacttgccaacagactacacatgtgcactgtaccccaccacgggggtagtcagccgtgacggcagatcttgcacatgtccaaatagtgcatatccctgcacatatgaagaaggccaactaacagcttcgagatggaagaatgaagtcaatactggagcaactgtcagtttggccaacagcgttgtctggacggcgcctcctgggacctcagagtatacgtacacgcatacagatgcttatgactatgtctgctccaccgacgagcatcactttgttctttgcaaagatttgacgccgagtgcacttccacttactgaaagagaaccacactgcctcaacagcttttctgtgaagccggatgcctcgacagttgacgaccgggattgccaagatcagtgcgcgagtctgtttgccaccagatgcaggcagtcgttctataagtggttgtgcgtggcccaggggctaccggaatgctacattccgaacacggattctttcacatgtcaaatcgacaccaatccctctgcgtacaactattcgtacggctcgtgcggctgctccggggcgtacccgccgtgttcgcgcaacgaagccaatgccaccaggcttgactggattacggccttcagagctctaagccacaagaagggcgttgtggtggccagagggaagcaggcgctttggactgaaaacccagacagatggcgatacgaaaatggcatgctccagggaggtggctgcttgaacaattcttggtttgttggagtgttctgtggagcgcatttgtcggtcacgccacccgcgagaggagatgttctaccaatttgttcgagcgctgcgaaggtcgaaaaccctgacactccgcatcctgcctgtcgagtcctctgcgcacaagtattgaacgaatgcaaaaaggttttctctaccaccgaaggagcatccgcctatgcgtcagtattcgactgtttcaaggcccgcggaaaaggaacaactctcgacaactgcacttacgaactagggccagagaaccgcgcaacaggagttgctgagttgcacactggctggacagtcgcctcggcgtcgtggtcgcgagttcttttcgatgtagagttcgctgacccgcctgttgtctttttgggaatccccagagacacccaaccgttttacacgccatctgtgcgattagtgacgaaaacaagctttgaggtgaagctgtacagaaacaactgcggactcgatgatacacgaagctcctccgcaccagtatcctggatggcgattcccgaaggtgcctatttgacggatttcgtcgagaatcctgttcgagtaatgaaacttccgatgacaacgcgtaccccgacggttctgacgttttcccttcccggcttgaaagaacctgaggagatggtagctcttgctcaagtccaagacttgactccgaccagtgtttctacagatcgcgtcgcagttgtgatttcaaaccttaagacaaactccctggaactgtcgcttgtggtggacgagtccgtgaatttttcgactgttgctgtcgggatcctcatctcgggcaagcaaaacccggacctcgctgctggattgtccccccttctcaatcgataccacctgcagacgtttcgcattccagcagcggcgtattcagcgacaagcattttaggtgaaggtctctacttgtccgggggtatcatgcctcacgttttcgccgcggcgatccagacgagaagcaggactaaagagttggacgaaagcgatcgcgttgttatttccagaagagcaacgacaacgccttccacgtggtcagccctgttgtggaagaagacctgcgacgcaaaggacatgtttgaagcggttgagaatccctctgatcttatcatcgctggtatttatgttgaagctcgcaaagacgaacccagtgcgattctcggaaaccggcacgacctgtgcctctccttcataggtcaaagtttcgagagtggagttgtggcgacatgcatgggagcttgtcggagtgcactcccggcctccgtgcagctgcactgccaggatgaatgtgccttgaacatctttgctccttcggttcacacgaagtgtatgtcggactgcgaaagtctgctggtggcgcagtatgaagaatgtgctggtcagtgcaccgccaccggcaccgcttcttgtcaaaggaagtgcaagcagttcctcggaaataaatgtgacagtactgcttcatcggacgtggcggcttgcttggagttcgtcacccccccgtctgtttttgagcaatgcacgctgctcgtcgagtactctgtcagcgagggcggggcgtccgacggactcgaaatcgaggaagagacaacaccatcccaaacgtatgagaactgtatcatcgtggacatgcgggatgggagattcacagcctttacagggtgggactcccgggtggcgtcctgcaaatgtcccaacgacttccgcgcgtgcacctcagagacagtcaacactcaaaaccactggcggaccgagttgctcgcttctgcaggcttgtgtaaagagcaaccagacgggaggttcaacgctgtcacgcaacagttgtggtcgactacaggcgatctctgtgccttggcagctgacgaacagcaacctccaatctcctggaccagcaacatgttgcctgcttatgttgaccaagacgtcgttctcgacaactccaccattcgcagtggcgactaccagtgcagagaaatctggcactacgttgtctgtccagctgctgccacgtcaaccacaactcaggagccgccggtaccaccctttacagcaactctgaaaacggcaattgtcggggagtggggtgaatggtccgcgtgcacgggaacatgcttttcccagtggtggacgcctaaaaggacgagaacgcgcttggttttggcggaactttcccactcgcaaattccaagtgtatcggaaacagcgacatgcctcgaccttccgccttgcgggacagtctgttgggaacgagagtggacggagtggagtgaatgcaagttgttcactattgtcatgggccagggcctggaatattttcgacaacaaatcaaaccgattttcgactttgtcgaggaagcatgtggattggatgagcacgagcgatacgaaagatgcggcgaggagcaaaacaacggggagacaccggcgacctccacactgcaaacagattcgctgctagagaccaggtccttgactgtctctcgcgggacggctgcgcgcgcattgtcgcgggtgtcgatggatccggcccttgagcctccctcttttgcctctctccatggaactcgttcgcatgttccagcttccatagatgccaaaataatagagagacgaaagggaatcatgagccgccgacgctctgtccctccgtcggggtatttggaggaaactgccgaacaagtggcgcgtgggggcgaaagtgaacaaagcgagaaggcgagccaaaacgggagtaggaggcaccgagcatccaggaaacagaagcgaggcttggagtccatatactcggatgcgagtgtccgcggcagtggagagtcgacactgcatggaacaggaacgaacgcgtacagagaccagatagaatggacaagcaaaagttcttcgcgttcggcaatactcgacagcggggcgagaggtgcagaggcgggcactagcttactgcagaaagcgcgacgcgcacggagaggagctgggagatttcggaagagtcgaagccaagcacggaaccagacccccgacaaatcgtgttcggtcgtatctgagtggtcaggctgcgattcaccctgtctgcctcacaagggctcgacacctcgccggtatcggctcgccgttcctggacagaatgaggcaaactactgcacggtaccgttgagtggcaaagagcacctctgtaccgatttgccgcagtgtgctcacccaaacttcgactgtgcgaaggttaccgcttcgcggttgacagacgaggacatagcagcctgtaaagcggtgtgtgtggaggtcgtcaaaacgtgcgagacgatgatgagcgcagtgttctctctctacacctctctggaacaatgcgcactggttcagtttcaagaatacgagcaattcccgggacagtgccacataccggaagagtatacctcgacgcgaagacccaccaagtgtttcccctcgcgcacgaggaggcgcgtcgcgagcggagagttgccgttcatctttcaggtctcaacggcttcgggaacttcgccgtcagccacttcagatgctgcgtcttctgtcgctgagtccttcgtctcaacgggaacggcctcagctcccagctcgcgggttatgaatgcactcgcgtttgaggcctctgcttcacagacttccatcgactcctgcgaatgctatgatcccgcagacgaaccgtgcactgctcaagaagctcgagactctctgttcgattctctgtacttgttcctaacgcatccgctgtgtgcagagtcccccgcagcagaaggcgctttgtttaccatgtcggagcctaaccagacggcagatgccgcctcgtactttgcgttaagaggcctcggccgcatgcactgtcccgtgcctatgtacaagtcttcgactgaggtgaaaggcgttctgacaccgaaacgcgtcactttctccgaattcaagacaaaggaagacctcaacgagttttgccacaaaggcctgagcaactggagacaaaatgtgccacctgagatcatcgggagtgccagtttccccaactgtatgctggtgacgccgcgcgaaggtgcggagccacaagactgcgctttgctgtgttccgagacaatgagctcctgttcagccgcgagcttgtctttcgtcgaattgtcacagtgtgtccaggacaagctgaccgaaagcgacttctactcaaaatgttccgctccggaagtcttggctccaggagagggaatcattctttgcaaaaaaaaggtatctacctgcgactacactgaatggtcagaatggtcaacgtgcaccgcaacctgctttaactgggacgaaggagtgattccactgcgtgtccggtctcgcgattttgcctcgagttcagcagagagcagggtgttgtgccggctcgagagtcaaaacgacgccattcagactgagaaatgcgactggatgcctgtttgtcctgaggctgaaagtgaagaggaagacgatgcgacgggtggcgtcgaacctagaggggagcccattgtcccgccttggtcgccggagaggccgaccgacgaaaacaatcaggccatgggcagtgaagatattgtgccaggcacagttgaatgctacgttaccaatatgggcacaatcatgacttcgtactaccgaggttacaatcaagagtaccacgggtgcaattgtcccggcggccggcggccatgcacccgcgcagaggctgtggcctctctcgatttgtgggcaaaggactcaggaggtctttgcgaccaagacatggcaacaatgatttccgccgcagagggtgaagcgtttttctgtgcgaccggaagcttcggaaaaatcgatacctctttgtcggagtcatcctgcgcctcgtcggaatatcaatacgttttatgtgaaggtcacccgtacgagggcatagcgaacctgacgacgtgggtgatttgcctgcttctgggtgtcggcggaggcatctgtttcgtcctttcctgtgtgcagtacagcagcgacatccagaaactgttggggttggcggggagctaccctgtcctggttcagaatgtcacagagctacaagagcgtgaaagccataaacttcggcgtcaggggaatatttcagcaacttcggaacactcggacgctcatgcaccgtctctctcagactctggctgggacatggacggcaaccaatcagcaggctctgcattcccagaggaggaaccgtggcaatttgaagatcacgatgaagaaccattgctcagtacgaggaaatactcaaggaattcgggctcggctgagattcctgaaccctcagagatagggcagacgtcccccacgcaacaaagagtcccgcgagcctctttggctgcacagcgaagcacatgccagctgtcgtcgagactgggacaggcgaattcgcctgagcaaagcttagagcgaagaagcttgaagttacgggattcccacgccgacgtcgaactgcaacgcacacttcggaaagaaatgaagggaaaccaggtgtgggacaagacggtatga

SEQ ID NO: 64 - DNA, 2007 bp, Toxoplasma gondii
  source 1..2007: mol_type = genomic DNA
atggttgtttcctgtctctgtaccgcgatgtcaagtgccctctctcaacggaactgtatcctgatatcgtgtcgactcggtcgtcagaggtcaagaccacctgacgcaatgaaagtctatgcccccgtcttcacatgccgtcgccaatttctgtacgaaaaatatacacgtcgccgttgtactacgcttggaggcctggtagctttatgtgtcattttcactgctgaagctatttcacggtcacaacatccctacggaacgtcgaggagtgatttgagtccaccagcaactgtggatagcacaagctatggaatgtcaatcctggaggctggcggcccatccgacgaagtggcgattccctccgatagattgcagacttttagaaatgcgtctctcgattttgatagggctattcgcttccctaatcaggcgagtgtggctgaatcaaggcaactacgtttaatgcagatgggcgagtgccaaaacgtctattggggaaaaaaagagctcattagcaggatcacagggaaatggaaaagtgcgctgcacccatcctgtcacgagagctggttcacatacacttcctggtcgagaacaaaaacatggcgagagtgtgcccaggccctggacaactcctacttgtatttttcttgggtgagacgtcacaacgaagccgatggagcgtgcatatgggtcaagccctcccgcagagacgttagcaagagcgacgtggaggactgtctggtcgatgtgaatccacaaaaagaagttgccgtaactggaattgtcggcagccaccacggatgcacaacgtgcgaagtgggcgagtggtctgagaccacctgtgacagttggtgtaatgatggagtaaagggtcgttttcgcgaactaacaggtcacacgaattcggctcactgcagtacgtcggctgatgccaactgcgatgtatgtccgaatctgtgggaagttcaacgctgcagcactgccgtagaatgcgctcaaggaatcaaaccaagagtccgtttctgtcccaacgaaggcagagagtacacggctgaaggctggcgcgcctgtgccgaacggtgccaacgcaagttcaatgccacgaacggagacacggcgaaccgtgataccttctacaaggccgaatgtttcagatactcattcaacaatgacacctccgcttgtattcttaatccgcttcatgcgtgccccgatgccgagtcagctagtgacgtgttgtggatttctggagacgttctgagcatgccctcggccgactacacaaccgtaacgtggcaggagtggcaatcatggagcagctgcagcgaggtcgacccggcaaccggttggaaaaaaaggacacgacgacctaaaacatgggggtatcgtccggacaacgtcttatcaccgttgcagtggatatccgtcaccccttgcgcttccaacgtaacactaacacgaagtgaactcgatctggcgatgaatcccagtgcgatgtgctgggtgtacagtgacttcgcggattggtcgacagtttcttgtgaaccccgatgcggggcagacaggaaaaagacgagggccagggcagttcggcagatgcctgtggtacagccagatggccggatctcggagtcgtgtgcatccactgaagtttcactggaggcacgccagcagacgaaggactgtcccggttttgtatcctgtggcaccggctgcgtcttcggagagtggacggcatggagcgattgccggtgcacagcggaagggtcaacagcgcgaacgattcgcgcgcgagaactcgtctctggctctaaagaatcctgcactggtctcgaggaggaaaggaaatgtgaaaaagtttgcgaagaaagcattttctccaatggagtcacttacgcagttgccggaggcattgggctggtagttgtcattggcttaggttttataggacgcaagttttatcgagctctgcccgccgaacggacacgggacaactacctctaa

SEQ ID NO: 65 - DNA, 1056 bp, Toxoplasma gondii
  source 1..1056: mol_type = genomic DNA
atggacgcgctgaagactgtgttcaaccggagaatcgctctccccgttgttgttgcagcggcgttgctccataatagtgccgaggccctgcaatctccagggctccggagacagctagtcaactcccactctttcgctgaggtggagacgacaggatatagctgctttgaaaaaggcaaggagtacgttggtttcagcctgactgagttcgccaaagtgggcgacgctgctttgtgccagcagaggtgcaatcaacacccgcagtgtggcttcttcacattctattccaatgagaaccgatgcgtgctccagtcccgcaagccttctcaggagaacaacaatgccaatgccgtttctggcccgaaacggtgcccgctttgcctcgttgataactatgatttcagaggcgagacaaacatgcataaatcaggtgctcccggtctcaatacactcctggcgtgtcaacagggatgtgcagcggagcccaaatgcaaggccttcctcttcgagaagcgtccccgcacgtgtcacttcaagacaagtgataactatttgaaatcgttccatccggatacttcatatatcgcaggtccgaaaacgtgtacggatgaacactggtgcatcatgaaggatattggctacaagggcacagactcgaaggcgacaaaagcaaactcagcggcagagtgccagcagatgtgcctcaacgacgagagatgtgactttttcacgtggcaacaggcgggcaagcattgttggtttaaggctggggcgtccactgcctcaacaaaatacaatcgggctggcgactattctgcaccaaaacactgcggcctgccgaccacatgtgtcaaggagcggacgaagtacgcaggcgaaaccgttgcgacgttccccaagagcgaggtggggaccttcgagtcctgccaaatgaagtgctggaagaccagcaagtgtgtgtttatgcacttcaacaatgatggctgcacgctctctgggatcaatgcaaccgctcaaactgatgcgaactccaaagcaggcgatatcacatgctga

SEQ ID NO: 66 - DNA, 1056 bp, Toxoplasma gondii
  source 1..1056: mol_type = genomic DNA
atggagactgtgacgactctgttcaaccggaaaattgctctctcctttgttgttgcggccgcgttgctccataatagtgccgaggccctgcaatctccagggctccggagacagctagtcaacgtccactctttcgctgaggtggagacgacaggatatagctgccttgaaaaagacaaggagtacgttggtttcagcctgactgagttcaccgaagtgggcgacgctggcttgtgccagcagaggtgcaatcaacacccgcactgcagcttcttcacattctattccaatgggaaccgatgcgtgctccagtcccgcaagccttctcaggagaagaacaatgccgatgccgtttctggcccgaaacggtgcccgctttgcctcgttgattcctttgatttcagaggcgaggcaaacctgcatcataaaggtgctcccggtctcaatacactcctggcgtgtcaacaggggtgtgcagcagagcccagatgcaaaggcttcctcttcgagaagcgtccccgcacgtgtcacttcaaaacaaatgataactatttgaaagcgctcgatccggatacttcatatatcgcaggtccgaaaacgtgtacggatgaacactggtgcatcatgaaggatattggctacaggggcacagactcgaaggagacaagagcaaactcagcggcagagtgccagcagatgtgcctcaacgacgagagatgtgactttttcacgtggcaacaggcgggcaagtattgttggtttaaggctggggcgtccactgcctcaacaaaatacaatcgggctggcgactattctgcaccaaaacactgcggcctgccgaccacatgtgtcaaggagcggaccaagtacgcgggcgaaaccgttgcgacgttccccaagagcgaggtggggaccttcgagtcctgccaaatgaagtgctggaagaccagcaagtgtgtgtttatgcacttcaacaatgatggctgcacgctctctgggatcaatgcaaccgctcaaactgatgcgaactccaaagcaggcgatatcacatgctga

SEQ ID NO: 67 - DNA, 1812 bp, Toxoplasma gondii
  misc_difference 949..1678: note = n is a, c, g, or t
  source 1..1812: mol_type = genomic DNA
atggacgcgttgaaaactttattgaacaagggaatcacactcgccgtcgttgttgcagcggtgttgctgcagattcgtgccgtggcgcttcaatatccagggctccgaaaccaggtagtcaacgcccactctttcgctgaggtggagacgacaggatatagctgccttgaaaaagacaaggaatacgttggtttcagcctgactgagttcaccgaagtgggcgacgctggcttgtgccagcagaggtgcaatcaacacccgcactgcagcttcttcacattctattccaatgggaaccgatgcgtgctccagtcccgcaagccttctcaggagaagaacaatgccgatgccgtttctggcccgaaacggtgcccgctttgcctcgttgattcctttgatttcagaggcgaggcaaacctgcatcataaaggtgctcccggtctcaatacactcctggcgtgtcaacagggatgtgcagcagagcccagatgcaaaggcttcctcttcgagaagcgtccccgcacgtgtcacttcaaaacaaatgataactatttgaaagcgctcgatccggatacttcatatatcgcaggtccgaaaacgtgtacggatgaacactggtgcatcatgaaggatattggctacaggggcacagactcgaaggagacaagagcaaactcagcggcagagtgccagcagatgtgcctcaacgacgagagatgtgactttttcacgtggcaacaggcgggcaagtattgttggtttaaggctggggcgtccactgcctcaacaaaatacaatcgggctggcgactattctgcaccaaaacactgcggcctgccgaccacatgtgtcaaggagcggaccaagtacgcgggcgaaaccgttgcgacgttccccaagagcgaggtggggaccttcgagtcctgccaaatgaagtgctggaagaccnnnnnnnnnnnnnnnnnnnnnnnnnnnnnnnnnnnnnnnnnnnnnnnnnnnnnnnnnnnnnnnnnnnnnnnnnnnnnnnnnnnnnnnnnnnnnnnnnnnnnnnnnnnnnnnnnnnnnnnnnnnnnnnnnnnnnnnnnnnnnnnnnnnnnnnnnnnnnnnnnnnnnnnnnnnnnnnnnnnnnnnnnnnnnnnnnnnnnnnnnnnnnnnnnnnnnnnnnnnnnnnnnnnnnnnnnnnnnnnnnnnnnnnnnnnnnnnnnnnnnnnnnnnnnnnnnnnnnnnnnnnnnnnnnnnnnnnnnnnnnnnnnnnnnnnnnnnnnnnnnnnnnnnnnnnnnnnnnnnnnnnnnnnnnnnnnnnnnnnnnnnnnnnnnnnnnnnnnnnnnnnnnnnnnnnnnnnnnnnnnnnnnnnnnnnnnnnnnnnnnnnnnnnnnnnnnnnnnnnnnnnnnnnnnnnnnnnnnnnnnnnnnnnnnnnnnnnnnnnnnnnnnnnnnnnnnnnnnnnnnnnnnnnnnnnnnnnnnnnnnnnnnnnnnnnnnnnnnnnnnnnnnnnnnnnnnnnnnnnnnnnnnnnnnnnnnnnnnnnnnnnnnnnnnnnnnnnnnnnnnnnnnnnnnnnnnnnnnnnnnnnnnnnnnnnnnnnnnnnnnnnnnnnnnnnnnnnnnnnnnnnnnnnnnnnnnnnnnnnnnnnnnnnnnnnnnnnnnnnnnnnnnnnnnnnnnnnnnnnnnnnnnnnnnnatttcaggaagccggtggccagtatatgtcacagcccacgaacgaaaaaaggagaccagacagtttctcacgaaatcgtgaggcccgtgaacacgtgtagacgagtgactcctgagcgtggcgatagtgaatga

SEQ ID NO: 68 - DNA, 2310 bp, Toxoplasma gondii
  source 1..2310: mol_type = genomic DNA
atgagactccaacgcgaggccgttttcggtctgatgttcgcttgcggtatgtggatgtggccgagcgaagtggcaggtggagggtggagtattgtggatgccttacgaaaaaggtacgacacgagtcgaggaggcgacgcaaacggtgtcgatacttcaggcgttgaagatgtgattcaatctgagagtgccatcggagccgcagaggggtgcaccaaccagctggacatttgctttcttatcgattcgtctggaagcataggaatacagaatttccgtctagtaaaacagttcctccacacctttttaatggtgttgcccattggcccagaagaagttaacaatgcagttgttacttactcgacggacgttcacctgcaatgggatctacagagtccgaacgcggttgacaagcagctcgcggcgcatgcggtgctagacatgccgtataaaaagggcagtaccaacaccagtgatggactgaaggcctgcaaacaaattctgtttacaggttcgcgcccaggacgcgaacatgtgccgaagctagtgattggaatgacagatggcgaatcggattctgattttcgcaccgtgagagcggcaaaggagattcgtgagcttggaggcatcgtcacagtccttgcagtcggtcattacgtcaaacatagtgagtgccgaagcatgtgtgggtgcagtggtacgagcgatgatgacagtccgtgtcccctgtatcttcgggctgactgggggcagctcgcgacggcgattaaaccgatgcttaaagaggtttgtaagacactcccccaggatgccatttgctcggattggtccgcatggagcccctgcagtgtatcctgcggtgacggaagccaaatcaggacgcgaactgaggtttctgctccgcaacctggaacaccaacatgtccggactgccctgcgcccatgggaaggacttgcgtggaacaaggcggacttgaagaaattcgtgaatgcagtgcgggggtatgtgctgttgacgctggatgtggcgtctggggagagtggtccgcctggagcgcgtcttgcggaaatgccacaaggaagcgagagcgaacgcgttacaatgacccaccaccccagggggcaggccgtcggtgtgaaaatcaggatccgccggtgttacaggagcagacagaagaagcaactcttgctccttgcataactataccgccaactcccccagaatgggctgcatggagcgactgcactgtcacgtgtggcggtggcaatcggcatcgagtgagaaacgcactgccaccaggactggggtcgcagaacggagaaagtgacgaatcgctcgtgtccaaactgtggcctgggacagatctacgacaggaggaagcatgtaatacctcaccgtgtccaattaatgcaacttgcggtcagtttgaagaatggagtacatgctcggtctcatgtggtggtggactgaaaacgaggtcgaggaacccttggaatgaagaccaacaacatggaggactatcctgcgagcagcagcatcctggtgggcggacggaaacgataacttgcaatcctcaagcgtgtcctgtggatgaacgaccgggggagtgggcagagtggggggaatgtagtgtcacgtgcggcgacggagtgcgagagcgcaggcgcgggaaaagtctagttgaggctaaattcggcggacgcaccattgatcagcagaatgaggctcttccggaagacttaaaaatcaaaaacgtcgagtatgagccgtgttcgtatcctgcttgtggagcttcctgcacgtacgtctggagtgactggaacaagtgcgtgtgcccgatgggctaccaggctagacatgcagcagtcaagttcgattatcgtaacaagccttgcgacctcccaacgtttgaaacgaaagcatgcagctgcggcgagacaaatccggtgccttcggagggaacgactcctggtgcgcctggcgccaccggtccggaacagccaaaccagcgcccacttcctgaaggttctgatgaaaacgagacgccgacgaacgaagagggagaacagtccaagaaagagtcaggcagtggcatagctggggctattgcgggtggcgtcatcggcggtctgatactgcttggcgcagctggaggagccagttaccactactatttgagctccagtgtcggatccccatccgcggagatagagtacgaagcggacgatggggcgaccaaagtggtcatggaagaggagaaggaaacgctggtgcccgtggatgacgatagtgatatgtggatggagtag

SEQ ID NO: 69 - DNA, 1152 bp, Toxoplasma gondii
  source 1..1152: mol_type = genomic DNA
atgcgaggcgggacgtccgcgctgttgcacgcgctcaccttcagtggggccgtgtggatgtgcaccccagcggaggctttgccgattcagaagtctgtgcagctgggcagctttgacaaagttgtgccgagccgcgaagtcgtctctgagagtcttgctccgtctttcgcggtgactgagactcactcgtctgtgcaatcccccagcaagcaggagacgcaactctgtgctatctcgagtgaaggcaagccatgtcgaaaccgtcagttgcacactgacaacgggtacttcatcggggccagttgccccaagagcgcttgctgcagcaagaccatgtgcggccccggcggctgcggagaattctgctccagcaactggattttttgcagcagttcgctcatctaccatcctgacaaaagctatggaggagactgcagctgtgaaaagcagggccatcggtgcgacaaaaacgcagaatgcgtcgaaaacttggacgcgggtgggggtgtgcactgcaagtgcaaagacggcttcgtcggcactgggttgacttgctccgaggatccttgttcaaaaagagggaacgcgaagtgcggacccaacgggacgtgcatcgtcgtcgattcagtcagctacacatgcacctgcggcgacggcgaaactctagtgaacctcccggaagggggacaaggatgcaagaggactggatgtcatgccttcagggagaactgcagccctggtagatgtattgatgacgcctcgcatgagaatggctacacctgcgagtgccccacagggtactcacgtgaggtgacttccaaggcggaggagtcgtgtgtggaaggagtcgaagtcacgctggctgagaaatgcgagaaggaattcggcatcagcgcgtcatcctgcaaatgcgataacggatactccggatctgcttccgcaacctcccaccatgggaaaggagaatcgggatccgaggggagcttgagtgaaaaaatgaatattgtcttcaagtgccccagtggctaccatccaagataccatgcccacaccgtgacgtgtgagaaaattaagcactttgcccttgacggggccggcaaccacgacacgactacgtatgtcgcaagacgaaggtacccagcgagtctctga

SEQ ID NO: 70 - DNA, 1743 bp, Toxoplasma gondii
  source 1..1743: mol_type = genomic DNA
atgagagcgtcgctcccggttcacctcgttgtgtgcacgcagctaagtgccgtttggtttggagtggctaaagcccatggtggacaccgactggaaccgcatgttcccggattcctgcaaggcttcactgatatcacgcctgcaggtgatgacgttagtgccaacgtaacaagttcggagcctgcaaaacttgatctctcttgtgtgcactctgacaataagggatcaagggctcccacaataggcgagccagtgccagatgtgtccctggaacaatgtgctgcgcaatgcaaggctgttgatggctgcacacatttcacttataatgacgattcgaagatgtgccatgtgaaggagggaaaacccgatttatacgatctcacaggaggcaaaacagcatcgcgcagttgcgatagatcatgcttcgaacaacacgtatcgtatgagggagctcctgacgtgatgacagcgatggtcacgagccagtcagcggactgtcaggctgcgtgtgcggctgacccgagctgcgagatcttcacttataacgaacacgaccagaaatgtactttcaaaggaagggggttttctgcgtttaaggaacgaggggtgttgggtgtgacttccgggccgaaacagttctgcgatgaaggcggtaaattaactcaagaggagatggaagatcagatcagtggctgcattcaattgagtgacgttggatcaatgactgctgacctggaggagcctatggaggctgattctgttggcgcttgtatggaacggtgccgctgtgatggaagatgcacgcacttcacgttcaacgataatactcggatgtgctacctcaaaggtgacaagatgcagttgtactcatctccaggtgacagaaccggcccaaagagctgcgattcaagctgcttctcgaacggggtttcttacgtcgatgatccggcgacagatgttgagaccgtattcgaaatttcacacccaatttattgtcaagtaatctgcgccgcaaatccgttgtgtacagtgtttcagtggtatgcctccgaggcaaagtgcgtcgtcaagagaaaggggttttacaaacacagaaaaacaggtgtcacgggagtcacagtgggccctcgggagttctgcgattttggcggtagcatccgcgaccgagaagaggcagacgccgttggatcagacgatggcctcaacgcggaagcaactatggcaaattctcctgattttcacgacgaagtagaatgcgtccacacgggcaacattgggtcaaaagcacaaaccattggagaagtgaaacgcgcaagtagtttgagtgagtgcagagccagatgccaagcggagaaagaatgcagccactacacttacaatgtaaaatccggtttgtgttatccaaaaagaggaaagcctcaattttataagtatcttggcgacatgacgggatccagaacatgtgatacaagttgccttaggaggggagtcgattactcacagggccctgaagtaggaaagccttggtattctacgctgccgacagactgccaagttgcatgcgacgctgaggatgcttgcctggtgttcacctgggattcggcgacgtcacgatgctacctcatcggctcaggtttctcggcacatcgacggaacgacgtggatggcgtggtatctggaccctatactttctgtgacaatggcgaaaaccttcaggtgcttgaagcgaaagacacagaatga

SEQ ID NO: 71 - DNA, 546 bp, Toxoplasma gondii
  source 1..546: mol_type = genomic DNA
atgctgcgacctactgttcgtagctcgttactgtccctggggctgacagtgatcctctatctggctcttaccggctctgctgatgcgttagcctcgcatttacgctccagacacatggaagccggaagacgaaccatggatacccaaaacgatgtagaaagtgctggtcgtcaatctgaaccaatggaggcagcagatcgacaggcagaacatcccggtgcacccactcaatctgaaatgaaagaattccaagaggaaatcaaagaaggggtagaggaaacaaagcatgaaggcgatcctgagatgacgcggctcatggtgaccgagaagcaagagagcaaaaatttcagcaagatggcgaaatcccagagttttagcacgcgaatcgaagagctcgggggatccatttcgtttctaactgaaacgggggtcacaatgatagagttgcccaaaactgtcagtgaacatgacatggaccaactactccacgatattctcgccgcaggtggagtcgttgggctcgactccgaggtgaaactcgcatag

SEQ ID NO: 72 - DNA, 1050 bp, Toxoplasma gondii
  source 1..1050: mol_type = genomic DNA
atgaggctcttccggtgctgtgctgcggccgttgtggcggccgaatcgttactgtggctgaagaacggctccccgttttttgcctttcttcctgggaatggagagattgcagacaactgctctgggaatccatgcggtggcaccgcagctggtacgtgcataaacacaccatctggatatgattgcaggtgcgaaccaggctacgttctgggcgttgaaaatgaccaggtcacgtgcatgatgccctcaggtgtacccatggctaattttgtacagctgtcggaaaagcctgcagcttgcagctcaaacccttgtggacctgaggcagccggcacctgcaacgagacaaacagtggttacatttgccgctgtaatcaaggctacagaatatctctcgacgggacaggaaacgtgacatgtattgtaagacaggaaagcggctgtgaggaaaacgggtgtgggccgccagatgcagtacagagttgccgccgactaacagggacggcaggtcgactatgtgtatgcaaggaaaactttatagcgacaatcgacgccagtgcccatatcacctgcaagcgtgtgcctccccattataggaagcctcccttcgaatttggcaagggaggtcatcctgtggactcagaaccatcgaaacgccagagggaagatgaaggtgaaagtcgtgagcctgaaagcgactcaacagaaccggggagagatcaggaaagaagaacaccacttgaggaaagccaggaaccggaaggaagcaccccggacagtcagcagagccgaggtggttctggtagcgacagtaccgagagcgaggaacaaggaaaggagagagaggaaggaagtggacatgctggtgcgatcgctgggggagttattggaggcctgttacttctgagcgctgccggagcgggtgttgcatacatgagaaagagtgggagcggtggaggggaggagatagaatacgagaggggtatcgaggctgcagaggccagtgaagtcgaagtcctcgttgatttggatagcaaaacatgggattaa

SEQ ID NO: 73 - DNA, 1023 bp, Toxoplasma gondii
  source 1..1023: mol_type = genomic DNA
atgggaggctgggagtcaaaagatgcgtgtgagtcgggagggacagcgttttgcgggacagtcgcaaattctgctggctgcattgcgctctctaaagagttctactgtacctgcctaccgggtttccagcctgagggccggaggatgaattcgtcgtgcgttgatatcgacgaatgcgccagaggaatagggctgtgcttcagcaaaatcgagaattccgagtgtgtgaacacgccaggaagcttcgagtgcagatgtaatgaataccggacgttgaagaataatgtttgtgaagatataaacgagtgcttggacaaccgaggaggctgcgcagaacacactgattgcatcaacaacgacggagcggcagtaacctgcaggtgcttaccgggctacacggggaatgacggcaaacctggacgagcgtgcaaggatatcaacgaatgtgaagaaccggatcactgccccgagaactcggtctgcgtcaacacccctgggtcctaccggtgcgaatgcaagacgggatttgcaaaagatgctgaagggatgtgcacaggcaaagacttttgcgtcacaggagagaacggatgcgatcccaacttcgccacatgtactccggttgtgggctcctacgcctgtgcgtgcaaggatggttttcaaggcagcggcaggaagggagaatgcaaaccgcttcctggctccgaatacaaggcctgcgagctattagggctacactgtgggcggtaccaaggatgtgcatcagacaacgcaggaagctacagatgcgcagcactgactaaagtgcagcaggtgaaagttcttctgtccgagggacctggaacggaaactcccctttggctgtggtgctgtgtcgccctagctgccgtcatttttgttggcgctgttgtctacggtgttcgttattttctgaagaaatggaagaagacgaatgagtcagaagatgacgctctattgagtggatacgggtatgactacggcgcggcgcattcgttcagagggtag

SEQ ID NO: 74 - DNA, 2055 bp, Toxoplasma gondii
  source 1..2055: mol_type = genomic DNA
atgaaggccaatcgaatatggtgtttttttgcgtggcgtatggttgtgcgggcctcatttctgaaagagatggacagcattttcgtttctgctatccgacagaatgtacagcatactcattctgcccttctcgccaaactgaaggaacccccagatccagatgatgagaactcttggctttgtcgaatatcaaaaaaatatgacgcatgcggtagcagggaatattccgataagggcctcaaatggacgttctgtcccgaggatttttgctgtagcaagacggcatgtttttacggttcatgtgggagttggtgccacgacaactgggctctgtgcagctcatctataatctaccacgacgagtacagttacgggaaatgcaactgtaaacggtttcaagaaaactgtgatgtgaatgcaatttgtgtgcatgcgaacagagaggatggcggtgcgtattgtcagtgcaaggaaggatattggggtgatggtaaatcgtgcaagattgacttctgccaactgcagccgtgtggtgcagggacctgcaccaggacggatgaaggatacaagtgtgattgcccagaaactcacaagcttattgtcgttgaagacaaagagacgtgcaaggcaaaaccggacttttgcgcggaagagccttgcggaccaccctctatggttgaaaattgcgtgaacaccgatgacagctacgaatgtgtttgcaaacaggggtatgaagtgaggaacggccggtgcgaagaaattgacttatgcgcggacaagccatgtgggccagatgagggtgtgcatgagtgtgtaacagagaggcaaccgaaattaaggtacagatgcacgtgcaaggcaggattcgatttgaccaccttgcctgatggtgtttcccagaagtgcctgaagaacttttgttacgaggagccctgcggcacccgggacctagttgaaagctgtaagtcaaaggcatatggatactcgtgtttgtgtgcggcaggtgccatggttcaagtgattaacggaaaagaaaagtgcatcaaggcggacttgtgccgcaatgatccgtgtggtccagagacagcagtgattcaatgttactctcatggcaccagctataggtgtttgtgcaaagcaggctacactgaagtttttgttaacgggaagagttcatgtcaaaagggcgacccctgcactctgaacatgtgtggcggtaacgaagcggtccaggagtgcacaactgatggcacggcgtacgggtgtacctgcaagccaggctattcgatagccattaagcatggtcagaagttttgcaaccctgaagaggagtgtgcttctcattgtggctcggcagctgcagtgaaaagctgtgaaatacttgactctggcggataccagtgtacatgcaatccaggatacgtcatgagatacagcgactatgtaaaaggatgcgtcgagggaaatcagtgttctctcaatccttgtggggagcaggaagccgtgcaaaggtgcattcctgaaggtgacacgtatgattgcgagtgcaatccggggttcgtcaaaagagtcttgccggatgggaatttcatttgcgccgatccagcgagctgtgtagggaatccctgtggtagctcagatgcggtcgatgcgtgcattgccgggactagcacgtatacatgcaggtgtaaggacggatacacacctcagtcaattgggtcaaagttgcagtgtttaccagaaagcactgatcagacagatttcgattccaaacacaaaccagaggacaacaaaggtcgatattcgaaaggaacaattgcattggtggttgtggggtgtgtagccttgttgggtattatagccggaggaatttcttacgccagaaacagaggaggtgagcgcgatgatgaagacttggcaccaccacctcgttccacacgagaacggaggctctcatcaatgggcgaaggttttgagaatgcctcatgggcatcttctgtaagtatgattcctagtgcacctgctccgccaccttcgggcggtatctggtcctaa

SEQ ID NO: 75 - DNA, 903 bp, Toxoplasma gondii
  source 1..903: mol_type = genomic DNA
atgagggtttcgtttaacgtaccgcttcatcgaactggtttcgtccttgtctgcgtcattggctccctgtgctggtgtatagcacccgctcctgagtgtgtgtttccagccacgggtctcggacccgccgcttggaatcacccgggatctctcgctcagatgagggcagaatcgaagggtgtcctttctgttactggaatatgcgatagaaacccgtgtggaccccatggcaattgcatcccaaaccttagtacgtacacgtatacttgttcgtgtgaaggaggctacgtggaagcagcagtctccggtaagccaacctgccaaaggaaagatccttgtgacaccagcccctgtggaacgaaggaggcggtgaaagaatgcagacctaacgggcagtattacgcatgcatttgtcaggcaggataccaggtggtctccacgaataccggttcgaggtgccagcgaatcaaatcaacaactacaccatgttcctctcaaccgtgtggtgggccagaggcggtagaagcttgcctcgtgacgggaccgacaacatactcatgcacatgtgcatcaggctatgaaacgataacaacggagcagggagaaaggtgcgagaaaacggatccttgcttgagcaatccttgtggagcatcgaaatatgtgcagtcatgtactgctacgaataccggctacacttgcgagtgtgtaaagggagcaaagaaaacaggttccgactcagcgccgatgtgtgtcgctggcgagtcagacatgacccagtggtacgtggcggggggcatcggtggatgcctttgcctgttcgctgtggtgtatttgacctcttccaggcaatccccaaattctaacgacgctctgtatgcacacgattttgaaggaatgtattga

SEQ ID NO: 76 - DNA, 3000 bp, Toxoplasma gondii
  source 1..3000: mol_type = genomic DNA
atggtgcccttgtcgagaatggcaatggtgtcggttgcgtattttatattaggagccctggtatatgggtctgcgaatgtgtttggggagatgcaaccgcgtcaactggccaaatcatccacggatgaccctacaatccacgatgaaggccacggtgccgcagcccctagtacaccgagagctggtacggaattgatgacaccacaccctctggcttcccgtgcgaaggccgtgacgtcagcaattatacaagaatctaaaagtacacttttcaacacgggtcatgtgaccacaactgaacatgcgccaaagaatccaggtctactaggaaagcctgtgaagcaaacagaggcgcttcagcttgcgtcaccagagaagggagtgacgacaatggaacctaaggcggcctctcagcatgctgatcgtagtggaaacccagcggtgaagaagagcacatcaggtgcacagcaagctgcagcacaaagtggaaaggtcctcacgaagctgacaccaatcgagaagaaccccgcacctctacatagacagccgatgacaagggcaacacccgtcggtccaaagcctgcggatccagctggcaaggcagtaaagaaggcagccacagggataccaaagcctgcagctccaggtggcaaggcagtcaaggtgactcctgtcgcgcgaaaacctgttgcaccaaaggcagcagctccagacggcaaggcagtcaagaaggcaaccgtagtcgtgccaaagcctgcagctcccagtggcaaggcagtgaagaagccggttgtcagcgtgccaaagcctgcaacactcggtggcaaggcagtgaagaagccagctgccggcgtgccaaagcccgcagctcccgatggcaaggcggtgagaaagccagttgtcggcgtgccaaagcccgcagctcccgatggtaaggcggcgaaaaagccagcgtccggcgtgccaaagcctgcggatccagctggcaaggcagtaaagaaggcagccacagggataccaaagcctgcagctccaggtggcaaggcagtcaaggtgactcctgtcgcgcgaaaacctgttgcaccaaaggcagcagctccagacggcaaggcagtcaagaaggcaaccgtagtcgtgccaaagcctgcagctcccagtggcaaggcagtgaagaagccagttgtcagcgtgccaaagcctgcaacgctcgatggcaaggcggtgagaaagccagttgtcggcgtgccaaagcccgcagctcccgatggtaaggcggtgaaaaagccagttgtcggcgtgccaaagcctgcagctccagatgacacgggaatcaacaaggcgacccttgtcacgcggaaacctgaggctccagacgtgaaggtagtcaagaaggcaaccgtagtcgtgccaaaacctgaagcgccagatataaaggtaatgacggatcagaccccaacgacgcctccctctccgcctgtacgagcaagggcagcgtcggcgacgacaatagtaacagctcctgctccagtgccaacccggcctgtgctgacaacaacatccacggcagcaacagttaccacaattaaaacagagactccacgagcagcctcgaggctccagcaagatctgaacgctttctgcaccacgcagttccaaaagctgtgctcggagactatcgatgggggccggtattgcggagtcagcggcgctgtagcaaggttcggtccaggagggcatgattccgactcccaatggaggtgttacgaagagtctatcatgaacacgactaccaagggcgtccagtgcatggacgattgtgggaaccagatgcagtgcgttggcgctgtttccgtgaagacagttgccacaccgccccttagagctctctccgccttcatcagtcagcggcgatggatatactgcagttctttccagcgatctgcagatgcactgtgcaacttcaagcgtacaggaaacgttgcgcggtatgaccctggcaggactcggtggatgtgttttaatccggtcgacatatctcttgaaggccagtcctactgtgcaaacaattgcggaggcttcacgccgtgtgctgggggcctatcgcctggagaaatcccaactcgcaccgtatacatcattcagcagtcggacacagctgaggcgttcgcggctcttcatccgtgcagacatgatgaaatttgcattccgtcgacggtgtacccccccgcttgcgtgaaggcacacaaaataattgccattcaacaactgagcaagcagcaagaagccatggataattactgccagactgaaatggatcagatgtgccgagtagggaaatggacgacatactgctaccagctttggttgtcgcggatggtctccactgaagaggatgaagaaccaaagtggcggtgttatccgttcgcgcttctcaatttctcggacctctctacctgtatcgatggatgcagcaacagggtcccgtgtcacggagctccgtcaccaacatctacgttgactacagagttctcgaagttgaagacaattgccgagaacattgcgttttgttcgccgtttcagaaggctgccaatgaccactgcaataagagatacggcgaaggatgggtggccagacaagacgtgacaacggatgattgggcgtgctttcagacgacaaagcttcccacgtatcggtggacaggatgcgtcgacaactgtggcaacacctctttgtgtgctgccggcgtgccagagcaacttcattcagctgctgcagaagcttttgtccacccagatcctgcattggagcgggtggttgagtcagtgccatccccgtgtctgacaggggagtcgtgtacaccgacagcgatgaatcctccttactgctctgaaaccaggccgaacccgcaaccggctcctctacgagaccacacaattcgcaacgcgctagactgcagtaaaggagcacctctggcccggcgaaatcctaccagtaaatag

SEQ ID NO: 77 - DNA, 1827 bp, Toxoplasma gondii
  source 1..1827: mol_type = genomic DNA
atgtatcctatagcaccatctttcgcgatggtgggttcggtgggttccattcggcgcacaagccgatgccccagtaagacggccagctgtttcagattgtatgtcttccccctggtgcctcctaccaatatggcgaaagccaaaacagtaggagtgcgcctgattggcgtgaccacatgtgtcgcttttgcggcgtccctgcaagttgctgttactggtgcactcggggctggtccggcgtaccgggtggcacaacgcccgggttccttacacttcgctcggatgcatgatcgttttgtcaacaaggaccgagaagccgaagagcacaaggttgcagctctggagcgtaacacaactcctgaaaatatatcttctcaaatggatagtaacaagacaacggcaccgtctccagagccaggaacatcgaagcgggcacaactcaaaacgactagcgcggcatcggcgaccagacccctcgtctcccaactccaaaaggatgtggattactactgcgctaaaagatttgagcagcagtgcgccaagggagtgttggggaagacgtactgtacagatggtctagtggttgggcggtatgtttcacaaggaagcaaattagaagcgggctggcactgctttaaaggggcggaaattgcccacagtcaaagacaggtgaagtgtgtggacaactgcgggaacctgatgaaatgctttggggacgtgaattcatcacagaccgcgaaggttgccatgcccgggatggatgaatggattgacaaacggaagtggacgtactgttcaccatatcaacaagcagcagatgccctctgcaacctgaagcatcatggagacgtcgccagatacgaccatgtccggcagaggtggatgtgccttgacctgaacgatgtcgctttggatgggattagctactgtgccgacaactgtggcggaccaacgtcgtgtgtaggaggcttgttgccaggggaacttccacagcggagtgtgcgcattgtccggcatcgggacatggagtcagcatttgaagctatacagccgtgtccaaatgctggtgacatctgcgtggccagcacggtgaatcctcccgcgtgcctaccacaggtgcagacattagtacttcagagacttccagcgcagcaacgggctctggacacaatgtgccaagatgctatggacgaggaatgcagaaaaggcaagcaaacggaagactgctttggattgtggttggctcgttacgaactcgagagcagcccgggaggagcaggagcgtggaggtgttacccggagtcccgactagacttcacccaattgtccagttgcatcgatgggtgcggcaatccaatatcttgtcgtggacagccagcagaagtgtcgccagcattcatcgacctccctgcgctcgacaaggtggctggcgacatgagttattgttccgcgtaccagagggcagggaatgcctactgtgcgcagaaacacggtccccgctgggtagcaaggcaaaattgcaacacgtacaagtgggcctgcttcaatttggacaacttacctccgaatggctgggtagggtgcgcgggtcactgcggagaattcatttggtgccccagcgctggaacaggggatgcagtgagcgactctgtacaagatgaagatctggaaagcgtgatcctcgccgtgccagatccgtgtttagctggggagaagtgtgagccgaccgcacaagagccagcttactgttcagtatcaagaccaaatcctcatgcgaaggtgaagaagttatcggtattcgaggatcgaaggctacggggatactga

SEQ ID NO: 78 - DNA, 1965 bp, Toxoplasma gondii
  source 1..1965: mol_type = genomic DNA
atgaagctcgaatgcttcggtctcgctgctctgtcggcagcgctttttgctggcaaggcagaagccgtcgctgcgaattgcttcaaggccgacacagattacttcgggtacgacgtggataagattttcgtgggcgctgcaactgagtctgcagagaagtgccaagaagcatgcagaaaccgcgaagactgtttctacttcacatacattccagagcggaagcagtgctacttgaaggacaaccaggctcctaacgggactgtcacaaacccgctggcgatctctggaccgaagttttgctatccgactgggacctgctttgagtacatgaccgactacgtggggtacgacgtgcagaagatcgaggatcagtcggtgtctcaggcagacgactgtcagcgactgtgtgcatcgaacgaccagtgtttcttctggacgttcattccctctaaacacaactgctacctgaagcacaatggcgcaactgtcggccgcaccccgcacagcgaagctatttcgggtccaaagtcttgcactggaggatcgccaaacgaccaaggcgtgccttgctacgagcctgacacggattacttcggctacgacatcaaaattttcgataacaaccttgtgggcaccgcagccgagtgctacggcctctgcctctcgttcgccgaatgcaagttctggacgtgggtgcctgcgctgcggaactgctacttgaagagtgagtatgcgccgctcggtcgcgtccatgcccctggcaccatcagtggcccccgcgactgcaacggatcgaatctcccccccttcgtaccccctcctccgatctatccgcctactcatccccacccgccaccctctccgtacccaccgtaccctggccacacaagcactacgacgcctgctacacctcctgcagagtcctgctacaaagctcacgtcgacttccccaccggaacgctgaaacaaatcgtcacggacgacgcctacgcctgccagaaactctgccaggccgaagccgcgtgcttcttcttcacctacaaggcagacatcttggagtgcgctctgaagggcagtttcgccgcgaacgcccctatccccaggagacacgccctgtccgggtcgaagtactgcgctgacaagatgccccctgagttccagccgctgcacaaccacgttccaacccctccgctgccgccccatcacgctattcctccagcttatccgggacctaacccaatgccggttcccccgacccccggcttcgagccgtcgtgcgccgagctgaacgtggagtatgtcagtgacattctgagcgttcttggagcagactcgccaaaggaatgccaaaccctctgcaagctgacagcgtcctgcaacttctttacctaccgctcggatctgtacaggtgctacttgagcaagagcaagggcactccctccagtcgcctgaacgcggtggctggaccgaaggagtgcccaggcgagggctctgccgtgccgccgactgcgtcgacgtgtttcctgcaaaacaagatgtttgtcgggacccctctgagctccatagaggccaagagcgcagagcagtgccaggcgaaatgcgcaggcgatccgcagtgctactacttctccttccaggtcatgtcctcgaactgccaccttttccgacaggtcaacggcgccaaggaagaagggacctgcgtgtcggggccgaagacctgcgccgacaaacccacggacccgtgcttcaaggaggggttctactttggacaggttctcaagagacataacgccgtcgccagcgccaaggagtgtcagacgctgtgcgcgacctttccacactcgtgcgtcggcttcacctacgagtccgcttcccagaaatgcttcttgatgtcccaaaccgacggcctggaactcagcgacgggttcgtctctggcttgaggcagtgccccgcgactccgtaa

SEQ ID NO: 79 - DNA, 1413 bp, Toxoplasma gondii
  source 1..1413: mol_type = genomic DNA
atgagccacgaaaacgccttccatccttcgagaatgcagagcttctctttgcgatgccgcccgtcgtcactctaccacgcggccgggtctgacgaggaacccgctgcagtgtcaacgccagctgcaggtcggacctccggagttgtccaagcagtccaacgccgtgaagggaaggcattcgcggctgggcagcctgtcagatgccgagctctgctgactcggcgaagttcgcgtttacttttggctggacggttgcatttacgcagtcatcatgccttgacttcgattgccgcagtcttcctcatgttcgccgcgtactgtccgtctcacattgacgacttgggtaagtcagggatgttttctgcgaaatgggcagatgcgttcaaacttcactcctccaatacagagagtgcacttcttcagacgcactcgcacttgatgaaaaccgaccctatcttgccttcggggtcggagtggatttgccgagaagcgtacaacgacgaaggctgcggtacgggccacaacgcctcgctcggcactacggaagcgtactgtcaggaagaggactgctgtctggcttccacagaaaagtgcacacggattccggggttgtgcgccgttgacagcttcctcctgtctcagtacagctggggaaagtgcaactcgtctcagtgtgcgcgctgcggtccgaacgcgacttgcggctacatcgcgagcacgacaaccgttcgaggaggtgtctactgcacctgcaagtctcccttcgtggggacgggcgcctcatgtgtggtcgaggcatgcaaggtgcgcaacccgtgtggccagggaacttgcgtcccgacctcggaggcgggcaagagctacaagtgcgactgcaagccagggtacaccgaagtgtcgactggcacttccttctcgacatgcgtggacatctgcaagcaatacggctgcgggtcagaaggcgtccagacgtgcatcgggggcatcgactcgcacaagtgcgtctgcaaacagggctaccgcttgagcgaagatactgcgcgccagcggtgcgtgaaaaacgacccgtgcaccatcaatccttgtggcccttcctcggcagtggaaaagtgcgagtctcaagaaaacgggatcgagtacaagtgcacctgcaaggtcggtcacgtcgtccggtacgtcaacggcacacaagtctgtcttgaagaggggaaaccgtgcagccctccagcctgctctgtggatccgcctgccaccactgctacctcgacttcgaaacccacgaaccagagcagcggaaatgacggcgaaggggtaaacgccggcgcaattgctggcggggtcattgggggcgtcgtcggcatcgggatctgtggcgctggggcgtttttcttcatgaaaaagtcgcaacactga

SEQ ID NO: 80 - DNA, 2154 bp, Toxoplasma gondii
  source 1..2154: mol_type = genomic DNA
atgtgtctcctttcctccctcttctccccttcttccgtctctgcctcccttgtttctgtctctccgttcctccgtagtctcttgccgcagtctttcgtctgtctcctctcttaccccgctctggacctcatccactccgtctctgcttctgaactggacaccgctctggtctccgtcccgacatcgaaggctgtgtccttcacagagtttgacatccagcagccgccgtccgacaactcctggctctgccgcttctccttctgggatggaccctgcgtcgatcgacaacacaacggcataggtccctggcgcttctgtcccagtgggagttgctgcagcaaggtcaagtgcgcgtacggttcctgtggaggttcctggtgtgcggcctggaacagcgggctctgtgtgttccataacggggactacgagagcgacaggtgcacatgcgagaagtacggcgggcagtgctcgaagaacggcagctgcaagcgtttggacactccggagggaggcgccttctgctactgcaatccggggtacgttggtgacggtcgcacatgcgagagcgacccttgctacgggtctccttgcgccccagggacctgttcgcgcatgggcaactcctacgtttgtggctgtccaccaggctacacgcaagatacgtcgcgcggtcacgcccggtgcgttgagaaggccgacagctgccgcgcgcagccgtgtgggtccgacaccgttgcgtacgactgcgtcagcttcgactccggcgcctatgaatgcatctgcaaggacggatatgcgtcgaacgggaccaagtgcgaaaagcaggactggtgcaaggacaacccatgtggagacgcgaacgcggtgtatgactgcatctcacacgagacgggatacacgtgtcagtgccaaaagggatacatccaggtggtgacggacgagggccagcagaaatgcgccaaaaatccgtgctcgtacgacccctgcggcacctcagacctggtgaaggagtgcatcaacaaaagcgacggaacgtacggctgcgtctgtgcagacatcgcggagatcaccacacacgaggaaagcaaccaaatcacgtgcgctcggaaggatccctgcttggggaatccttgcggcgccgcggaggccgtccagcagtgcttcgtcgacggaccaacgtacggatgtgtctgtgcgtcggggtacacggtggtgcctgacgcaactggagcgaaaaagtgcgttttcggggatccgtgccagctgggaagttgcgggccggacgaggcagtcgacagttgctcaacgaatggccaggcgtacacatgtcagtgcacgccagaggcgattctgtcgacgagtgcgaacggcatccagagctgcgtgatgcgcgacgagtgcgaagagaactgcggggcgacggaaggcgtcacgcgctgtgaaaagatatcggaaaacaagtgggattgcctgtgcaaggcggggtacatgctcaagtacgtgaaggggaagaaaatgtgtcacaaagcagatgcctgttcggtgaatccgtgtggaacggcgcaagccgtcgcggattgccaggtggacgtcggcggcgacggctacacctgcgtctgcaactcgggctacgaactgcggactcagtctgacaacacacagctctgtgcgccgcccaacagctgcattggtgacccctgcggcaaggccgaagcggtgtcgatgtgccttccaaccaaagacgggtacacatgcaaatgcaacgcaaactacactctccagacaatgtacgggaaaccccggtgcgtccccggtccgtccagctacgacagcgatgaggaggaaacgagctcttcgagcagcacgacctcggaagaggaagggacgtccaccgtcatgattgccggctgcgttgtcggcggcgtcgtgctcttgggcgctgttgcctacatgggccgaaggggaaacgacgaggaggaagacgaacagccgcgaccgcctgcgggcggaccgcagggaccttacatgggccagcaagggtacggccagggacaaaacttgatgcctccaggcatggatccggccatgggtcgcaacagcatgatggctcgacagcagtatgccatggacactcgcaactcgttctggggttaa

SEQ ID NO: 81 - DNA, 2280 bp, Toxoplasma gondii
  source 1..2280: mol_type = genomic DNA
atggcgggtccgtaccgatattctgggctagatcgcttttccctgccgtgtctctctccagcgtcagcgcttcgcgtggtgggaagcagcgagacgaaggctcatttggtcaagatgcgcggcgcaagagacgctttgctgagcttgagccgaatttcccttctggccgcactggctggcctagcttgctgtcgcgccatggtcgttctgtcctcggcgtttgcgacgaccgtcgtggaaaaacaccctggtagccttcatccggaatccggggaagcccctgctacagcctcttcactggttcaaatcgaggcagcgcagcacaccagtctggtctccagtgccgctgcccgtactgtttttcagcctccgtcagaggagtcgtggctgtgtcgtctctcgacaaacaatgggccctgttcgaaaaactcatcagatcccgagatcgggcagtggcggttctgcccgccagggcgctgctgtagcatgtcaaagtgtgggcctgcaggctgttccataggctggtgtgaggggtggggcaacccattgtgctggatcaaggacgacacctacagcgacggcaagtgcacctgcgaaaagtacagagaccggtgctctcccaacgccgactgcctcgaatataacgtcgaacgagggggcgcgtactgcgtctgcaaagacggatactacggagatgggaaagtatgtgagtttgacccatgcagcggcaacccctgcaatccgggtagttgccggcgacatggaacgtcatactcgtgcgcgtgcccggacacatatgcggttaccagcacaagcagtggagagcgctgtgaagtcaagaggaatttctgtctcggcgaaccctgtggctcgtcagaagttgccgctgattgcgtcagcttcgacagcggggaatacgaatgcatctgcaagagttcctacgtttcagacggcaagggctgcgtgaagttcgatccgtgtgagtacaatccctgtggcacctccgaggccgttaaatcgtgcacccacgtgaacggcgatgaatacaagtgtgagtgtcatgaagggtacaatctaacgaacgactcggacgggaacatggtctgtgcaaaagacccgtgttacgggaacccttgcggtctcccccacttggttgcctcctgcgctcgacggacgccggattcaaccagttccgcgacctacacgtgcctgtgtacggctgctggccacctgcaagtcgatccggtcaccggggcccaatcgtgtactcaaggagatccgtgtgcttcgaatccatgtggctcggatgccgtagttgatttctgtatcagcgaagacgatacctacaggtgtgtatgcaaaacgggctacgcatccgtggagattaacggtagaaaacagtgcaaacgcggagacccttgtgagctgaaggtctgcggtgaagatcacctggtggaaagctgctccacaaacaacaaattgtattcgtgtgattgtacgtcccttgctatcaaggggctcaacgatgaaaaaaagcctgtttgtatcagtcgagaagaatgcgagagtgtctgcgggcctctgaaaggcgtcaagcagtgcaaccagaagatgggggtgctggagtgcgtgtgtgacatgggctacatcctgtccacacagaacggaaaaaaacagtgtgttcagggggatgcatgtctgaatcagccgtgtggaacaccagagtcgacgttagcatgcacagcgaacggcagtcattactcatgttcgtgcaatgaaggctatgaacttcgaatgcggccagatggcactcaagtttgtgctagtgcaggtgattgcactggatccccttgtggagccagcacgagcatcggcgtttgcaccccgggggtggacagctacacatgtacgtgtgtctccccattcgagttacagcagacagcagatggaaagcccacgtgcggtgaagctttcacgacaacaacaactcaagccgtaaaagatgatagcgggagcgacaactcatcttacactggactggcaacgggagccgtgatcatggttcttgcccttggtgctgcattgtggttctcgaattctcaagaagaacaaactatggggtccggtgggatgggaggaatggatgacccaatgcaaggcccaatgggcccgatgggaatggggggcccgatgggacctggaggccccatgggtccaatgggccctcctggtcctcgtcagtcgtatgcggcgtacccgtcaggctcaatgtggtcataa

SEQ ID NO: 82 - DNA, 1056 bp, Toxoplasma gondii
  source 1..1056: mol_type = genomic DNA
atggacgcgctgaagactgtgttcaaccggagaatcgctctccccgttgttgttgcagcggcgttgctccataatagtgccgaggccctgcaatctccagggctccggagacagctagtcaacgcccactctttcgctgaggtggagtcgacaggatacagctgcctcgaaaaaggcaaggagtacgttggtttcagcctgactgagttcaccgaagtgggtgacgctgctttgtgccagcagaggtgcaatcaacacccgcagtgtggcttcttcacattctattccaatgggaaccgatgcgtgctccagtcccgcaagccttctcaggagaagaacaatgccaatgccgtttctggcccgaaacggtgcccgctttgcctcgttgattcctttgatttcagaggcgagaaaaacatgcacgataatggggttcccggtatcaaaacagtcgtcgagtgtcaaatggggtgcgcagcggagcccaaatgcaaaggcttccttttccaacacaagaccaagcagtgtcacttcaaaacaagtgataactatttgaaatcgctccatccggacaatgagtatgtcgcaggtccgaaaacgtgtacgggtgaacactggtgcatcatgaaggatattggctacgaagccatgtacacgagacggtcccaaacaaactcagcggaagagtgccaaaataagtgcctcaacgacgagcagtgccagtatttcacctggcaagtgtcgaacaagcattgttggttgaaacatggacctaccattgccaactccaaatacaaccgtcaaggcgaccattcagcaccaaaacactgcggcctgccgaccacatgtgtcaaggagcggaccaagtacgcgggcgaaaccgttgcgacgttccccaagagcgaggtggggaccttcgagtcctgccaaatgaagtgctggaagaccagcaagtgtgtgtttatgcacttcaacaatgatggctgcacgctctctgggatcaatgcaaccgctcaaactgatgcgaactccaaagcaggcgatatcacatgctga

SEQ ID NO: 83 - DNA, 1224 bp, Toxoplasma gondii
  source 1..1224: mol_type = genomic DNA
atgaagacgcgctctttcaaccaggctgaactgaaacgtgaaagagttgacgtgagaaaatgcgaaaaaaacgacacagtatcctgcgctggtgtgtcgttttgcagcgagggcctagaactccgacggcaggatatggacatgacgccatttgttgaagacaacgccgaggctcatgtctgttatgagccagacgtggagtatgtggaccacaccaacttggcaatcgaaggaggtcacgttcactctccgtcatcatgccaagatttatgccagcgctaccaagactgctacttttggacgtggaactcagttaagaaggactgctacttaaagaactccacagcgcttttcagccggcagaagaattacgacacacgaaataaaattagcggaccaaaatggtgtatgatgccgcatcctctgcggtgctacgaagtcgacgtctcttatgaaggatacgacatcatcaaaaatcccctaacgaacatccggagtgttcttgactgccaccgagcctgcgttgaattggaagactgccgctactggacatggactgcggattcgatggagtgtcaactgaagagtgcgaacgctctccgggcctggcgccgatcgttcgacaccatcgggaaaatctcaggaatgaagaactgcggcgtctgcacggaactcggtacggactactacgggcatgacgtacgacgcgtggagacgaagagcattgtcagttcagagcagtgccgggacttgtgtatcaaggacgccaattgcttcttttggacatgggcgtcggactggaaaaactgctacctgaaagggcccgacgcgttggaagcgtggcgccgggataattcgacgcgatctcttgtctccgggtcgaagttctgccccatggaccgtgaccttcgtcttgcttctctatcgcaaagcccgttcatgtatcctgccttctatattcataacccccctccatgctatgagatcggagtcgattacgctggacacgacctcgagacagtcgatgatgagaaagtgctctctgtccaggactgccagcagcaatgccaaacacgggagggctgcgtctactttactttcgacacagttagcaaagtttgctacctgaagggtgggggggcgctccacgactggacgaagaacgagactacggagaagttgatctcggggccgaaggactgctcctgctccgggcttcattag

SEQ ID NO: 84 - DNA, 3486 bp, Toxoplasma gondii
  source 1..3486: mol_type = genomic DNA
atgtttgtcgttgatttgagcctgtcaggcaacatgaggtcactcacacatggcaagagcatccatcgctctagcatcgttgttgtgacgcactgtagtcacagactctccctatcccctttaaatcgtcccgcgttatttccatcacattctgacaggtacactgttccctggcgttgtcggccttcgtcttggcgtttatggatcacgttcgtttgtctgtcaacattgcacatgttcggtctctccagcgctgtcaaaagggatggggaagttcctactgcaaatctgagagcctctctcagtcccgatagcagcaaagagaacgcgatgctgcttagtgctataggaggcatagggcctactgaatcaagacttcagcatataccgttcagcacgacacgttatcttcctatccgtagccatgttttgcagtctactgttgagagaattgaatcccccgaggctctcaatgaggttccgacaaaggtagaaagaaatgagttcactgaaaaaggagacaagacagagcaggtcctcaccgcccaagccgaccataaatctctgctggagggcagatcggaatcaacttcgactgcgccagatgacgatttcgattttttatttgaagatgacacacctaagaaacccaagagcagagtgaataaagggacgtcctccgatgaaacgagtccaggagacagaagttctggggaaggtagttccgactcagacagtctactgtctgttgtgcacagaacaaagggcaacgcaacgcaggcgaacaagaatcaaacgcgtattactcatccgaagagcaaagcacagcatcagaagaaggtcacaaagaaacaaggtataccaggatcagacagtttgggaacctcttcagccgattttgattttgacatcgacagttcctcaaacacgcaggctgacgactcacagcggcagtcgttaggggattcatccgctttggatcttttcggcagtgacacgggagacacgggagatatctttggcttctcgaattcttctagtgatggtggaaacgctgctgccaacgatggaggcctattctcgtcctcgggcatgggacctaccggcgcctcagatgagacctcggcaaaccctctaggctcgatactgggtggcgtgttaaacccatttgcgcaacagcagtcgattactcccatgacggataaggctgacgaatggtcaaaggaaaatatgaaggctttcgaagagaaaatgccaaagaaaatgcgagacgatggcagtccagatagttggtacaagcaagccgttccacaagagagtgtggcagatctcaacaggatgcgagaaaaccgtcgcatcgccgaagaaaaccgggcggcggcgccgctctcagctgtatacactaaggcaacgaagacggttcctgctattaactacctcggcgcgggttatgaccacgtcagaggcaatccggtcggcgacccgagttctatgggagaccccgggatccggcccccggtgcttcgttttacttacgcccaaaacgaagatggtgtctcgaatgacttgactgttttgcagcctcttgggggttatgttaggcaatacgttgcgtgcaggcaaagcgagaccatcagcgaactgtcaaacctcagtgactaccaaaatgagctttctgtggatgcatcacttcaagggggagacccgataggcttaaacagtttttctgcctcaactggatacagggattttgccaaagaagtctcaaagaaggacaccaggacgtatatgctgaaaaactactgcatgcgatacgaagctggtgtcgcacaaagcaaccacttcaagtggaacgtaacaatagcgttcgcggcgggcgtcagccagttaccagatgtctttgatgcgcataacccggaatgtgcctgctcagcagagcagtggcgtcaggatcaaaatgcggaggcatgtacaaaaacgaacgttcccatctggataagtttcatcgaacagttcggcactcacttcctcgttcgcttgtttgccggtggaaaaatgacgtatcaagtgacagcgaagcggtcggaagtggagaaaatgaggaacatgggaatcgacgtgaagacgcagttaaagatgcaactgggtggcgtcagcggaggggcgggtcagggaacctcaagcaagaaaaatcaaagttcgtcagagtatcagatgaatgtgcagaaagagacacttgtgattggcgggcgcccgcctgggaatgtgtctgatcccgctgccttggcggcttgggctgataccgttgaagaacttccaatgcccgtcaagttcgaagttcagccactgtaccacctgctccctgttgagaagcaggaagcattcaagcaagctgtcacattctattcgaagtctgtggggttgacaccgcaggatctcagtgctctcacgggtgtaacccgcaatctcccaaaacagctaacccaagcgacccaggtggcatggtcggggccacctccaggatttgccaagtgcccagagggccaagttgtcatacttggctttgccatgcacctaaactttaaggaacctggaaccgacaactttcgcatcatttcgtgccctcccggaagagagaaatgtgatggagttggtactgctagtagcgagactgacgagggccgtatttacattctctgcggagaggagccgattaacgaaatccaacaagttgtggccgagtcgcctgctcacgccggcgcgtctgtcctcgaagcctcttgtcctgatgagaccgtcgtcgtgggtggctttggaatatctgttcgaggtggcagtgatgggctggacagcttctctatagagtcttgcacaacaggtcaaaccatttgcacgaaggcgccaacacgtgggtcggagaagaattttctgtggatgatgtgcgtcgataaacagtatcctggacttcgagaattggttaacgtggcggagcttggttcacatgggaacgcgaacaaacgcgctgtgaattcagatggaaatgtggacgtgaagtgcccggcaaattcttccattgtccttggttatgttatggaagcgcacacgaacctgcagtttgtacgcgacaaattcctacaatgtcccgaaaacgccagtgagtgcaagatgaccggaaaaggtgtggaccatggaatgctgtggctgtttgatcggcacgccctctttggctggattatctgcaaaacggtgaacgagccggctatgcatgtagcaacggacgtgggcaaggcgaaggggaacggcaaaaagagaaagggaaagaagggtaagaataagactaatgcgcctaacgaagtcgaggaagggcagcagctgggcgcggattcaccgagccaagtctctgtaccagccgatgctgattcagggccgacgtccaagactatgtcgagtctcaagcttgcgcccgtcaagctgttagacctgtaa

SEQ ID NO: 85 - DNA, 1056 bp, Toxoplasma gondii
  source 1..1056: mol_type = genomic DNA
atggacgcgttgaaaactttattgaacaagggaatcacactcgccgtcgttgttgcagcggtgttgctgcagattcgtgcggtggcgcttcaatctccagggctccgaaaccaggtagtcaacgcccactctttcgctgaggtggagacgacaggatatagctgccttgaaaaagacaaggaatacgttggtttcagcctgactgagttcaccgaagtgggcgacgctggcttgtgccagcagaggtgcaatcaacacccgcactgcagcttcttcacattctattccaatgggaaccgatgcgtgctccagtcccgcaagccttctcaggagaagaacaatgccgatgccgtttctggcccgaaacggtgcccgctttgcctcgttgataactatgatttcagaggcgaggcaaacgtgcatcataaaggtgctcccggtctcaatacactcctggagtgtcaacagggatgtgcagcagagcccagatgcaaaggcttcctcttcgagaagcgtccccgcacgtgtcacttcaaaacaaatgataactatttgaaagcgctcgatccggatacttcatatatcgcaggtccgaaaacgtgtacggatgaacactggtgcatcatgaaggatattggctacaggggcacagactcgaaggagacaagagcaaactcagcggcagagtgccagcagatgtgcctcaacgacgagagatgtgactttttcacgtggcaacaggcgggcaagtattgttggtttaaggctggggcgtccactgcctcaacaaaatacaatcgggctggcgactattctgcaccaaaacactgcggcctgccgaccacatgtgtcaaggagcggaccaagtacgcgggcgaaaccgttgcgacgttccccaagagcgaggtggggaccttcgagtcctgccaaatgaagtgctggaagaccagcaagtgtgtgtttatgcacttcaacaatgatggctgcacgctctctgggatcaatgcaaccgctcaaactgatgcgaactccaaagcaggcgatatcacatgctga

SEQ ID NO: 86 - DNA, 882 bp, Toxoplasma gondii
  source 1..882: mol_type = genomic DNA
atggcgcgggtccgaacactcgcagacctccgcacagaggacgaggcggacgagcacacgcccctctataacgctgaaacaggcagtcgggactccgattcaacgagcagtgggggtgcagcgccccggtcgatgcctattcgctttctcgagctcctcttccctcatttctccctcagaagcgtcgttcttgcaatcagcattgtcgactggattttctacattgttactgtgtgcttagatacagagctaccgctgatcccagccgcaaatattttggtgcactttggggccaactatccgcctctgataaagcagggtcaggtatggcgcctgctccttcccgtctttctgcacgcaaattttttccacgttttcttcaatgtcttctttcaactccgcatggggttcaccatcgagcgacgctacggcctgctcaagtttactggtctctatttcgcatcggcaatctacgggaatctgctctcggccaccgcgttcttctgcaactctctcaaagttggagccagtacggcaggcttcggtttgatcgggattcaaatttgcgagatggcgctgacgtggcatcgcatgcgacatcgcgaccgcatgctgacgaacatggtgtcctttgtgctcctgatggtacttctcatgttcactctcaatggaggtagcatcgaccagatgggccatcttggaggtcttctctgtggcttctctatcggcatgttgtataacaaggaattgaacgataagcctgtgtggtacccctgggcgtctgcagccgcgatcggcattttacttgccttgccagcagcgtgcttcccaattctctatgctgttgatcgccattgccacagggatttgtcctacatttag

SEQ ID NO: 87 - DNA, 1605 bp, Toxoplasma gondii
  source 1..1605: mol_type = genomic DNA
atggaggtttcaagaagtcaccggtggcctcttggctcttcaccacactcttcatctcccgctctctgttggtcgtgcgtttcgcgtttctcgcgctccatctgcaggagaggcggccggtttccccctctctatttctcccgttcttccttccttcttcgcgttcttccccttgtattatactccctggtctcaggtccgtcccctgtttctctctctttctctccatctgccttttcctgtttctcgcctccgttccctctcactgtcgccgctgagagcccctcggatgccgctggcgacgcttcgtcttcgttgcccgacggcgagcctcttgactcaacgagtgagactgcggcgagcgagtcggaaaaacgttcagaggacaaaacgcagctcacggaagagcagatgaaggagaaagcaagaaaagcggccgaagcggctgcagctgctaccgcgaaggcgctggaactcggcgtctctgtgccgcctctggtcacggcgtcggcgggcggatctgatattctttcgacgcactcggcagcatccgacgccgctgacgcagctgaccgcacagcatctggttttgctgcggatcctgacaaatccgcagtcgtgagagcggacgacatgcgttatcagagcaatccagaaaactcaacggacggagagcacgcaagctccgaagaggaggaaaaaccgattcctgtcgatgggggagactgcatcatctttgctgcggaagaaggcgacagagacagctgctcttgcccagaggggttcgttctgtgcaactggcaagatgtccagatgattcagaggcgcctcgcacgcatcgagagggcagccagagctgcggcagttcgtgtgcttcttctgcatctggacaaattgccagcagaggaactggaaacggctccagcctccaggtccccttccgcaaaggagagcaactctgcgtctgaagccgacgccaaagtgggcggcgaactacggggaagctcgagcgcttctggagaccaagcgacggacgactcgcgaaaagaggaaggcgcgacagacgaggcggagacgcgtctcgaggcgatgctgccgacggacttggccgagttcgtgaaacagactgcaaaggcagccatgagcctccatgcgccgggctgggtaaaaactttgtgtgacgacgacgcgagaacaggattcaaatcctacggagtccagatcgattacgaagtcgaagcgatctgcaaggatgaaggaacgaaggatgcgcctgctgtcgacttcatctacgagctcaacacctacgtgcctctttctcgtcttcgcaagctccaggagaaggacagcagctggacgcctcggcactgcttagttgcagacttctacttgtgcaagcggctccctcacaagaggaagaaagtgaactgcgagatgtccggctggagtgagtggtcgccggagtgcgtcaacgggacgcaaatgcggaaaaaccgaattactcggagcggacagcatggcggccgcgcgtgcgtctgggacgggaagcaacctgtccacgcggaggtgacggagctccgatcttgcaatcagccttcgtcttaa

SEQ ID NO: 88 - DNA, 2286 bp, Toxoplasma gondii
  source 1..2286: mol_type = genomic DNA
atggggtcatctcatgccattgtcgcgtgtgctgccttgatcgtgttgttatccaccaacgcgagaggactcagggtgcggaaagacaaagacgtactgttggcaacgagttttctttcccaccatggagaatatcagaatcccactggcacatataaccttatcaaggagattcggagggtggaagcggaaatcgaagatgaggttgaaacactaaacagagacagaaggctgcatcgtgggcacaacaaatatgccgatgacgacatccgacaggggctaaagggcgagcaagatatgggcgcttcagaaaatattcccgttgcggagctcgaaccacaggatttagatcgggaggcgaagtatcctgtgcggatgttgattgtggacaagcgttctgatgatgatgatgaagagaccaaaacctcgtttgtggagacggcgctacattcggatcttgcgcaacgcgttgtaaaggagctgaacgggcatgtggacgtccttagagaaagtggcgtggttttagtggatcttccagcacaaaccaccgacaaacaactgcaggaattgatcgaaaccgccagggcacaaggcaccatagtagagccggatcacttggttcaaagtgtcaatacatcgtcgaaaggatcaaatgacccacttctggatcgtctctggggaatggatgcgttgaacgtgaaagaggcttgggacatcatcactaccggcgagcctaatatggggggtcggaggccactagtttgtgtgttagatactggcatcgattataatcatccagacttacgggacaacatggaagtgaaccaggcagagagggacggcacgcttggagttgacgacgacaataacggtgaggttgacgacatctacggggccaacatgctcagcaaggaaaacgaccctgcggatgatcactctcacggcactcatgttgccggaaccatcggtgctcacggaaacaacggtataggagttgctggtgttgcatgggcgccccgtctgcttccgtgcaaattcctcgcctatacaggaagaggatacagctcggatgcagtccgctgcatcgactactgcgtcaaaaggggtgctgatattgttaaccatagctggggaggttcatggccaagtgaagcgcttcgtgaagcggtggtgcggacggcgaacaacggtctcattcacatcttcgcagcaggaaatgacggagtagatatcgaccagacggccttttatccagccgcattctcgactgaagcggacgggctgatcacagttgctaatgtgaaaggagatccagaccatggagggaaacgtataattgaactggatcgttctagtaactatggaatacagcgcgtccaggtcgcctgtccagggatgtggattttatctactgtccctaccagcggttcttcgcaagagccctatgcggagaagagcgggacatcaatggctgctcccgctctcagcggcatcgttgctttaatgctcgcggtgaatcctggactgagtacgcgacaggtcagagagggtttacgacagtgctccgtccagcagccccttttgcaaggcaaagtagaatggggcagtatgcctgatgctaaacgctgcgtcgagtatgcgctgacaactcacgcagaaggtcggcacaagtctttcataagggaaccctcaaccgagacttcgacacccccacctcctccaccagcacagcctacaccccagccgcagccacatcctcctcctcaacccgagactccaccatgcgcgccttcaccaccgccgccgaccccaccatgcgcgccttcaccatcgccgccgaccccacccccggggtcaccacacaaacctgaaccgcagacgcctgtttaccctgaggttccacgatccacgcggtcaccgccgccgtcgcctcccccaacggaatctgcacccgaagctcctccttccgatactccctcatgtcgtgtgcctccttgcagcagttctccacgaagcggctctcaaccaaagccacctcaagataacactactacaccgaagatgccctcactctcctctccaccgaccgaacattctacagcccagccacctaaacacgaaaatgacgcacgtgaacaggagccaccaaccgacgaggatgacttctcatccgttaagggtaaaaagttaggtgcctacgaatcggacggttcgcctcgggcctcctcctgtgccggagcaggagttctcggtgtttttttcatggttgttggactgaccgtgtaa

SEQ ID NO: 89 - DNA, 7023 bp, Toxoplasma gondii
  source 1..7023: mol_type = genomic DNA
atggtgtccgcgaggaaatttctgacgtctttcaatcgagaacaggggggcgaaaattccctctgcttctctcctttcttttctccccttttccgctcgtcagttgcggaggcggagacgcgacccgacagcagctccgatcctgtcaacgatggagactcgacgtccggtggagagacgccggatccgctgccgacgcttgcggaagttcgcgcagcgcttgcgtcgaccgtcgcgcagtcgagaacctttccgcggcgtctcgctgcgaagaacggcgagcaagtggaggacggagacgaagagctggcggagcggaagcgcgtgcgaaagccgcctagagacacgagcgcgtactcggtgttttcagtgcctgcgctgaagctcgaaggcgtcgccattgcagaccaggaagaggccgtcggatcctttgcggtgtctgtcggctgcggatttttccacgaccctccagcgattcctggagtcgctcaccagctcgaacatttgattttcctgggagcagagggtgaagaagccgcaacgtcctgggatgagttcgtcagtcagcgcggcggaacgcacaacgcccacaccacagctgagctcacgacgttcttcgttgcggcgccgactgacaccttgcctgaacttcttgacagacttctcctgcatctcttccaccctctcctcgcagccgaacaattcgcctccgaggtcatggcagtgcaatttgaacacgaaaaaaaccaaccagatgtcgcgcgagttctcctcgagctcgcgatggctgtcacaccatcgctcgcgtctccagcttcctcagcaactcaggacgaggtcccgacctccttttaccgtccggaagtagcgcgaaaattcggcacaggcgacttcgacactctctgcaagacgccgctcgagcagggcctggacgtcctcaaagccttgcgagagttccacggcaagtgctacaaaccggaaaacatgacaatcgctgttcggatgggccgccgctccgttccgatcattgttgaaggcgccgtagacgcgtccggccagtccctgcggatccctgcggaggtcgaagcggcggcagagcgcgaggcagagaaacgctccgtgtatactccgaaggaaattggagaaatggttgtgcgaattctttcaaagtatgttcaagccaattcaccggaaacagaagcacacgctgacaagacgaagacgccgcacaacaagggaaactctttttctgcgtcctcgtcaagtgacctcaccccacaacgaactccttctgatgcgtcctcttctgcatccccttctgtgtcctctgcgcccgcgtcttcacaagccaagaggagaaacgaggtgttgaagacagttcgactgcatgcaggcgaaaggcagaaagaggcgtctcaggttgcttctctcttggaagccgctgtcggcgaagatgcttaccgatcgcgtccgaacgctacagctgaagactctagtcctacagatggagagtccgacgcaagcgggaagctctatcgagtcttccgtcagcatggttgggggaaacgtctgctggttgtctgggagagaagaacgaactggactgttcgagggtacgacgaagtttttcagcccactgctcttctcgagtatctcctggagtaccctggcgaggcggcgcttctcaatcggttgaaggctcagggactgatcgccgacgcggagtacgtggactacaccacgagtcagaaggcgttcgtcgccttgctgttcgagttgacggacgaaggagaggagaagtttgaggacgttgtttcggcgacgctcgcgtacgcagagcagctccggacgtcggtgacggagacgtacattttggattttttcgacgagtttgcgcgcgtggcgaatcgctcatggacgtacaaggatcccgaagacgccgtgagcgccgtgatcgctgcagccgagaagctcgctgtccttcctcagcgtccagacatggtgattgccggcggagagtttgtgtctctccccggagaccgcactctccttgtcgacgttctcaaggaagagctggagagcttcggccgcgctcgcgcctcggcgatcgtcgtgctgccggaagatacggcgcgcgggagcgcagaagtcgtccatgcgttccggccgtacggcgtccaattcagcgtttctgcactgccttctctcgctcaggcagagaaagtcggagagcggataagccgcacagacgccgcggagaagatggaactgctgcatgcagaactggcttccgaggacctgatttcgcactcgatgatcgaatcatcggcgtttcctctgcccccggtcctcgcctgcaacgtcgccgcgacagtagctctcacgccgcgtcgtgtaccggagatctgccagtccttgtcgccggttcagttcccgatcaagggtggacgaagcgacagcgaactgcgagagtcgagcgagcttcctctcgggccgcgttcagaaagtctggaagacgctgaggtcgaggaagaacggaagaagctggaagcgtcgggaccgccctgcgtactggtcacggaagagagtttctcggtgttttggaagaatgcagagccgttcaacaagccaattgtccggggctacttcaagttgagagtctctgcagaagacgcaacggcacaaaacactctctacgggaagatcttcgcgactctcgccggcgaacgcgctcgcactgctctcgcctccttccaaggctgcggcgtcgacctcctcatgtccttcaccaacggcgctctcgttctcgaaattcaagctttctccgagcttttcgccccggttctcgcgcgcctaattgaggtgttgaaagagtcacaagataacgtgaagcagtcggacttcaacaagattttcaacactctgaaagtccagctttcagatttctccactgtcacgcccttcgagctggcgcttgacgtcgcactcagtgtggttcgtcggaacagattttcgcagttggacttgcgaagcgctgtaaccgacgcttcgtctcaattcgaggactttaaagtcttcctggagaaagtcttgacgaagaatgcgctggacgttttcatcatgggcgacatcgactacgaagaggcgcgaaaactcgcagaagacttcagagctgctctctccaagcagcctctcccgttctcggagagcgcgggcagcgagattctcaatctcgcggatgacatcgagattcggttctcaaatccgattccggaagacgccaccaacgcgtatgtgtctctttatgtgacgcatccgcctcctgacatgatggaaatggtggtttactctctcattggagaggtgatcagttctccttttttcgacacaattcgcactcactggatggacggctacgtcgcggcagcagccgttcgagaggtcccccccgccatgactctcgccaccatcgtgcagggctcgcagcggaaaccggacgaactggagaggcacgtctgcgccttcttggcagagatggaagaaaacatcgggtcctccatgaccacagaagctttcctcgagcgcctccggtggcttagcagcagcaaatttcacaggagtgccaccagcttcagcgactactttggcgaggtgacttctcaaattgcgtcccggaacttttgctttattcgagaacagctagctcgtctggcgactgagaagttcctcagctgtcctgcaattctcaaatcctacatgaactctttggtggaccgcgccaatcgcaaacgtatcactgtgaagatcgaagggaactcgtcttccagcgagacagcgtcgcatcagcgcgagattcgagcgccttcgtcgacactgccgaaccgttgtggacttccgggactgtctccttcagcgtctccgtcagcggaagtccgacaggctccttctctctctacacagacgtctgcgttgcggccgcggccgttgtcggagaagcgcgagaccacgcagagcagcgaacctgaggctccagagacgtcttctcaagacggccagcggagtgtcaaagccaactcgccaaagccgctgaatgcggctgggtctgtgggaacagcagggaaggtcgaaggcaaatcgcgcaaggtcgcgtctcgggtggacaccccaggaaacgagcgtcgaacgtacgcctctctgtttgggacgcagaatgtgcttagaagcagccgaatccagtccgacttctcctcgccgatcttctctcttggcgacgacgcagacgcgctctccctcattcaggttgaggctcgcgtctcgacttcgaactccaagccgaaggctgtgctcggcgcgcgccgaggagacggccagtccccaacggtcgcttcgccctctggcgccgcacccaagcgaccggcgccgcccgcagggccgcgcgacaagtctggcgaggcctcagagacgacagggacggaaggcatggaagtcacagaaatcgcctccgatgttgaaggccaagccgaagaaggagatgtccccatcgagttcctgccgctcgcgagacaaatcacgccgcacatcctcgagcgctgtgcggcagaccaaaacgctgcaggcgcaaaacggattgtggtggacaatttcttcacggatccggtcgaggctcgtcgaagcatcctcgaaaacctggaagcgaaactcagctcgacgtcttctctcttttctctgtcgccttcttcccacccatctcctcctctctggctagcgtacagccgctcggagtcctgcagtattcgcaccagcacaatttcgcgagccgaggaagtttgtggggcgtggcgcgagagcgcaccggaggctgtcttgatcgtttcgcctgagcagccgcccgcagggatgccgagcttgccgcctactttgggagacgcggagccgccggccgcggcagtccctctgtctccttcgggcgcagagacaggtgtccccttggtgccggagagccccggctcccctgcggctgcggggcgacaggcggcgacgaaggccccgacagaaagcgaggcttccgcggcaaccgagggtgaccatccgcgtgtgggcacctctgcggaggcgagaactcgtcagcttccgaccgcagaacagcagacactggaacagcggaaagcgcttctcgaggcccgtttgagacgcctagaaatgcagaccatcgcgcagcgagcgcagctcttgaagcagcgcctagacgcaatgaagcagtacggaacaagaccaacaacgatcttcaacacttggctaggaccgcacaaacgaggctttctacagagtgtcggaggcggcacaggcgccagctctggggccttccccgtctctgcagtctcgggccgcagttccacggcgacgcgcacccaggccgcctcagatttgcacggaagccgtcggttgccttccgctcttcatcaggcggcagatcctctggcgttcaagcgaacgctcgaaactctgaaatggagagagcagggccttcttcagcggcaagccgaactgaggacgcagctgcgaaaagtgaatgcctttggcagtacagctggagactcaactgcaccgaacctgggtctagctgaagacaaaaacctccgactcgtagaaaatgtcactgtggcttcgggggcgtctctcggctccagggatcaaaccgccatcgcccatcagacggatgtcctgccgccgcctcgggcttcaattcccacggtccccaccctgacgccggcgccttcgcctgtcgcctttgcggccctgccgcagatccaccagcaacttcctggagtcgacgttggtgccgagataccccgtccggtgacgcctgtttccacggacatttctgcatctgcttctgcgttcgtcccagggtctgtgcaagcgtctctctcccaatctcccgcggcatctgtcaaaggcgcaggcgcacctcccttgcctctcgctcaccaaccattcgcttctcttcctccagctcctcagctccctcaagagccccgtgtgcaagaagcaaacgtagggtctcctagtccgccgactgtggttcctggtgtacccactgtcggagcgactgcacctactgtgggagaaggtgcgactactctgggggctggtgccccggcggtggcttctccggcgcctactgtcggagctgctccgcaagcagtgacatacactgcgcctactatgggagctggtgccccgacggtggcctctctggcgcctactgtcggagctgctccgcaagcggtgacatacactgcgcctactacgggagctggtgcgcctgcggtggcctctctggcgcctactgtcggagctgctccgcaagcggtgacatacactgcgcctactatcggagctggtgcgcctgcggtggcttctccggcgcctactgtcggagctgctccgcaagcggtgacttacactgcgcctactatcggagctggtgcgcctgcggtggcctctctggcgcctactgtcggagctgctccgcaagcagtgacatacactgcgcctactatcggagctggtgcgcctgcggtggcttctccggcgcctactgtcggagctgctccgcaagcggtgacatacactgcgcctactatcggagctggtgcgcctgcggtggcctctctggcgcctgctgtcggagctgctccgcaagcggtgacatacactgcgcctactatcggagctggtgcgcctgcggtggcttctccggcgcctactgtcggagctgctccgcaagcggtgacatacactgcgcccactatgggagctggtgccccggcggcggtggcttctctggcgcgtgggccgagttttgattatcaggcgggtgtagtatcgcgtgcagttggaggtgcgtctcagcctcaggctgaacaggcggcttcttacgtcagcgacccggcgtccgtcgctagggtgagctcagcgtcgatcttgccgcatgcagctgttccagtggtgcatgcctga

SEQ ID NO: 90 - DNA, 1131 bp, Toxoplasma gondii
  source 1..1131: mol_type = genomic DNA
atggcggatgaagaagtgcaagccttggtggtggacaacgggtccggaaacgtgaaggctggcgtggccggcgatgatgcgccacgtgccgtcttcccgtctatcgtcggaaagcccaagaacccgggtatcatggtcggaatggaggagaaggactgctacgtcggtgacgaagcccaaagcaagagaggtattttgactctgaaataccctattgagcacggtatcgtcaccaactgggacgacatggagaaaatctggcatcacaccttctacaacgaactgcgtgtggcgcctgaggagcaccctgtgctgctcacggaagccccactcaaccccaaggcgaaccgtgagagaatgacccagattatgttcgaaacctttaacgtccctgccatgtatgtcgctatccaggccgttctttctctgtactcctccggtcgtaccaccggtattgtgctcgacagtggtgatggcgtctctcacactgtgcccatctacgaggggtacgccctgcctcacgccatcatgcgtttggatcttgctggacgcgaccttaccgagtacatgatgaagattctccacgagagaggatacggcttcaccacctccgccgagaaggaaatcgtgcgcgacatcaaggagaagctttgctacatcgccctcgacttcgacgaggaaatgaaggcggctgaggactctagcgacatcgagaagtcctatgaattgcccgatggcaacatcatcaccgttggcaacgagcgattccgctgcccggaggccctcttccagccctccttcttgggcaaggaagctgcaggtgtccaccgcaccaccttcgactcgattatgaagtgcgacgtggatatccgtaaggatctgtacggcaacgtcgtcctttctggaggtaccactatgtacgagggcattggcgagaggctgaccaaggaacttacctccttggctccttccaccatgaagatcaaggtcgttgctcctcctgagcgtaagtactccgtctggatcggagggtccattctgtcctctctctccaccttccagcagatgtggatcaccaaggaggagtacgacgagtctggcccgagcatcgtccaccgcaagtgcttctaa

SEQ ID NO: 91 - DNA, 771 bp, Toxoplasma gondii
  source 1..771: mol_type = genomic DNA
atgtctccgctaggcttcggagcgtttctttcccctctgcttctcttttgtgtgtctcctcacttgcggacgggagtttcccgatctttctcttctttcttgaagccacaaaagctccagcgttttgtttctcgcgagtatccccgtcgccgttgtctgccgtctctccatttcacgtctcggtgtttttccacgcgtctttcctcgagaaaaatggcagtcaaagtgcttgttcccgtcgctcacgatagcgaggaaattgaggcagtctccatcattgatacccttcgacgagccggcgccgaggtggtggttgcgagtgtagaggacaccgaaatcgttcgcatgtcacgcggcgtttgcgtgaaagccgacaagctcatctcagcggtggaaaatgaaacgtatgactgcatcgcgattccgggtggcatgccaggggccgaaaggtgccgagactctgcagctctgacggccatgctcaagactcacaaggcacagggcaagctcattgccgcgatctgcgccagccccgctgtcgtgctccagactcacggtcttcttcaaggagaaaaggcggttgcgtatccctgcttcatggaccaattccccgccgatatgcgtggcgaaggccgagtctgcgtcagcaacaaaatcgtgacttccgttggaccctcgagcgctatcgaattcgcactgaaactcatcgaagttctgtacaacaaagagcaggcgaagaagatcgcggcacagctcctttacgcgtactaa

SEQ ID NO: 92 - DNA, 1428 bp, Toxoplasma gondii
  source 1..1428: mol_type = genomic DNA
atgttccgtcttttggttccaacatattattcctactccgtcccattacgttttcctttttgcaagatctaccgttactcaacttccaacaaaatggtggccatcaaggacatcactgctcgtcagatcctcgactcccgaggaaacccgaccgtcgaggttgacttgttgaccgatggcggctgcttccgtgccgctgtccccagcggcgcatccactggcatctacgaggcgcttgagctccgtgacaaggaccaaactaagttcatgggcaagggtgtgatgaaggccgtggagaacatccacaagattatcaagccggcgcttattggcaaggacccgtgcgaccagaagggtattgacaagctgatggtcgaggagctcgatggaactaagaacgagtggggctggtgcaagtcgaagctcggcgcgaacgcgatcctggccgtctcgatggcttgctgccgcgccggcgctgctgccaagggcatgcccctgtacaagtacattgccactttggctggaaacccgacagacaagatggtaatgcccgtcccgttcttcaacgtcatcaacggcggctcccacgcaggcaacaaggtcgcgatgcaggagttcatgatcgcccccgtcggcgcctccacaatccaagaggcgatccagatcggcgcggaagtgtaccagcacctgaaggtcgtcattaagaagaagtatggcctcgacgccacgaacgtcggcgacgagggtggcttcgcccccaacatcagcggcgccacggaggccctcgacttgctgatggaggccatcaaggtgtctggtcacgaaggcaaggtcaagattgccgccgacgtcgccgcttccgagttcttcctccaggacgacaaagtctatgacctagacttcaagactccgaacaacgacaagtcgcaacgcaagactggcgaagagcttcgcaacctgtacaaggacctgtgccagaagtatcccttcgtgtccatcgaggacccgttcgaccaggacgacttccacagctacgctcagctcaccaacgaggttggcgagaaggtccaaatcgtcggcgacgacctcctggtcaccaacccgacgcgcattgagaaggccgttcaggagaaagcgtgcaacggcctgcttctcaaggtgaaccagattggcacagtcagcgagtctatcgaggcctgccagcttgcccagaagaacaagtggggcgttatggtttctcaccgctccggtgagactgaggactccttcatcgctgacctcgtcgtcggtctccgcaccgggcaaatcaagactggcgccccgtgcagatccgagcgtctctgcaagtacaaccagctgatgcgtatcgaagagtcgctcggctccgactgtcagtacgccggcgctggcttccgccatcccaactaa

SEQ ID NO: 93 - DNA, 1302 bp, Toxoplasma gondii
  source 1..1302: mol_type = genomic DNA
atgctttgcattgtagagcgaattgcaatgccaacgcgtggtgtcaacccctcggcggcaaacggcaagctcccgccgcggacccggtccgcaacgggatgcagagtgtacatacacccgatggtaaagttcatatccttactttttgccgttttttacgcacgattctttctgcttttttgtgtacgcattcaatccacatttcccaccatgtcgggatacggtcttcccatttcccaggaggtggccaaggagctggccgagaacgcccggaagattgcagcgccgggcaagggtattcttgcagccgatgaatccactggcaccatcaagaagcgcttcgacagcatcggagttgagaacaccgaggcgaaccgcgcgttctaccgtgacttgcttttcagcactaagggtctcggccagtacattagcggcgcgatccttttcgaagagactctgtaccagaagagcccgtcgggcgtgccgatggtagacctgttgaaggccgaggggatcatcccgggcatcaaggtcgacaagggcctggagactcttccgctgacggacgacgagaaggcgactatgggtttggacggcctctctgagcgctgcaagaagtactacgaggcaggcgctcgtttcgccaagtggcgtgcggtgctcagcatcgacccggcaaagggaaagcctacaaatttgtctatcactgaggtggcccacggcctcgcgcgctacgcggcaatctgccaagcgaatcgactcgtccctatcgtcgaacccgagattctcacagacggcagccacgacatcaccgtgtgcgccgaagtcaccgagcgtgtgctagcggcggtcttcaaggctctgaacgaccaccacgttctgctggagggagcgctactgaagccaaacatggtgacccacggctcggactgcccgaagccggcgtctcacgaggagattgctttctacaccgtccgcagcctgaagcgcacggtcccgcctgcgctccccggcgtcatgtttctctccggaggccagtccgaggaagacgcttcgctgaacctgaacgagatgaacaagatgggaccccacccgttccagctctccttctcttacggccgcgctctccaggcttcctgcctgaaggcctggaagggtgtccccgaaaacaaagccaaggcacagcaagtgctgatggagcgcgcgcgcgccaatggcgaggcacagctcggcaaatacggcggcggtgcaggcggggccgctgcggcttcatccctcttcgagaaacgctacgtgtactaa

SEQ ID NO: 94 - DNA, 1470 bp, Toxoplasma gondii
  source 1..1470: mol_type = genomic DNA
atggccttgctaacgacagtccgtgacagttgcttttactttccacagaaaacagcctcaagacatgtgttcttagcgtgtgtgactgccctactgcagcgcagcgatccgacttttttttgcgaacagtcgacgagcatgcaacctgaagctgattccgcgtggcaacccgatgctggtactgtttcgctgctcacgcgagtgaaggatctaagggtcgctattgcgccggtactgtggaagtctgcggaagcgcacgagcatcgccaccacccatccgcctgttgtgggccagtggaacggaatctgctccaatacacggcgcgtcccgcacctccacccttccccgacttggctccttcgcttctttggccgagggcgcgtctgcgaaccaaaaagattgcgggacgcagttacacgaccccggactgcagacactttgccaagatggtgtgcaagctgggtattaacggttttggccgtattggccgtctggtgttccgtgctgcgatggaacgcggcgacgtggaggttttggcgatcaacgacccgttcatgtccctggactacatggtgtaccttctgagatacgactcggtccacggccactaccccggcgaagtcagccacaaggacggcaagctcattgtcggcggaaaggccgtgactgtcttcaacgagaaggagccaactgccatcccttggggccaggctggcgtccactacatctgcgagtccaccggtattttcctcaccaaagagaaggctcaggctcacttgaccaacggcgcgaagaaggtcatcatgtccgccccccccaaggacgacaccccgatgttcgtcatgggtgtcaacaatgaccagtacaagtccagcgatgtcattgtgtcgaacgcctcttgcacgaccaactgcttggctcctctcgccaaaattgtccacgataagttcggcatcgttgagggtctcatgaccaccgtccatgcgatgacggcgaaccagctgacggttgatggaccctccaagggtggcaaagattggcgcgctggccggtcggcaggcgtcaacatcatccctgcctccactggtgccgccaaggctgtgggcaagattattccttccctgaacggcaagctgaccggtatggctttccgtgtgcccgtccccgacgtgtctgtggttgatctgacctgcaagctggccaagcccgcgaagtacgaggacatcgtggcagctgtgaaggaggctgccacctccggccccatgaagggaatcatcagctacaccgacgaagaggtcgtctcctctgacttcgtccactgcaagttctcctccgtgtttgacatcaacgccggcatcatgcttaacgacaccttcgttaagctcgtgtcttggtacgacaacgagtggggatactccaaccgccttgttgagctggctcactacatgtccgtccaggacggcgcgtaa

SEQ ID NO: 95 - DNA, 351 bp, Toxoplasma gondii
  source 1..351: mol_type = genomic DNA
atgcccaagtgcatgatcttttgccccgtcgcggcgacgccggcgcagcaggacgccctcttgaaggacgccgaaaaagccgtcgcagacgctctggggaagcctctgagctacgtcatggtgggatactcgcagaccgggcagatgcgtttcggcgggagcagcgacccgtgtgcgttcattcgcgttgcttccattggaggcatcaccagttccacgaactgcaaaatcgccgctgctctctccgctgcatgcgaacgccacctgggcgtccccaagaaccgcatctacacgacattcacaaacaagagcccctctgagtgggccatgggcgaccgaactttcggctga

SEQ ID NO: 96 - DNA, 1416 bp, Toxoplasma gondii
  source 1..1416: mol_type = genomic DNA
atgcgagccgggttttcgtttgctctgttggcagtcggccttttggccactgccgtggtgtactccgcagcggaggaggaagctgtgactgtattgactgcctctaacttcgatgacactctgaagaacaacgagattgtcctggtcaaattctacgcgccttggtgtggccactgcaagaggatggcgcccgagtacgagaaggctgccaaaacactgaaggagaaggggtctaagattgtgttggctaaggtcgatgccaccagcgagacggacatcgccgacaaacagggtgttcgcgaatacccaactctcaccctcttccgcaaggagaagccagagaagtacactggcggccgcacggcggaagcaattgttgagtggatcgagaagatgaccggccccgcggtgactgaagtggaaggcagcgctgaggacaaggttacgaaggaggcaccgattgccttcgttgctgagctcgcgtctaaagacagtgatatggcgaagctgttcgaggaagtcgccaacgagtcccgccagctgggaaggttcttggctaagtacggcgcctcggacgagaagatctactcccttcgctacgaggagggcactgaagccttcacaggcaagaccaaggacgagctgaagaagttcgttgacactgagtcctttcctcttcttgggcccatcaacgcggagaacttccgcaagtacatcgaccgcgatttggaccttgtgtggctctgcggtaccgagaaggacttcgatgaggccaaaaccgctgtccgcgaagctgccaagaaactccgtgacacccgctccttcgtctggcttgacactgaccagttcaagggccacgctgagaacgccctgggcatcaccgaattccctggccttgttttccagtccaagaagggacgcttcgtgctccctgaggcaacaacctccctgaaggacgctgctaagatcagtcagttctttgatgatgtcgaagccggcaagatcgaccgatccctgaagtctgagcctgtcccggagaagcaagacgaagccgtcaaggttgtcgtcggaaagaacttcgaagagatggtcatccagaaggacaaggatgtgatgctggagatctacgccccgtggtgcggctactgcaagagcttcgagcccatctacaaggagttcgcagagaagtacaaggatgtcgaccaccttgttgttgccaagatggacggcactgccaatgaaacgcctctggaggaattcagctggtccagcttccccagcatcttcttcgtgaaggctggcgagaagacccccatgaagttcgagggctccagaaccgtcgaaggcttgactgagttcgtcaacaagcacggttccaagccgctcaagaaggacgacaagggtgaagaactgtaa

SEQ ID NO: 97 - DNA, 1938 bp, Toxoplasma gondii
  source 1..1938: mol_type = genomic DNA
atggcggagaaagcactgacgagagcgacaacgccgacgggcagctggcggcgtcccgagcctgtggacagagcagatccggagaacaggagagacagcctgcatgcgggagcgccctacgcgtccgagggacaaggaggaaggaagaccgagagcggcagaagcccagaatccctgagcttgttctcccggcagttccttgcggagagccgtacaccacaatcgtcctggtcccggtctcgtccatcctcttcggctcctgcctcttcgctgcgcccctctccttcttcagatccctctcctcgtgcctcctcttcctctagctgtccagcttgctcttgtgggttgtcttcttgtctgtccaccgactcccccggttctcgcacgtctgcttcgggggttcccgataagttcaagagatcctgtgcatattccggaaagcctccaccatccaaaaaacgacgactgctgcctgcagcacagctggcctctccaacgtgtaccctcaaaggacacgtgtatcgctgccctttagagcggaaacactcgcttcccacgccgtccgtttttttagagaaagacggctctctctcgtcctcagcgcttcggattttatcgcgtctccacgtaaagtatgtcccctctgaggatccccacaaagtgactagcgggtcctcgggctttgtacgcactgcatccttctctgcgtctgtcaagtctgggcaactcggaggccgtgcgtcaccgcctcagacaaagacaggccttaacccgctcatctctcttctctgttgtctgcctctcctcgagccttcctcgcggccttcctgcttcttcttcctctcgccgtctgcacttctgacaccttcttcttctcgcgcgtcctcctcctcttcttctaagcctccgtacccgtcggatcgcgtgaggcctggaggcctgacaggagacgcgttcaagttatctaggcttcagctgctgtacgattcgcttcccttgtgttgtcagcctctcgcgtgctcgtcatcgttggtgtctcgtttttcgtctttggatcagtcattcggcgtcccctctgcgtcgcctgcctttgtccccatcaacacgtgggctttctttctctcgctgcttgccaccgtcacatctagtcctctgccttgtgtctcaccttcttccgtttccccctcctcctcttctttcgaatcgtctgatggcttctcgtctctctctcgatcggcgtcgccgcgcttcaagcgggctctggtcttcgtctttgagtttattcctacgctctgttgctctgcatgctgtgaggcggaccacgcggagagcctccggagacgcggtgcagagccgacagcgaacgcagttgagtgtaggggaagccagggcagtagcgagaccagccgaatcgaaaacgtgcagcgggaagacgatgcaggaggttgccgccatggggctggtgagggagagagacgcaccgaagagaaggagggagaacaccgcctcgaggcaggcagcacggaacagacgcgacagcaagggcgagaaccggaaagcaatgatgacgcgggaatgccggtttcagatgaacagagaggagatccgcagcgaccgacaggaagggtagagagagaagagagacgggcagcgaacgagaacgacggtttttgggcgcgaatctgcggcgttgaaaacagccaattcattcgtgtgtgtcgagagagattctcccgcgtcgtcatgctcctgccgccgatccctgaggcttctcacatcatgggatgtgaagagatcaaaggagaacagagtgggagagaggagacacattcacaagagaacatcgaggcagatgccgagctcgcctggacaacatggattgaacaaggggggcgtgtcgctgagcttaccaatccggcattcgatcggccattttag

SEQ ID NO: 98 - DNA, 549 bp, Toxoplasma gondii
  source 1..549: mol_type = genomic DNA
atgaaaatacagtccattgtcacgaaaacgacaaaagccgctctaactgccgcgattgatacacttttggcgaagggtgccgacgctccagctgtctcatccttccatgaaaaaggaggagctgtgccggttctgtgtgtttttattgtgcgtgcttattttgttggttcttacctcgttattgttcctctgctgtgcttccctaactttccgctactcgaacgtctagcccagcactgcagttctggaacgttgctgaaaggggaagacaccttgtgtcgggatccaaaagcttctagttgtcatctgcatctgagactgagattccttgaagttgtcgctgtttgtttcgttctgccgcgcaaacaggccgatcttcggctgcctctgtacagatttcaagcgggtgttcgcagaccctgcctgcatgcccctcgcgcgttgaatgaggcgccgttaaagttcgatgttgccttatttgttcaatttgttcttcatataaaggctttctgctgcgagtctcatgattcttgttgccgtcccacttag

SEQ ID NO: 99 - DNA, 648 bp, Toxoplasma gondii
  source 1..648: mol_type = genomic DNA
atgaaggttgccagcggttccgccatcgtaggactcctgctcggagccgcagtcccagttgtgtacgccggacctcatggcggtcacagaccccagaagaaaggaggatacaccacaactaccacactccctcccaatccaatggacgtacgaacagaatgcttccaggtgccgtacagtgtcgaaaagacatgctacaaggacgagcacatttcccggccatacacgtgtccgtcgtcatattctgaagaagtgtgcagcacgcagttggcggaatctcgcgatgtgtgcactcaactggtgaagaaggaggtccagtaccagtgtccgaaggcaacgaagcaaacgctgtgctcccagatcccggtgacgttgaacaagacatgcaagaagcaagtcacaaacaaggtcccgagcagttgccccaagattttgacggtccccgagtgtgaaatccagtcgaggccttctcaagacgtgtgctacgagtctgaggcgtacacgcaggagtacgattgctggggctccgagcttcatcgcgaatgcgaagtggacatgcgcgtcgttgacacccagtgcaaccgcattgttgactcgccggtgctatacgagtacgaagataccgttgtggagagagtctgctccacg

SEQ ID NO: 100 - DNA, 2859 bp, Toxoplasma gondii
  source 1..2859: mol_type = genomic DNA
atgcacccctcgggtgggcaattcgttcccaccccccagagacacggtcccgacctcacaaagagttgggggctgataaatcgcgacttcgcgttgcgaacgagggaatgggccgtctcgcagaggagtctggtttttcctgttgccgttgccgccgtgaggggggaaacggcaccaattgctggtcgggcgtcccagtgtcctcgtctgcttgtgccgttttcgtgggttcttttcctggagcagcgtccggagctctctctcacaaaggttgttttccttctttggaatctgtattttgtttctttgtctccccttcgtccgtttaccggttcccttcacccccgccccgtcgtcaaaatggtgaacttttcagtggagcagatgcgtgagattatgggcaatccgaagaacattcggaacatgtccgtcattgcccacgtcgaccacggaaagtcgacgctgacagactccttggtctcgaaggccggtattatttccgctaaggcggccggtgacgcacgtttcacagacacccgtgcggacgagcaggaacgctgcattaccatcaagtcgactggtatttccatgtacttcgagcacgacatggaagacggcaagggtgcgcagccgtaccttatcaaccttatcgactctccgggacatgtcgacttctcctctgaggtcacagctgccctccgtgtcactgacggtgcgctcgtggtcgtcgacaccatcgaaggtgtgtgcgtccagaccgagactgtgttgcgtcaagctctggctgagcgtattcgccctgttctccacgtgaacaaggtcgaccgcgctctcctcgagttgcagatggacggtgaagaaatctaccagaccttctcccgaacgatcgagaacgtgaacgtcatcatatccacctacaacgacgagctgatgggagacgtccaggtctaccctgagaaaggaactgtctccttcggtagcggtctccacggctgggccttcaccgtcgagcgcttctccaagatctacgcgaagaagttcgacgtccccaaggagaaaatgatggagcgtttgtggggcaacaacttctacaacgccaaggagaagaagtggaccaagactcagagcgagaacactcgccgtgctttctgccagttcatcatggacccgatctgcactctcttcacctccatcatgaacgacgagaaggagaagtacaccaagatgcttggcagcttgggcattgagctcaagggtgacgacagggacctgactggcaaggcgctcctgaagcgtgtgatgcagctttggcttccggccggtgacactcttctggagatggttgtgcgccacttgccttctccgttcgcggctcagaagtacagagtcgagaacttgtacgagggtccgatggacgacgaggctgctcagggtatccgcaactgtgaccccaacgcgcctctgatgatgtacgtcagcaaaatggtgccgacctccgacaaaggtcgtttctacgccttcggtcgtgtgttctctggcactgtcgcgactggccagaaggtccgcatccaaggcccgcgctacgtgcctggcgagaagaccgacttgtacatcaagagcattcagcgcaccgtcatcatgatggggaagtacgtcgagcatgtccaggatgtgccttgtggaaacacctgctgcctggtcggtgttgaccagtacctgctcaagtccgggacgctgacgactctggacaccgctcacaacattgcggacatgaagtactccgtgtcgcccgtcgtgcgtgtggccgtgaagccgaaggacaacaaggagctgccgaagctcgtggaaggtttgaagaagctgtccaagtctgacccgctggtcgtttgcacaaccgaggagtctggtgagcacatcattgccgggtgcggtgagctgcacgtcgaaatctgcctgaaggatctccgcgacgagtacgcacagatcgacttcaccgtctccgaccccgtcgtctcttaccgtgagaccgtctctgctccttctcacatgacttgcctgtccaagtcgccgaacaagcacaacaggctgtacatggttgccgagccgttccccgacggactggcggacgccatcgaggccggccaggtcaacgctcgcgacgacccgaaggagcgcgcgaatgccttggctgagaagttcgacttcgacaagaacgcagccctcaagatttggtgcttcggtcccgagacgactggcgccaacatgctcattgataccactcagggagtgcagtacctgaacgaaattaaggagcactgcaactcggccttccagtgggccagcaaggaaggtgtgctctgcgaagagaacatgcgtggcatccgcttcaaccttaccgacgtcaccatgcacgctgacgctattcaccgtggcgctggccagatcatgcccacttgccgtcgtgtcctgtacgcctgccagttggcgtctgctccccgtctccaggagcccatgttcttggttgacatcacctgtccccaggacgccgtcggtggtatctattccaccctcaacacccgcagagggcacgttttccacgaggaacagcgctccggtactccgcttgtcgaaatcaaggcgtacctgcccgtcgccgagtccttcggtttcaccaccgccctccgtgccgccacttccggacaggccttcccgcagtgtgtgttcgaccactggagcaccctcaacggcgaccctctggagaagggctccaagatggaggagctcgtccacaacatccgtacccgcaagaacctgaagcctgaaattccgcccttcgaaaactactacgacaagctgtaa

SEQ ID NO: 101 - DNA, 2070 bp, Toxoplasma gondii
  source 1..2070: mol_type = genomic DNA
atgttttttttgtcgacctccgtaattcccggtgccgccgttttcagcgtgcgttttgcgcggaaccccacgccttgtcttttaccccgcaacagcttacctgtgcatctccggcacacggctttaacgccccgattcctcgaacactcgaacttagccttcggttttttccgccggtcgatttcgacaggctgctcgcgaacgcttcgaatcaagtccactccggttggtgtgcttttctctgccaaaatggcgtcaagaaccccgttccaggacgcagccctctcgatcgtgaagggagcggcttgcattgccctcagtctgaagactgcccgcacgacgcagaacgtcaaattttctaaagacaaccgatgctccatcacccttggccccatcgaggttgagccgactgctgccgaggaggctctcctgaaaacactgaccaagcaaaagattgaggaaaactgccccttccgcgtgttcaccatccctcgcgatctggcgactcgcatgtaccaggagtcttacctcgacgagttcggaattcccgccaatgtgaaggaagtccgcctcgtcgtcctgccggaatggaatatcaacgcgaacatgtaccccgtcctgaagtctacaggacaaatcgcggacatccagtttgagtcagtgaagttcaatgaggagaagaaacagctttgcctgtcgcttcacgtcgtcccaggacccgatgaacagtccccggctctcgctgaggaggagaagctcggtcctgaggagatcccctctcgcgctcaggtgcttccgccgtctggcgttgaaggcgacgactttggcgagggcgatgacgaccagaccatcaccccgtgggacgtgcaggcggccgagggaggcatcgactacaacaagcttctgaggaagtttggctgctcttccatcacacccgagctcatttctcgcattgaggctttgaccgggaagcgcgctcatcacctcctccgtcgtggaatcttcttctcgcatcgagacttgaacttgctcttggattccctggaaaagagacaggcgaggctcgcaagcggcaaacgcgaggacggcccaggttcggaaggcctgtccggcccaggcttctacctgtacactggacgaggtccttcttccgaggctctccacattggacatctcgttccgttcatgttcaccaaatacctgcaggacgtattcgatgttcctctcgtcatccagttgaccgatgatgagaagttcctcttcaaggactccttgactttggaggagactcaccgtcttgcgttcgagaacgcgaaggacatcattgcttgcggcttcgaccctgacaagaccttcatcttctccgatctgtcgtacatccagcacttgtaccccgtcatcttggagattcagaagaaggttacgtacaaccaggtccgtggtctctttgggttcgtcgagagcgacaacgtcggcaagtctgcgttccctgcagttcaggctgcgccgtcgttcccgacagccttcccgatgatctttggcggcaagaaggacgtccgttgcctcatccctcaggcaatcgaccaggatccgtacttccgtatgacccgcgatgtcgcgccgcgtttgggtctgttgaaacctgcgcttattcactcgcgtttcatccccgcgctgcagggattcaagacgaagatgtccggatccgtcgagacctcgtccatttacgtttccgacacccctgaacagatcaagaacaagatcaacaagtatgccttctctggcggccagccaactgaggcggagcagagagtgaagggtgcggacctcgacatcgatattccgttccagtacctcaccttcattctcaatgacgacgatcaactcaaggaaatcggtgaaaaataccaaaagggcgaaatgcttaccggcgaggtcaaggccatcttgatcaaggagttgcaggctctcgtcctcggtcaccaggaacgccgcgcgaaggtcactgatgacatggtccgccaattcatggatcccttccgtccgtgcttcaagaagtatgcacaatag

SEQ ID NO: 102 - DNA, 1428 bp, Toxoplasma gondii
  source 1..1428: mol_type = genomic DNA
atggagagaggtcagatgctagagcctaaggagactgcgaaggcgctcagcgcaaccagcagtggatactactccgaccatgtcgaccagaacgagcaagttcgcctcctcaaccgactcgccaacgcggagggaagctcgcaggtcaaacaagatgcagtgttggccaatccgccagactggaagaccctggagaaagcgggcgtcctgcctgcaggcctctcggctgttttgtcgaaaatcaatcctctctgtctcgacgaattcgcagaaatgctcgcggctgatccggacctcgttcgcgccctcgtcgctctcgtgcggctggaaggaaacctccacacggtgcagtacgtcttgacagtcctctgcgaggtagtcagagacgacagcagcaagtacgaggcgttgtgctcagctgtggcagacagcgaagttttcgaggcgtttcgtcagctgctggaagtcgcaaacctggactcttatacagccgaccgagcagcctttctcctctctggactcatgtgtcgagctcgctcggggactttttccgacagtcaggtggagtacttggttcaaggtcttctccacggtcgcgcggccaacaagtttctcctcagcgaaggtggtcgcctggacgcgtttgtcaatctgctgaaaatcgatggctaccgaccgatgatttgggattgtcgcggatttcctgagctcgtcctgcggaacttgtcgctgacgcttcccgcgagcgtcctctacaaagcgatgttctgcgtgtggctcctcaccttccacgacgcgtttctgcctcagctgaacgagaagggcattgttgtcgccgtgtgcgtagtgttgaaagagtcccgcgtcgagaaggtgattcgcgtcggactcggtgtgctgcacaacttgctgaagtgcgacgcgtcggtggaaacagtcattgaacagaacgtcgcgcaggttttggcactgctggaattcgagaaatggcgcgacggggacatgtacgacgacatccgcctcgcgacctcgcacctggaacagaaaattcgtcagttcaacaacttcgatcgctactgccacgaactcgacaagggacagcttacgttctctgtcctccactctgaaaaattctggagagagaatgtcatggcatttgagaacgatgagtttcgagccatcaagaagctcgtgaagctgctggatacgtcaactgacaaaacgactctcgccgtcgcgtgctacgatcttggcgagttcgcccgtcttcacccggcaggaaaaaaggtgtgtcagcagctgaaggtgaaagaccgcgtgatgctaatgataagcgacaaggaccgcgaagtagccggcgaggcactgctgtgcattcagaaattgatgttgaacaactggcaggacgtcgccgagctcggaaagtag

SEQ ID NO: 103 - DNA, 1851 bp, Toxoplasma gondii
  source 1..1851: mol_type = genomic DNA
atggcgccccgaggcgaagcagcagccccagagggggacgcggaaatgggaatcatctacaaagtctctggcccgctggttctggccgagcaaatgagtggaacgaaaatgtatgaactcgtgcgtgtcggctggcagcgacttgtcggagaaatcattcgtcttgagggcgacaaagcctttatccaagtttacgaggagaccgctggtctttgcgtaggcgatcctgtgctgaagaccgggaaacctctttccgtcgagctgggacctggtcttcttgacaacattttcgacggaattcagcgccctctcgagcgcatcgcacaagtcgcccagagcgtcttcgtccccaagggggtcgatgtgcctgctctggaccacaagaaactttgggagtacaatccagtcgccaacgttcaagtcggcgatatcctgaccggtggagatattatcggaaccgtacacgagaacaatctgtttctggagcaccgcatcatgattccccccaagattcaaggcaaggtctcctggatcgcccctgcaggctcgtacacagtcaaggacacgatcatgactctggagtatcgcggcgagcaaattccgattcagatggctcacgactggccagtccgagagcctcgtccctgtctcgaaaaactctcgggaaacacaccgcttctcactgggcagcgtgtgctcgactctctcttccccacggttcagggaggaacttgcgccattcctggagccttcgggtgcgggaaaacatgcatttcccaggcgctgtcaaagtacagcaacagccaggtgatcatttacgtcggctgcggcgaacgggggaacgaaatggcagaagttctaacggagtttccagagctcacgacggtggttaacggccaggaagagggcatcatgcagcgcacctgtctcgtcgcaaacaccagcaacatgcctgtcgctgcccgtgaagcctccatctacaccgggatcaccttgggagagtatttccgcgatatgggttaccatgtggctatgatggctgacagcacaagtcgctgggctgaggcgcttcgtgaaatcagtggacggcttgctgaaatgccagctgacagtggctatcccgcctaccttggcgcgcgtctggcgtctttctacgagcgtgcgagccgtgtacgctgtgtggggtctccggaacgcgaaggcagcgtgacgattgtcggcgctgtctcgccaccaggaggagacttctctgaccctgtcaccacgtccacgatgtccatcgtacaagttttttggggtctcgacaagaaacttgcccaaagaaaacacttcccctccgtgaactggacaacttcgttctccaagtacattcgtgcgctggagccgttcttcgattcctacgacgctgagtttagcagtcttcgacagaaaatctctgacattcttcagcaagaagccgagttgacggacatcgtccagcttgtcggcaaagactcgctctccgaggatcaaaaactgattctggaagtcgcacgaattattcgagaagatttcctccagcagaacgcgttctcggactacgactacatgtgccctctgtataagaccgtcggcatgatgcgcaccatctgtcacttctacgatcagtgtctgcgcgtcatgcaagaaacaagcggcagcgagcacaaaatcgggtggggtacaatttacaacacgatgcggccgaccatcagcagaatcaccagcatgaaattcttgccgccgacgactacggaggcgcaggcgaagcagcatttcaagcagctgagtgacgagatcacctctggcctccggggtctcgttgagaaataa

SEQ ID NO: 104 - DNA, 1518 bp, Toxoplasma gondii
  source 1..1518: mol_type = genomic DNA
atggcggctcaggcagccaaggccgacgctgcgctcgcgcatgcagcggcagcttctcgcgactaccgagtggctcctcgcctcgactatcgaacggtcgcaggtgtggaaggcccgcttgtcattctcgatgatgtcaagttccccatgtacaatgaaatcgtcaacatccaccttggagatggatccgtcagagaggggcaggttctggaagtccgagggaagcgagcagtggtgcaagtgtttgaggggacgtccggcatcgatacgcgccagtgccatgcggagttcacgggagacgtattgaagatgccgatcagcgaagagatgctggggcgggcgttcaacgggagtgggaagccgatcgaccgcgggcctcgcgtactggccgaggagtttctggacatcaacggatgcccgatcaaccctcagtgtcgtgtgtaccccaaagagatgattcagacagggatttcggcgatcgacgtgatgaacagcgtggttcgcggccagaagattccgctcttctcggccgcgggtctgccgcacaacgagatcggcgcgcagatctgccgacaggcgagtctggtcgcggggaaggatgtgaaggatcactcgaacgagaacttcgccgtcgtctttggagcgatgggtgtgaacatggagaccgcgcgcttcttccgacaagacttcgaggaaaacgggagcatggaacgcgttgcgctgtttctgaatctggcgaatgacccaaccatcgaacgcattatcacaccgcgcctcgctctgaccactgcggagtacctcgcgtacgagcgcgagatgcacgtctttgtcattctgaccgacatgacggcgtatgccgacgcgctcagagaggtctcagctgccagagaggaagtccctggacgtcgaggctatcctggctacatgtacacggacttgtcgaccatctacgagcgcgcaggtcgcgtcgagggccgcaacggatccatcacccagttcccgattctcacgatgcccaacgacgacatcacgcacccggtccccgatctcactgggtacatcactgagggacaagtcttcgtggacagaggccttcacaaccgacagatctatccgcccatcaacgtgctgccttctctcagccgtctcatgaagtccggaatcggacgaggcatgacgcgcgaagaccacccccaagtctccgaccagttgtacgcgaactacgcgatcgggcaagatactcgcgcgatgaaggccgtggtgggcgaggaggcgctctcgcctgacgacttgttgtacctggagttcaccgacaaattcgagaaccggcttctgagtcaagggccgtacgagaaccgaacgatcttccagtcactggacattgcatgggagctgctgcgtattttccccgaggacatgctgaagaagatcaaggaagaagaactgcgaaagtactaccccagagacaagtacctcgaggaacaggaacggaacgacaagcgcgtccccccctcatga

SEQ ID NO: 105 - DNA, 1215 bp, Toxoplasma gondii
  source 1..1215: mol_type = genomic DNA
atgttggggtcgtcggagggcggcgcgcgcgggtgtccgtactggatcgttgcatgcaatacggacgagacgcacagcgccgagcagattttcagttccctgaagcacgcggtcttgggctctcgcaacgcgctgtgcgacgaggcctgtctgttggacattcctcatttgaagttcgggacttttgacgacttgattcgctccgtcgacattctgcagaagcaggacgcctacgtggagagtgtgattcggcgcatcgagcgccaggccgtggagatcgaccccgactgcgagttgaaagtcgtttggcagcggcactcgctcacggtcgaccagtacattcggcgttttcagtgggatgacgccaagtttccgcggctccgcgccatcccagaaaacctcgacgcgctcgtgcagtccgtgaccaagaccgacgacgaagtgcgagcgaaagtagcagtctggcaggaggtgaggcagcagatggcgaactcggcatcgggcaagaagacaggtcctgcgacttacttccagcgagacttgatcgacgtcttgtctccagacacggtccgcgacgacgacttcttggtgacagaacacttgacaacggcggtggtcgtcgtccccaggggtcaggagcgagagtgggaacagagctacgagagtctggacgcgttcgtcgtaccgcgtagctcgcgaaagttcaacgtcgcggaggacgcagacggaaacgcgctctggagagtgattctcttcacctctcacctccaggcgttccgacaggcggcgcaggcgaagaaattcgtcgtccgggacttccactacagcccgcaggcgtacaaggagacggtgctcgcgcggtcacgcgtcgaggcggagaagacgaagcaagaaaccttcctcagtcgtgtctgcttcgcggccttctcagacatcttcgtcgcctggatgcacctcaaagtcatgcggaccttctgcgaagcggtgctcagattcggagtccctcccgagtacgccgccttcgtcctccgtcctgtgagcgaagcgaaggaaaagaaacttcgacacgaactggacaaactgttctcgcccaaaggaggcttcgggaacagctacttctcaggcaaagacgaccctggaagcgacgacgaagacttctatccctacatctggctcgcgcttcagcctttcggcagtcaccgcgcatccgcttga

SEQ ID NO: 106 - DNA, 1191 bp, Toxoplasma gondii
  source 1..1191: mol_type = genomic DNA
atggagctctcgttcttcaacgtcgacgacggctacctggaaggcatctgccgagggttgcgctcggccttcttgacggaggaagattataaaaagttgtccgccgcggattcgctcgaggatctgcggtcggccctcgaggagacggattacggtccgttcatgcaggacgagcctctgcccctggcggtaccgactttatcccagaagtgtcgagagaagatggcttccgagttccggtacatgcggtcacaggcttcagggcctcttggcaagttcatggacttcatcgcaacggagaagatgattgacaacgtcgtcggtctgattcagggcgccctgaacagaaagtcttctcacgagcttctggcgcgcgtcgacccaatggggtacttccaggaaatggctgcgattgcgaacatggatttgacgacgagctacgaggaactgtatcgcgcactgttgatcgacacaccggtggggaaatatttccaagcttttctcacagagtctggatcgcaagccgcggctcactccgctgaacacggtggccgcagcctcgcagaagtcgccagcatcgtctccgaaacagatatcgagctgatgaggaacagcctcaagaaaggctggctggaggatttctacgccttcgtccagtctcttggaggcacaaccaaggaagttatgacgcacattctcaagagggaagcggactaccgtgtcctccgcttggtcgtcaactcgctctcttcgaatcagcaacagcaaatggatcgccaggctctgtatccgtcattcggttatctctatcccgaaggaacggatggcctgcgaaaggcgtggaatgacacgactgtccgcgcagctctggcgcctttctctagctacctgaacctttatgagcaatgcaaatcgttctacgttggacaggagggccagggcaatgaggccgcaatcaacatggcgagcacgagcaaattcaaatccctggaagacttgctctacagcgaaacggcgacaatgtgcgaacttgcgtttgagcagcagttccactacggaatttactatgcgtgggtgaagctgaaagaacaggaaatccgcaacatcgtttggattgccgacatgattttgatgaagagaaaggagtacatttccgaccagattgttcctctcttccctcctcgggtgtga

SEQ ID NO: 107 - DNA, 1038 bp, Toxoplasma gondii
  source 1..1038: mol_type = genomic DNA
atgctttccttcgagtttagttctggcgtgtatatgcgaaacaattcgtcagcagcgctgcaggaaactggcgtgtggcacaacgcgtggcgcgctcgcagtaaattgccgacggctttcttcatcgacatttcttcatttagtgtaggttcgttcttttcttcgcattctctggcgaataacacaagttcgacaccaccttttgtgtgcaaaaagcgatttgtgacggcgccgatataccttcgtttcccccgctaccacgaagaagaattcgcaatcttttttccgaccctgtcaagttcaccagcacccgcccccctcggcaaaatggcgatggacgacgcagaggcccagcggcaaatccagcagatggtcaagttcattctgaacgaggcccgcgacaaggcacaggagatcgaagctcggtctctcgaggacttcaacattgagaagctgaagttggtgcaacagatgaaggacaagattcgccaggagtacgagaagaaggcgaagaaactcgaaacccagagagccatcgaccgatcgactgcggtcaacaaagctcgcctgcgccgaatctctgctcaggaccaagtcctatccgaggtgtacagccaggccatgacgcagctttccgctgttagccgcgaccgagcgaaataccagaagcttcttgaagacttgattgtccagggtcttttgcgccttctcgagagcgaagttatcgttcgctgccgcgagatggacaaggcactggtggaagctgtgcttccgaacgcggtgaagagatacagtgaaatcatgcgcacagaggcgggcctgcacaagacagttacagctactctcgataaatcgggtcgatacctcccgcctccgccatcggccgacaatgatggaatgtcgtgctgcggtggcgtagtgctgatgactcgtgatggccgcatcacctgcgataacaccttcgacgctcgcttgcgcatggtcatcgttgaatgtgcaccggcgattcgccataccttattcccgagccatcaatga

SEQ ID NO: 108 - DNA, 588 bp, Toxoplasma gondii
  source 1..588: mol_type = genomic DNA
atgcaccaatttcgctgtctggcgcgaataaaaaagcattactgtggcggggatacagtagaaaatcattctgacaagaacaaagaattgcagttggaacaaatcttcgctccagcgaccgtttgcggccttagtcgcttgcggccagccgcgggctgctcgaaggtggttttagtttcaaagattcttctcgttctcgcaaaaatggctccggtactggggcgcgtccagggaactgacctaaaggttgcggttattggtgatgaggatactgtcgctggcttcctcatggccggcattggcatgagagatggacttggcaggacaaatttcttcatcgtggattccaaaacgaaacgacaagatgttgaagacgcttttcgcacgatgacagagagaccagacatcggcatcgtgctcatcaaccagcacgtcgctgacgacatccggtacatggtcgatctccacacgaaaattatcccgacaatcttggagatccccagcaaagacaaaccctatgacccgagcaaggactccgttatgcagcgcatcaaattcttctttggaggagaacttcccacgtcgtga

SEQ ID NO: 109 - DNA, 396 bp, Toxoplasma gondii
  source 1..396: mol_type = genomic DNA
atggcggcagcgaagggctccaatgcactcattcagcagctcctcgaggcagaggaggaggccgacaccatcgtcaacaaagcgaaggaaaaccgggtgaagatgctcaaggatgcccgcttcagtgctgaggaagagctgaaggtatttcgcgccaaagaggaggagcgattcaaggcggaatacgaacagaccgcaggccaagaagattctctggtgtcgagcctggaggcgaagacaaagggcgagattgagggcatcaagaaagactacatggagaacaaagacaaactcatcgagttcattcacagaaaagtcatggatgtcgatctttcgttggacacggaaacgattgctgttctacgcacttgcgacaaacgaggcgtcgcaccgtaa

SEQ ID NO: 110 - DNA, 474 bp, Toxoplasma gondii
  source 1..474: mol_type = genomic DNA
atgttctggtctgcatttctccagtgtgacccgaactcgactttcttcgggttcatgggtatcacggcggccatggttttctccaacttgggagcagcctatggtacggccaagagtggtgttggaatcagcagcatgggtgtcatgcgtccggatctggtaatgaggtctatcattccagtcgttatggctggtatcttgggtatctacggcctcattatctccatcgtcatcaacggctcaatggacacccctgacacctactcgagctatgccggctatggccacctcgcagcaggactgactgtcggtctcagtgcaatggcggctggactcgcgatcggcatcgttggtgatgctggtgttcgcgctaacgcgcagcagcctaagcttttgcggcatgatgcttatcctcattttcgccgaggctcttggactttacggtcttatcattggacttgtcgtcgctactaa

SEQ ID NO: 111 - DNA, 489 bp, Toxoplasma gondii
  source 1..489: mol_type = genomic DNA
atggagcgagctagcgccgctgcggcaacacgttcgcctatcttcgcgtctgcactgaccaagagaaaacccctcctattgctgcttggattcgcggtcgtcttgacgtttttcacttgcggggttccaactacctctctgcggctgaggggccccaaattcactctgcaggatatgaagaaagccatcaaagacgcgaaagacggtgtgaaaggtgttgaggacgctaagaaaaaacatcagaaggctgaggattccgccaagaaggcatcaggatcaaagaaagacaagctacagaaggaggcagacgaaaagaaagaaacgttgcagagcaagattaaggatatgaagcaaaaatgcgaggagttgcgtcaggtgaaagaaggcaccaagaataacaagggactcagtgataaagaaaaaaaggatttctcgaaggaaggagagaaagccgacgaggttctcaaaagatgcgggacggttgtgtag

SEQ ID NO: 112 - DNA, 1716 bp, Toxoplasma gondii
  source 1..1716: mol_type = genomic DNA
atgaggacgtctgttgcccttttttttgcggcggcaggcggcatcagcctggtctgcgcaccccaggtctctctggctgcgccagtgcaagggactttgggcccggacgtcgcagatactgcgggtgaacctgttgttcttcaagtcgctcgaggtgcggattctctgccagattcaagaggcaacatcgatgaagaaggcatcactgaggtagccacgacaggggttcctccacaaacacaatcgtccgggcgatcgtttggtcaacgtgtgatgtcctggtttacatctgctcggaacgcaatccggcgtccacgaaccgatgaacagggggccgtcccaggaccctcacagcccatccctagtgggacagattctactcctgaaggatgggagacggttcagtcaggcgatgtcccgcctggggagccggagccgaaagcacccactagatccccgagacaacgagccagagacatgtttggtcgcgtgggccgcttcttcggaggtgcccgacggtttgttggacgcggttggaggcggttcaccacgggtatggcgggagtcactgaccgtgttagaggacgacttgctctacgaagcagcttcgaattccgcaacgaggaggcggtcggacaatcagaactcgcatcgcttgcctcgtccatgacagttacggcccccgaaggcgaagcgttggaggttgcgcgtgaggcggggctgcggtctggggcctctatcaaccttgtgtccgctacaactggtgaacaagtgacggtatctctcagagcaccactcggaattggagagtatacggcagttttcagcggattcatctctggcattgattctgaactcgctgtgaaggcgtttctcgggaagactacagagtcgatgtcagttgccgagacagaggctagaatcctgaaaatcgtgtcgctgaaggacccggtggacgcaatgcatcgacttcgtctcttggctcccatcgagacactggtttaccgaggagatggtgattctgccgatcagagcgaaggcaggccggttgtcctggttcccaaggcctcgtcctcgctggtggatgtcatcaattttctgcgctcaggtgatgcctcagcattcgatgatcgagcgaagaaaattgtcctcctgggcgcgactgtgcagctgatccaacttctggcagcactgcacacgcgaaaagtagtgcacggaaagctggaacccaaaagcgttctgctcttcagtcatggccttctctacctctccgacctcggcagagcacgtcgccacggggagaggttcacgacatcccgtccgagtaggtacggtgcgcctgaggttttggagcaccccgagacaccgtacacgtattcccgggacgggtattctctcggaattatccttttcgagttatggtgcggaaggctgccgttcgatctggggacacccggagtcgattcttcagagaaactcgagaactcacaccctgcgaccttgtatcaaaccgttcgcaacttggatcagcgtctgtccttcgatgtctgcccgagtgacatgccggaatctgtgaaaaccctcattcgcaagttcctgactcgaagacgttggacccgcctggtgccacaagctgctctgcgcgatgccaatttccgccgcaccatgcagttgcttcaggagaccgttcaagggaatggtgaaacccaattgtaa

SEQ ID NO: 113 - DNA, 1719 bp, Toxoplasma gondii
  source 1..1719: mol_type = genomic DNA
atggaaaaaatggaggggcgaaagtcttttcgcgttctgggcaccccgctgcccgtcgccgcgctcgcggcaatccttcttctcgggtgtatgtacacacgagccgcaggcaccccggacgactcgttgtttccgctttctgaagacacatccgtggatcctcgcgagtccttcagcgcggaggacgtcctgaacgcgtttgtttctccagagtccgtggagtcgttgtttgccagcatcgttgcagagcaggtagtcgctacctccggcaacctgacagaaagcgcgccgcgggaccgcgattccgcgccagagcgacgatccgacggaggcactttgcgtggtcacccagaagatgcaggggaactgctccgcctcctgctggctgacagcgaagacatggagctgtggaaggcgaatttctttcggcacctcacccacagcatgcgtcacatcgtgcgagattcggttctcgtctccgagaaagcttttccgtcagagcaggcggacgaagcgggccgggaccccggcgacctgaagaaggcgctgaaagagactggcgaagacgtcttctgggaaagtcgccccgccagctcgaatgcggccgtcgcactcatcaaaagaaagatggaaaaacaagcaggaaaaacaggagaaggtgctggacacacatgggagccggaggtctcccttcgcttcaggtacttgagtttgaaggacgcgaagaaactcatggggaccttcctcgtcaacaccaaagtcgaggggttcccgactcccaaaggcatgccgcttcccgcgaaagagttcgaaaacgcaacagagccggtacctgctcacttcgatgcccggaccgccttccctgcatgcaaagacgtcgtcggacatgtcagagaccagggcgactgcggatcctgctgggccttcgccagcacagaagccttcaacgaccgcctctgcattcgcagccaaggcaaaggactcatgcccctgtctgctcaacatacgacgtcgtgttgcaacgcgattcactgcgcttccttcggttgcaacggcgggcagccgggcatggcgtggagatggttcgaacgcaaaggcgtcgtcactggaggcgatttcgacgctctcggcaaaggaacgacttgctggccatacgaagtacccttctgtgctcatcatgcgaaagcacccttccccgactgtgacgcgaccctcgtacctcgaaagactcccaagtgtcgaaaagactgcgaagaacaagcctatgcagacaacgtccatccctttgatcaggacacacacaaagcgacctctgcgtattcactccggtctcgcgacgacgtcaagagagatatgatgactcatggacctgtgtcgggggccttcatggtctacgaagattttctcagctacaaatccggtgtttacaagcacgtctctggcctccctgttggtggacacgcaatcaaaatcatcgggtggggcactgaaaacggcgaggagtactggcatgccgtgaacagctggaatacgtactggggagacggtggccagttcaaaattgcgatggggcagtgtggcatcgacggcgagatggtggctggcgaggctgcgtggcaggagaccgaaggcgtggtgaacggcgaggaggagctcccgggccagcatgcatctggcgcgagggtcggcgcgcatgcagaggaggagagagaaatgtag

SEQ ID NO: 114 - DNA, 1614 bp, Toxoplasma gondii
  source 1..1614: mol_type = genomic DNA
atgatcccccggacctgtgacgatccccgcagggactcgtgctgcccgctcttttctgtggattgttgccctccacatccttccccttcctctgtttttcagtctgatggcaagcatgaacttcccgcttccgaaatcccccactcttttcgggctgtccctgaggggacatttgccgccaggtcgccacggagccatggtgcaggccaaccgcagggagaatgcccatcagatgctacgacgtcagctgcatccgatacatcctcgcaggctccgcatgatgttccagtcttcactgattctctcctctcttccagcacatcggaatggccccatcaagggccacgaagtgatgctgtggagtcactggaacatgcatatatctctgggaccgtatcgagcgacgaacccgtttccgaagaacccctcagcagcgacgaggaatacttaccttcagttgatttcacaaaaaatgcaagttgcgaaatgtcacctggcgaccttcccgagtcactaaattccgtcagtgaacctgtctctaagttgcacagtggtccctcaagacatgctacggtcatacggcgagctccccagagcgcaagggacggtttctcagtaatgaggaaagacgcatcgcttcgacagcctgccattcctcccatggcaccggttcggcttcttccgtcaaggcggtgtcagtggctccgagcgctgccggtcgtcttccttatggtgttaatcgcctatattcttgctgtttttgtaatgtaccatgctctccccttgctgcagctgaacatccctcagtcgatgaaatttgcttctacttacaacagaggtctgtttgagcttttgggcgttggtatcctgactttcctcttcctcgtctcgtactggctagctgtcgtcaccccgccaggcagcatcccaaatactgacgaatggtcttactcggcgcccgaaattttcgacatagaagggctaccttcggttgtggaaacaaaaaagacgggggcacgtcgtcactgcaaatggtgtcgccggatgaaaccggatcgggcccaccactgtcgggtttgtcgtcagtgtgtactcaaaatggatcaccactgcccatggatctacaattgcgtcggctggagaaatcacaagtacttcatgctctcgctcatctatgggtcccttgattcccttctcattgcaatctgcatgttcgaaactgtcaagcgagtagtggcgtcggacaaggaccagttcgaaaaaatgtttatggtcctgttcgccgagacgctcgatattttcctctgcactctcatcactgggttcttcttttttcacacgcacttggtttgcaacggcatgacaacaattgagttctgcgagaagcaattcatgcgtccgcgcacgcccatgcaagaaagtctgtggaacaaaggctgttggagaaatttcacagacgcattcggatcaaatccattaatctggttgttgcccatagataatcgaccaggagacggtgttcacttcatcaccgaggacacacggctacttcacaccccggttctgcgacgtattcggacctttgagccaataattgaatcatcagtggactga

SEQ ID NO: 115 - DNA, 1200 bp, Toxoplasma gondii
  source 1..1200: mol_type = genomic DNA
atgaggacgtctgttgccctgtttttcgcggcgctaggcagtatcagcctgccctgcacgctccatgtctccctagctgcgccaatgcaaggaacgttgggcccggatgtgccagaaaacaccggtgagcctcctgttctttcgtcctcttccagtgatgttccactgcgaggggccgaaggcgggagcactcaggagggcgccgtggagggacccctgccacaggaatggagacaaccgcccccaaagcctccccgtcgacgtctagtcgagtcgatgcccagccattcgagttcgtctatccgcagaggaggagagagtatcgtcacagggcctgaaaacgttgccaatgacgagggtggttctccatctgacgatttgaagatcgtacagcccgaggatgtgccgcctgggggcccggggccgaaagctcccggagttggtaccaggatgagaaactgggccactagatccccgagacaacaagcacaacgagccagagacatgtttggtcgcatgggccgcttcgttggaggtgcccgacgggctgttggacgcggttggcggcggttcaccacgggtatggcgggagtcactgaccgtgttagaggacgacttgctctacgaagcagcttcgaattccgcaacgaggaggcggtcggacaatcagaactcgcatcgcttgcctcgtccatgacagttacggcccccgaaggcgaagcgttggaggttgcgcgtgaggcggggctgcggtctggggcctctatcaaccttgtgtccgctacaactggtgaacaagtgacggtatctctcagcgcaccactcggaattggagagtatacggcagttttcagcggattcatctctggcattgattctgaactcgctgtgaaggcgtttctcgggaagactacagagtcgatgtcagttgccgagacagaggccagtatcctgaaaatcgtgtcgctgaaggacccggtggacgcaatgcgtcgacttcgtctcttggctcccatcgagacactggcttaccgaagagatggtgattctgccgatcagagcgaaggcaggccggtgtcctggttcccaaggcctcgtcctcgctggtggatgtcatcaattttctgcgctcaggtgatgcctcagcattcgatgatcgagcgaagaaaattgtccgcctgggcgcgactgtgcagctga

SEQ ID NO: 116 - DNA, 291 bp, Toxoplasma gondii
  source 1..291: mol_type = genomic DNA
atggtttctgaagcgacagacaaagtgacgggagagaagattgccgtgctagttgaccatacttcaaccaagggctctcgaaaggacatggataagcagtggcactatgtgccatgtgctgtcttgtttggaaaggtgaagaactcaattacagcttgcaaccttcagaggtttctggttccattctattttgcgaggatcccggagagaccaataactcaggaggcgcgtcaaggagcaagaaaggctgggtccttaatgccctgccgctgctgccttgactcaggttga

SEQ ID NO: 117 - DNA, 1560 bp, Toxoplasma gondii
  source 1..1560: mol_type = genomic DNA
atgacagactgtcctttcgcggcgatccggggatcgagtgggcggatctcccggtcgcatgtcgcttttttggtcatcctggctgtctcagtcacgtcgaatccaacgctagcctttcatcgagggtctctgcaagggacagcaactcgtgacgacctcccgacacaagcgcaatatctgagtgccatcggtgctcacgagacgctggtccgtgcccaacgtagggctgcgttccagaaaactcccggaaagaatagcggccgcccccattccttgcttcaggatgtggctgaggagcgagaaaactccagtacggcggttggctccatccctcacttctccgcgttgccagagtcggaatgggactacaagcaacatggcaaggattggggcggcatgtgcgctacaggcatgcagcagtcgccagtcgatttacacattgaggggctacaggagccggagtaccgtaatctgacaaatgtttatatgaacgcgttcgccgggacgcaaccatctcgaacgcttaagccttggaagcgcggggatttcttctacacctaccctcaccagttcacgaaagtcgaagtgtacaagacgtcgaaggtgtttcaggtccgcgttccagaggaccaaatgacgcctctcggagcactatttagcacagacacgacggagatgtacactgctcaacacatcttctttcactccccctctgaacacacctttcaaggcgaggcgaatcggcgtgaaattgaaatgcagatttggcactattcgaacgacttgctgtcgtacgaatcgtccacaagcttgaaccatacgtctctccctttcctcgcgctcttcgctcaaagctctctcaaccttcccgacgtcgaggaggctctgaagcgagaccactcctctggctccgaccctagtcttccttcatcccactggcgtgtaatctccttgacattcatgagcgaagagcttgatcagacgagtctggcagaactcaagagcctcccgtccgagaggatgctcagcactcttcttagcgccgaaaggatcagcagccaagcgggtcaatccgagaaggtagaactggcgcatccgctaaatttgcagtcggtaatgatgatgcttcagctgaccaacacggagttctttgcctacgacggaagcacaaccatgcctgattgcaaggagaatgtacgctggtacgtagctcgtcaaccactccccgtcgcaaccgaaacaatgctgcggttctacaagatgttgaatcctcatcaactgaggagtcgggacgagaacgacgggaacttccggatgctgcagaatgtggaagacaacatgcgcaacgaagggaacgttttcttggtgcagggattccccctccaagttcttattgccaacagtcttggctttgataccatggcgaaaatgtcaaaggaaggcgcacaaatgttccaaggctggttcagcgctgcgggcgaacataccttcggccatagtggaagtgcgcttgccttcgccactgctgccctcgttttcttgaatactgttggcatataa

SEQ ID NO: 118 - DNA, 531 bp, Toxoplasma gondii
  source 1..531: mol_type = genomic DNA
atgtgggctgactacttgtcggagttcgcctcccttcacgaggacgccgagcgcatcctcgcaggcggcgacccgtcggagggtgtcgaagtcaggcagcagaaacttgatgcgttgatgaagaaaatgaagcgatgtttctcatctcttgagatgaacgttcgctccctgcagccccgcgagcgccagcctctcgaagcttcgctgatgaactgtcgccggcaattcaccgacattgaaagaaggactcttctcttgcgagaaggcagcagaggttccgggcaaccgagtgcgtcgaagagtcgtcaaaacactttggaaaagctgaaaaaaggaagcagtcagctagaggagagcctgcggctagcagcggaggccgagggcgtcggagagtccgctctttgttcgctgtacgtacagcgggaaacgctttcgcggacaatgacgcgaactaaggacgttcagcgaaacatggacgaggcagacacaatcgtcaccaagatgtctaagtggtggaatggtatctggtag

SEQ ID NO: 119 - DNA, 834 bp, Toxoplasma gondii
  source 1..834: mol_type = genomic DNA
atgaggacgtctgttgccctgtttttcgcggcgctaggcagtatcagcctgccctgcacgctccatgtctccctagctgcgccaatgcaaggaacgttgggcccggatgtgccagaaaacatcggtgagcctcctgttcttccgtcctcttccagtgatgttccactgcgaggggccgaaggcgggagcactcaggagggcgccgtggagggacccctgccacaggaatggagacaaccgcccccaaagcctccccgtcgacgtctggtcgagtcgatgcccagccattcgagttcgtctatccgcagaggaggagagagtatcgtcacagggcctgaaaacgttgccaatgacgagggtggttctccatctgacgatttgaagatcgtacagcccgaggatgtgccgcctgggggcccggggccgaaagctcccggagttggtaccaggatgagaaactgggtcatgagagtgccaaatatagaactgcaaccacccaggcaggtggttggtcgcatgggccgcttcgtcggaggtgcccgacgggctgttggacgcggttggcggcggttcaccacgggtgatgcctcagcattcgatgatcaagcgaagaaaattgtccgcctgggcgcgactgtgcagctgatccaacttctggcagcactgcacacgcgaaaagtagtgcacagaatgctggaacccaaaagcgttctgctcttcagtcatggccttctctacctctccgacctcggcagagcacgtcgccacggggagaggttcacgacatcccgtccgagtaggattcctggtacgctcttggagcaggtggattga

SEQ ID NO: 120 - DNA, 999 bp, Toxoplasma gondii
  source 1..999: mol_type = genomic DNA
atgaggacgtctgttgccctgtttttcgcggcgctaggcagtatcagcctgccctgcacgctccatgtctccctagctgcgccaatgcaaggaacgttgggcccggatgtgccagaaaacatcggtgagcctcctgttcttccgtcctcttccagtgatgttccactgcgaggggccgaaggcgggagcactcaggagggcgccgtggagggacccctgccacaggaatggagacaaccgcccccaaagcctccccgtcgacgtctagtcgagtcgatgcccagccattcgagttcgtctatccgccgaggaggcgacagtaatgttctactgcctgaggccgaaggcgggagcactcaggagggcgccgtggagggacccctgccacaggaatggagacaaccgcccccaaagcctccccgtcgacgtctggtcgaggcgatgcgcagcaattcgagttcgtctatccgcagaggaggagagagtatcgtcccagggcctgaaaacgttgccaatgacgagggtggttctccatctgacgatttgaagatcgtacagcccgaggatgtgccgcctgggggcccggggccgaaagctcccggagttggtaccaggatgagaaactgggtcatgagagtgccaaatatagaactgcaaccacccaggcaggtggttggtcgcatgggccgcttcgtcggaggtgcccgacgggctgttggacgcggttggcggcggttcaccacgggtgatgcctcagcattcgatgatcgagcgaagaaaattgtccgcctgggcgcgactgtgcagctgatccaacttctggcagcactgcacacgcgaaaagtagtgcacggaaagctggaacccaaaagcgttctgctcttcagtcatggccttctctacctctccgacctcggcagagcacgtcgccacggggagaggttcacgacattccgtccgagtaggattcctggtacgctcttggagcaggtggattga

SEQ ID NO: 121 - DNA, 795 bp, Toxoplasma gondii
  source 1..795: mol_type = genomic DNA
atgtttccccgtgtcgctttattccctgtccccacttgcgatctttttcttgtcggtaggagccgtctatcacgtgctgcgaagttgcatcttacgcgacagctggtggtgtctgttgcgtggctgcatcgtcacggcgtcgctcacaatgacttgaagcttgagaatgtctttcccagtgaagaagggaaggctgtcattggcgatttgggtttcggagtgcaaattggaacgtcggcgagactgaaatacacagcggcctatttagaccctcatgctgcggaggaatgccttaataatcaagtagaaacagttgcaaatgaagggacaggtgcgtgggcactgggaactctcgtctttgtgatatggtgtagatcctacccagtcgtttcgcgtgagcaagcctgcctttccactcgtgatttgcgggaccgcctggtgacaatggcaaagacaactaaacccacgccatcatctcaccactgccaggaactcccctctccggtgaaagacctaatagccggatttctacagtggagccgtgaagcgcgacgtctcccaggtgatgatgttgacgaattccttgctgctaccttgctgctacagtctcagaagcagcgacctcctcagcgagtgtgtgacacggataattgccacattcagatcacggcgacagtgatcccaaaaacgaaccattggttcaccattctgacaaccggcaagtcgggccgcccaatcgactttctcatctacgaaatcggcagaggacttactggcatccgtggccaggagtga

SEQ ID NO: 122 - DNA, 369 bp, Toxoplasma gondii
  source 1..369: mol_type = genomic DNA
atgtttacatggacgcaagaatcgcagcagcaagcattggtcgacgagaaatcgtcatgcttacacagaaggatgcatgagcattatgaaatcttctctttaaggttgtggcgtcaaacgtatccattcagattagattccgtctccgccgcgacggcgcaagaggtgaagcagttcaccattacgtgtgcacagaagactacgccgcaacccgacatccactcgtgcacaggagtccccgttgaggtccggaaaatcttcacgggatttttacataggttcgtcgaagatcgacgtctccccggtgaggttgcagaggagttccttgccgctacacacgctggtggtatcgaggggcctgatcagtaa

SEQ ID NO: 123 - DNA, 747 bp, Toxoplasma gondii
  source 1..747: mol_type = genomic DNA
agcactcagaagggcgccgtggagggacccctgccacaggaatggagacaaccgcccccaaagcctccccgtcgacatctggtcgagtcgatgcgcagcaattcgagttcgtctatcggcagaggaggagagagtatcgtcccagggcctgaaaacgttgccaatgacgggggtggttctccatctgacgatttgaagatcgtacagcccgaggatgtgccgcctggggggccggggccgaaagcacccggagttggtaccaggatgagaaactgggccactatatccccgagacaacaagcacaacgagccagagacatgtttggtcgcatgggccgcttcgttggaggtgcccgacgggctgttggacgcggttggcggcggttcaccacgggtatggcgggagtcactgaccgtagcgaaggcaggccggttgtcctggttcccaaggcctcgtcctcgctggtggatgtcatcaattttctgcgctcaggtgatgcctcagcattcgatgatcgagcgaagaaaattgtccgcctgggcgcgactgtgcagctgatccaacttctggcagcactgcacacgcgaaaagtagtgcacggaaagctggaacccaaaagcgttctgctcttcagtcatggccttctctacctctccgacctcggcagagcacgtcgccaaggggagaggttcacgacatcccgtccgagtaggattcctggtacgctcttggagcaggtggattga

SEQ ID NO: 124 - DNA, 1470 bp, Toxoplasma gondii
  source 1..1470: mol_type = genomic DNA
atgagcatcttgggaaagcatacggcgaccgtcggagaccgatacaaggtacgactcacaccagaatatggcccagggggcggttatgggcattgtcgcgattacctgctgcagagcgagagttgttggaggggggaccttacgtcgggggtcagaggagttctgacaaagaaaggaacgagagcgagaacgacaaaacgccacgatctcgtcgctgtgacgtcgggagaacattactggaaccaagggcttgtctaccacgaggaacagacagcgcctcctgttgcagcttctagcagtttcatgcagagcaccacttctcttgctacgcctgctgacctgaacgctccggttgacacccagggacagctcgatatcaacagcgtcctgaagaatcgacctcccgcagaggcacagctctcgcctcgcgagattgcagccaaaacccatttcgaagcaatgtttgccaaaggcctgcaactgacggttgaatccatattcaccggagaaacctttaccctgacaaaaccggcccgtttcttaggatggggatcaacggcgattgtttttggtttgcaccgcgtgaaagtgggcggagcaagtgctccacaacaattggcagctaagataaacgtcaggagtttgcaagaactgcaacatctttcctcgtctcagaaaaaaacggctcttgaggatatacaagaacgttttctccgggaagagagctcagcgaggaatgcgctgcaacatgtgaccccagaaacggctctggagcacggtgtcctcttcccagttgatgtttgccgtatttctaaattgttctccggattttgtgcaggcatttcctacgtaatacttcctgttctagcattgtttcctgtttttacttgcgacctccagcaggtcgttaagagtggcctatcacgtgcggcgaagttgtatatcacccggctgctgctgcaggctgttgcgtggctacatgccaatggcgtggctcacaacgacttgaagctagagaatgtccttctcagtgcagaaggaaaggctgtcattgcggattttggtttcgcagtgaagcttggaaccgcatcagccattcagttcactgctccctatttggatccgcaaaccgcagaggcagtgcctcaagagaaaacgaaaacgaccgcgagtgaggaaagagatgcatgggcgttagcaactctcctgtttttgctttggtgtggatcgtttccatacgtatcggatgagcaggccgacctccccaccagcgacttgctgaaattgctggtgacactgggaaagacagaaaagccagcgccgaacttccatctgtgtaaagacctcccacctgcggtgggacatctcgtaaccgcatttctacagtggaacagcgacaatcggtctcgccccggggatgttcttgacgatttccttgctgctacagtgtccgaaggagcgagcgcctaa

SEQ ID NO: 125 - DNA, 615 bp, Toxoplasma gondii
  source 1..615: mol_type = genomic DNA
atgagcatcttgggaaagcatacggcgaccgtcggagaccgatacaaggtcgttaagagtggcctatcacgtgcggcgaagttgtatatcacccggcagctgctgcaggctgttgcgtggctacatgccaatggcgtggctcacaacgacttgaagctagagaatgtccttctcagtgcagaaggaaaggctgtcattgcggattttggtttcgcagtgaagcttggaaccgcatcagccattcagttcactgctccctatttggatccgcaaaccgcagaggcagtgcttcaaaagaaaacgaaaacgaccgcgagtgaggaaagagatgcatgggcgttagcaactctcctgtttttgctttggtgtggatcgtttccatacgtatcggatgagcaggccgacctccccaccagcgacttgctgaaattgctggtgacattgggaaagacagaaaagccagcgccgaacttccatctgtgtaaagacctcccacctgcggtgggacatctcgtaaccgcatttctacagtggaacagcgacaatcggtctcgccccggggatgttcttgacgatttccttgctgctacagtgtccgaaggagcgagcgcctaa

SEQ ID NO: 126 - DNA, 1707 bp, Toxoplasma gondii
  source 1..1707: mol_type = genomic DNA
atgagaaggctgctgctttcacctgttggtttcgtcattgtcctggctacactgttagaatgtcacccgcccgatcggtgtgttgctcatcatggcagcagcactgatgaatcgaacgtgtggtctcctcgaggggcccaatttgtacccggggcgtcagaggccgctgtaaaaaatcaggttggtattcctgacagtgcccttctgtggccgtcgcaagatgctacggaaaccgggctgcggcctacggagcaagtagaggcacgatcgtcatttcctgctgcaaagcaatatttatcagaggcggcacctgcgcgtggcgaccttccaccgcgcgccacaggccttctgagacgtcgaggagctagagtgcgaacggtgaaagctcacgagatcggtgtggagactccaaaaacgtatggctgggatcacagggttgtcgacagtgagaagcagaccacggcgcccgttgcagattcaagtggcttcattcaaatcccctcttcgcgcgccacgcctaccaccctgaacgctccgattgacctccagggacggcgcgatatcagaaacatcgtcaggaatcgacctcccgctgactcagatttatcgcgtagcgagattgcagccaaaaacggattcgagcgaagatttgtccggggtttacaactgaaggttgagtcattattcagcggaggtgttttcacgttgacaggaccggcgcagttcctgggaattgggtcaacggcaattgtgtatagtttgaataaggtgcaagcggacacagcaagtgcgccagaacgggtggcggttaagataagcatcaacaatctacaacgcctaagaagcctttctgtttttgacaggcaagagttgctagataagacgccagaacgctttgtctcaagcgaaggcgcagtgaggaaccttctgccaggtgtgacaccagaaacggctctggaacacggaattctgctaccgctggatatttgccgcgttactaacttgccgtccggttttcgtgctggcccggactacaagatgtttccccgtgtcgctttattccctgtcctcacttgcgatctttttcttgtcggtaggagccgtctatcacgtgctgcgaagttgcatcttacgcgacagctggtggtgtctgttgcgtggctgcatcgtcacggcgtcgctcacaatgacttgaagcttgagaatgtctttctcagtgaagaagggaaggctgttattggcgactttggtttcgcagcggaagttggaacctcaacaaaactccggtcaacccctgcctttctagacccgcaaaccgcggaagaatatcttcaacggaaaacggaaacggtcgtgactgaggaaagagatgcatgggctctgggaactatcatatttgtgatttggtgcggatcttacccgttcttttcatttgaagaggctgtccttcctcctgcagtgttgtggcaaaatgtggtgtttatgtcaaagaccactagacctgcacctccacttcagcattgtaaggggatgccatctccagtgaaagccctcataaccggctttctccagtggaactctgacgatcgacgccgccctcgtgatgtcgttgaaggattcctcgccgctacagcctcggaaccagcgacctcttcggcgactgcggcagaaggaagcgtcaggccgcgcgcatccagatctcagtga

SEQ ID NO: 127 - DNA, 1626 bp, Toxoplasma gondii
  source 1..1626: mol_type = genomic DNA
atgaaaaatactctgttgtcacctgttggtttctttaccgctctcgctgtacttatagaatgccacctgtgtgaccggtgtgttgctcatcatggcagcagcactgatggatcaggcttacggccccctcaagaggtcgactcggcaccacgaacgccgtcgatcgctgttaaagagcttgccacgtttcctggagatgacattcagacgtcatctcaagaattgcccggctatgaactttggaccagggaacaatcaggggcatctgtgcgtgttgggtttccgcagaacgccgaaagttttctgacacaaagagaagcgagagacgaaatcgcgaatgctcacgagctcgtcgctgtaactccagaaggcgatgcgtggaatcacagtggtgttgtccccgaggagcagactgtcacgcctgcttcaggtagcttcattcagaggcaagccgcgcatgcaccgccttcgactcgattgacgcccgtggaccgccgtggcaggtcacacacagtgtcagctgtcagacggcgggtgaccgtggaagacgttatgcgaccggaccaatcggcagccatgcatgcagtgttgtcagcatttggaggaggcctggttctgaaggctaagaacaaatggggtagaacacgttacacgctacagggacccgcaacattcttaggaatgggagccgagggcattgttgtacgtctaaatcaggtgaaaagcgaccgggaaagatcggtgacaccggtggcagtcaagctgtgcctcattcgtgcagcagtgttctcggggctgacatggtggagaaaacgaaggaccagaacagaactaatgaaactgtttctgtcgaacgagaattctgtgaagcgtgctctaccagatttggacccggccgaaatgctagagcacggtctcgtcgttccacatcatgctgagcttgtttccggtatgcccacgtggtttgccgcgggcgactcattttttgtattacccgttgtttctgtgtctcctctttttacttgcgacctcgaaacggtcgtgcaaaacccgttgaccttttgggcgaagatgtacattacccgccagttgctaaagagtattgcgtggatgcatcaaaaaggcatttctcataatgacttgaagcttgagaatgtcctgctcagtgcagacggaagggttgccatcggcgattttggtttttcaagccccttcggggcttcgttgcccatcaggggcactcatctatacatggaccccgacagctcagaagcattttttgaacaacgagagaacgaaatcactccccacagagatgcatgggcgactggagtccttcttttctatctgtggtgtggcgtgtttccattcgggttacagaatgtcgctaacgcgagtccgccacaggtgatgagggtcacagtcatgcatgcaaggactaccaggccgccgcccaacttccggctgtgtcggcgcatcccgcgtgaggttcggaacctcgttaccggatttctgcagtggaacgaggaagctcggcgtcttcccagcgatgttgccgacgcgttccttgccgctacggacgacggtggtagagaggcgcgtcggataagaacgcatcaattttga

SEQ ID NO: 128 - DNA, 600 bp, Toxoplasma gondii
  source 1..600: mol_type = genomic DNA
cacgtgctgcgaaagttgcatcttacgcgacagctggtggtgtctgttgcgtggctgcatcgtcacggcgtcgctcacaatgacttgaagcttgagaatgtctttctcagtgaagaagggaaggctgttattggcgactttggtttcgcagcggaagttggaacctcaacaaaactccggtcaacccctgcctttctagacccgcaaaccgcggaagaatatcttcaacggaaaacggaaacggtcgtgactgaggaaagagatgcatgggctctgggaactatcatatttgtgatttggtgcggatcttacccgttcttttcatttgaagaggctgtccttcctcctgcagtgttgtggcaaaatgtggtgtttatgtcaaagaccactagacctgcacctccacttcagcattgtaaggggatgccatctccagtgaaagccctcataaccggctttctccagtggaactctgacgatcgacgccgccctcgtgatgtcgttgaaggattcctcgccgctacagcctcggaaccagcgacctcttcggcgactgcggcagaaggaagcgtcaggccgcgcgcatccagatctcagtga

SEQ ID NO: 129 - DNA, 2094 bp, Toxoplasma gondii
  source 1..2094: mol_type = genomic DNA
atgaggcgttcgaggtcaaaataccatgtcggtacttttgtcactgggtcagctgttcagcgactgacgctagttggaatgtattctgcagtgtgggtcacttcagcacatagctcgcctgtcaattctgcaactgtgtccccttcgttctttttcctgcattccaagccgcctcatggctcccccccaaatgagaggaccactggagagtccagtggctccaacgcctccatagagttgatggaaatgcagcctacgcaaccagagtccctttccccgaccgcgatggccgcacgtcgcccgaatgtaccaccacttcccgaagcaagcgggctgccgtcgcgcttgcctccatggcaggaaacgcccttttcgcctggaaagggtgacacacaggactctgcacaagtgagcactccttcaggcactccacgcgtgcagccgataagttccccgaagcgagaagctctttttcggatgtcccctcccccggtaccaaagcgttctctgcgcaggactctttcgcaatatttccgtgcacggaaacattctggtgtcccaaatccccgcgcctctgcacaactgccaacagccgatcgggagcaagcagtgaaccggccgcacagagcttcccggctgatgaagagttctccgtcttctgcaagtcaccaggcgcatggagcagcgcctcatcggcggcgcgctgctacctcaccccagcctcgcacacgcagagacccagcaggtccagttggtcggacgctgaggaattggattagcgaccgattatcccgcgcatacagacatgtcaggagcaggctgcgcacgggatatgccagactgctccggcaacttcattccatgacagagaaaattcccacaccaccagtacagctgcccggtcaggagtgcgtaaacgttttgggggctcatgtcgctcgacaggtggccgactggaggcaacaaatgggacgcacctcgctcgagtttgcagtggatgcagcttttcctcgcgataaagatatttcgttcaagtcatacatctcaaggaaaagtgtcactttacgcatggggaaggttttaggagggggtgcaaggagcattgttgtggaggtaacgcgagttgataccggcgacagatgggctttgaaagctttcctggttccacgggatgtcattggctcccctggaaccccaccgccttgggacgcaatcagcgaggaagcccatgcgataaaattactaccgcatacagttccagctgtagtttatcgaaacctgcggtttctagtccccgccgacgtgttgatatacgagggagacggaatggagaagctttggaacagacgcggaacgggctcaaacttctacacaacctatcttcttttcccaatagctcaaggttctctgttggacgctgtcagagcaatgttccgagatgcgagacggggcaatgctgaggtgtctgatggtgaggcagcacgcaccctggccgcgaatgtgagtttttcgattcagattatccgcctcacggcactgcttcacagccacggggttgtgcatggggacttccaaacgaagagcttttttttgtgtcaagacggctctctgttcctcggtagagtccgcagtctgacgcgagtaggagccccatatcgaagccccagttccgcgacagacagtcctcgctgcactcccccagaggtgctatcccccccagaaaatgcggcttttacattttcgctgaatgcctgggaacttggttgcattctctaccagctctggtgtgagggtcttccgtttggtctgtccccgacacccgagacacctgggaaaatcgtgctgcctcctgtcataacatcgccttatttgcagacaaagaaacgatctggcttagcgggcacatcaacacgtccagtcaagcatctggtgttcactggctgcgttaaaaacatgcccgttgaaatgcgacaattgattcgtcgcctgctccaggaagacccacacaaaaggttactcccgactgagattcttcgggatcctgttttccagaaactcgaagagcaatcgaggccaccggacgcccaggcttag

SEQ ID NO: 130 - DNA, 345 bp, Toxoplasma gondii
  source 1..345: mol_type = genomic DNA
atgtggttatggtttccttgctgtcagtttatacatgtagccgcacaacacgaggaaaaacaatgcagtggaagtgcggtgcattcgggtcgaacgcgcgtagcggcacattttgttcgtctgaagacaacgcgcacgtgctgcaagacagaggatggtctttccgcagtcattccgctggtcactcaatgcgcatatcagccgggcaagccaagcaactcaggtggatatttcctggttctagaaattctgcctgatcgttgcttgtttttttctttgaccacatcaaatactctgacgggaaattcatctagtgtattggaaattaatgaattattgaattga

SEQ ID NO: 131 - DNA, 1485 bp, Toxoplasma gondii
  source 1..1485: mol_type = genomic DNA
atgacggtggcggtgaacgccatggtaacgtacggggagctcgagcgaatcttctgcacgtgcacatcacactatttctgctctaccgtgccacaatccggcgcagtaacttctgaaggagagctgcagaacgaaacaggacctgagggtgctcaggaagggcgaggaatggaaggtgatgatcccaccgtcctatcagatacggcgcgtgcgcctggtgacaggtcaaatgcgcagaatcgaggtgaaaagagcgacgtgaacctgcatgcgtctgttgtggtaccgcgggagacggacaatcacggggagttttcagtaacgctctacccaccacggccggcggaagaagacaagcagagtatggagcagagtgaaaggcccgagtcagaagccgtcctccaggcgaaggatgacgatgaggtatcagaggacaatgctgtgctgagcgaacggcaagagtggcaacgcatcgaaacagtgggtagggagtggttgaaatctcaggttgctgcatttgtgccgccagacgtcacaccttggcctgatccagattcgtcggtggatcggctgtttgcaaagaagtttccctccgggaaacttttaattctggaacctgatgagcccggcggaacgtatgaggtactttatcgaggtcccgtccttgggcgaggcacccgtgggattgccttcaagggaacaatggtggccaccggagaacactttgcagtgaagttgcaatttgtgcgcaagtctttattccgaaggcgtagttccttactacgggaccttgtcaaatatctacagcaagagtttgcagtccgcaatatgctggttgcggcatacggcgaagaaaacgtacaaaaaaagggtatggtgctgcctctaactgttcgccgacggcatgcgttcggcgactttattacaacgccctttagcttcacgatgttttggaatttccttgttttctatccattaatgaaatgcaccctaggaaatctcttggtaggcccacattggccgagagaagcgagattgttcgtagcgaaacgcctcatcgagattgctgcagcgcttcagcgtgcaggcgtattgcatcgagatatctttgagtcgaaaatccttcttcaagaaggttcaggtgatatttttttcgcggatttcggagacgcttcgggaaagcacatgcagagtggtatcgcttggatagagctacagcttgcagagtcctccaggctcggtcacttggtatactacgtttatacaggaaaaacgtttactaaattctggaagttcaggtgcactgataacgtgctttttcataacgatgtgaacgtgaaggacgtgccccttgctgataaactcatccggaatgcaatcaaagcattaataacctgcaataaggataagaggattctcccacaggaaattactgcatctattccgtttttccgggatgaacctgaattctatgagagcaaatga

SEQ ID NO: 132 - DNA, 1041 bp, Toxoplasma gondii
  source 1..1041: mol_type = genomic DNA
atgaggttcccggtggcttcgctctttgcggcaggttggctcggcctagccgtttctgctgaagaacccacgtgggagagtcttgaagagcgaggccgtgaactcgtcaagcaacatgtatccgcagtttcgggatatacgcacctttttgagcgcgagctgcacatggtgaatgctgcgactgcggtcctccctttgggcagcgttcttgaggtatgggggggcaagcgtctggttcgcggcagaaacgttgctgtgaccgaaggcgcggtcctgtttgacgtgacggacaacgaatcaaaacacgagtacacagccaagcttttttcagtggcgaacaaaagcgtggtcaaagccttgtcagctgtgtggaagtccttcaaggagaaaaacgtcgagaacgtgctggtcgagcgcttcgggtcggacgaaaatgtgctgaaaagcggctttctcgtgccggtaggcggaggcagcatagtgaacgttccccccgttcttcagccggcagggaagtggtcggatacttctttccttggtgcgctgattttgtacccccgggtggcacaaactctggacgccctactctggtctggcgctacgttggaaaaggctgcgaaattcttcctcattcgccgactcatcagaagtgtcggagacttgcatcgcagcgagctttgccacggcaatctccacccaacgaacattgtgattttagccgagtcgggggacattgcgctcacttctttcggtgacagctgcttccagtctttgtttgtgctttccgacgccatgggcgtgggcggtgccaagcaagacacagtgcgccttggcaatattgctcacgcgatctacactgggaaatacccttctgacgacctggacaaatgcaacgacaaccccgatttccctaaggctgatgacacggatgtgaacgacgtggtcattcgcgctgccatcatgcggctgctctgctgtggcgagtgccctatgcaaaagcctgccgacatggtggtcgcgagtccgcttttctcctcgtaa

SEQ ID NO: 133 - DNA, 5346 bp, Toxoplasma gondii
  source 1..5346: mol_type = genomic DNA
atgacgggcggcgcggctgcgccccgctcctcttcgggggcctctcgcacacctctctctctgcgtttctctctgacgcttctctgctctctcgtagccctcctcactctctctgtctctctctccactcccgcttctcacacctatgtcttcgccgtcgtcgccgccgacaccggcgtatcctctgtccctggacacgagcgtggagcttccaaggccgggccagacgcgaccgtgaaatctaagaggcgtcgtgagagatccaagaaaagcgatggaaacgtctccgcgaaaggcggtccagaagagtcagagatgcaggaccaatcgaccaccgacgtcgacttcgagacaacgcctcccgtggcacgtgatgcaaagactcaaagcaaacgtgatgcaacgacaagagggaagaagggcaagaggagcagaaggaagcgtggtgagaagtccaagaaaggcaatcgggaggcgggtgcgaaaggcgattcagaggcgtcactgacggaaggcgaatcgaaggccgacatcggaggggagacgacagcccaggtggaacgcgatgcgacaacaaaagggaagaagagtaagaggagaaggagcaggagcagaaggaagcgtggtgagaagtccaagaaaggcaatcgggaggcaggagcgaaaggcgattcagaggcgtcactgacggaaggcgaatcgaaggccgacatcggaggggagacgacagcccaggtggaacgcgatgcaacaagaaaagggaagaagagtaagaggagcaggagcaggagcaggaggaagcgtggtgagaagtccaagaaaggcaatcgggaggcggaagcgaaaggcgattctgaggcgtcactgacggaaggcgaatcgaaggccgacatcggaggggagacgacagcccaggtggaacgcgaggcaacaagaaaagggaagaagagtaagaggagaaggagcaggagcagaaggaagcgtggtgagaagtccaagaaaggcaatcgggaggcggaagcgaaaggcgattctgaggcgtcactgacggaaggcgaatcgaaggccgacatcggaggggagacgacagcccaggtggaacgcgatgcaacaagaaaagggaagaagagtaagaggagaaggagcaggagcagaaggaagcgtggtgagaagtccaagaaaggcaatcgggaggcggaagcgaaaggcgattctgaggcgtcactgacggaaggcgaatcgaaggccgacatcggaggggagacgacagcccaggtggaacgcgatgcaacaagaaaagggaagaagagtaagaggagaaggagcaggagcagaaggaagcgtggtgagaagtccaagaaaggcaatcgggaggcaggagcgaaaggcgattcagaggcgtcactgacggaaggcgaatcgaaggccgacatcggaggggagacgacagcccaggtggaacgcgatccaacaagaaaagggaagaagagtaagaggagcaggagcaggagcaggaggaagcgtggtgagaagtccaagaaaggcaatcgggaggcggaagcgaaaggcgattcagaggcgtcactgacggaaggcgaatcgaaggccgacatcggaggggagacgacagcccaggtggaacgcgatgcaacaacaaaagggaagaagagtaagaggagcaggagcaaggggaagcgtggtgagaagtctaaggaagccgatcttcaggagggtgcgaaaggcgattcagaggcgtcactgacggaaggcgaatcgaaggccgacatcggaggggagacgacagcccaggtggaacgcgatgcaacaacaaaagggaagaagagtaagaggagcaggagcaaggggaagcgtggtgagaagaccatgaaacgcgatacgcagttggctgggaaaggcgagccgcagacggccgcgattgtcgatgcgttgctccagatggagagcgggtcgttgaccgaaagggaagccgtggcaaaagatccgaaagaaggtaatgcagatgcgattgtcgggaccgactcgatcgaagcaagagtcgctgtcagcgcggagagaacggaagaaggcggcaagccagctgaggcggtttctgccgccgatgcttccaaatcggccgaacagggccggcagaagtccacgaagagggggaagaagcgccaccgcagaaaccgcaagaggagcaagtcgaagaagtctcacacaggctccagcgcgccgaccaccgctggtgtttccgcaccgacaggctcgctccccctgtcttccgagactccgacctctgcagaaaaggaggcgacagagtttctgctcagcagcggtttccccgccatctcagcggttctcgcgagtcgcgggtcgaagcttgacgccgcgaaaaagtcgaagggggcccccgggtcgacctcggtggtcgattcggagtcagtcgtttcaggacgcgagcgacagacgcacgatgagtttctgcctcccgtcgacgtcgcttccgtactcaggagggcgaacacaggggacgagtctctcttcgacccagacgaggcggataacaccagcgctgcgaccaaggcttttgaggtgacagatgacgaacccaaggctgaaaagccgagtgagactgaaacgcagttacaggagttgatggcgactgttcctcagcttgacgagctgttgcagaagttacctaagcttgaagagctcgcgacgagggttcctcagcttgaaaggctgtccgagagtgaggctcagcgtgaagcgtcaaacgagcatggtcgtcattctgccgagctgagagcgactggtccttcgctggatgagccaatgcgtgggcctcggtttggcgcgctgcaagcgaccgagtcgaagccagtcccgacgtctctcgcgaacgttctaatctcgtctcttgtcttccctcctcgcttgtcgttgctcttcgcccagcctgccagcggggcgacgcagaagaaggcgaccgttggagaacaaacttctccggcagactccccgcagacgaaaggagcgctgccgccgactgcagagttgccgaaggagcgggcagcggctaactcgaatgtcgagacaacagctaagtctcagggcgacagcgaagcggagaagctgttgaaagagttgagggagctcgagaaggggatgcagtcgcagacggtcggagacatcagttcgacgcggggtgagacagagtctgacaattcgcggactcggcccgagagcgatatcaagtaccggggtatgtcgggctcgttttccggttccggcccggcatcttcgcggcatatgaagcaccgcgtgagtattcgtggttcgtttggtgaagcggatgttgtccttctgcaccaaaagccacaacgcggcgacgagaccgccgagcgcaccagcagcttctcggcaaccgccgacaacagcgtctctgggcctcggcgccgcggcttcggccctgtcccgcgctccatcttcggttccgcgttcagcgacttggaagcggaactccaaggcgacgtcgccgagttcggtgacgcggccggcatcgaggagagcttcggcttcttcggcgagaggcgtggcgggggtgaccgcagccgccgcagccgcgagcggaggagcgaggaccggtcgcgacgcagacgcaagggcagcaagggccatcgcgaggccggttcgtctgcagcaaccccaggctcgagacacctgcggcaggtggaccgccgatccggattggcgcgcgccgaagacgtcgaccccgaagagagcagtgaggaaagtcgcggaagccgtgaagagcactccatgaaaaagctgccagcccgcgagcgcagctcccgatcggccggtccgagcctttcgcgcagacgttcgcgcctcgatcacgaactggagcagcgacgtgccaaggaagcgatggaggcggcagagacgttcgacgagcgcggtgggtacggcagcggaggtcacaactggctgacgcctgggccgcccctcgttgtgtctggtgagagctggccgagacgcgggctgctgtatccggagccggcgttgctgttggaggactctcgcgcggtgcagatgatggagaacgcggcgaaggaacttgcgcattcgcggcagacgccagttctcccgggcgaccgcggcagagtcgccgccgcgggtggcgcgttcgagaggctctttccacgtggtgccctgttcacactgcagccgacgcacggtcagccgttcgagccgaagaccttgaagcgcggccgcttcctcaaggccggcggaggcacccttctcttcgaagtctgggagggtcgaacgcgctgggccctgcgcctgcacctgacggagctgagtgagcgggagcggactgggctcgtgtcacgtttccccgtcgaccgagtttcgggtgccggcgtgagtgcatggcagcggacggcggatggcgtctgcgcagaggctgaggagctcgagctgcatgcagtgcggattctcatgcagcagaacgagcaaccgcgggacctgttctgccgcgagagaatcgcgctgcccgtagccgtgggcgaagtctcctcgctgcccaaggtgacgcagctccgcgacggcgagcacgtgaccaacatcggaggcctgtacccgctcgcggcatgcgacatgcgggagctggcggagcagtacgtgatgcccgaggaagtgaagctcgaggccgtgcggcagatggttgcggcggtcggccgtctgcactcgcgtggagtcgtccacctggacctgaagctcgagcactttctgctcgacaaccatggcaaagtgtaccttggagacttgtcgacgagcgagaagatcacgggcgtcaacgtcgagccgaccagctgcgagttcggctccctcgagagtctgagccccgagcacctcgcctgctgggcgcgacagcaaaggaagttcacgccctcaatggccaccgactcgtggtctctcggtgtcgccatcgtccagctatggtgcggcgaagcgcccttccgcgtccccgacgcgctctggagcaatggcccggtcgccgtcgcgcagtacctcgaccaactcctcagacggacagatggggagatcgacttctccggctgtccaggaggcgacatcacgaaccctgaactgaagcgcattgtgactggcctcctcacttacgaccgcgtcaagcgctggctgccgcttgacgtcctcttcacctctcctctgatgatcgaccccgctgtggccagaaacgcatcgagcccttccgtttctcccttgacctccgggaaacgctcgagcaaaaacagaaaaagaaataactga

SEQ ID NO: 134 - DNA, 1617 bp, Toxoplasma gondii
  source 1..1617: mol_type = genomic DNA
atggcgggtccccgatctcctctccgctttgttcttcttctctctctacttgcactgaaagtcttcgtcgactctccttcagtgcttcccgcgctcgcgggcgagtctgcggctgacttgtccacttccattgacgacgatgacttcgacagttcctcgggtgtcgcggtccccagcttgaccaccgagcaggaagtgcaccggacccaagaggctctcgatccggaggtggttgacctcggaaagcccagtccgtacgcagaggaggagagcgggattctggcggcgtctgcgtcgcgactgaacttcagtccgatgatggcgctgaagagtttcttccacatgggaggcgagacaggcgccccaggccacagatcccgcatcgacgttgtcaaaaacgcggctatggaccacgtccaccgtctcctgcagatgctgcgcgagtcgagtgaggatgaagaagaacggctcctctttgctgacagaagagaaaagaaagtcatcactgttaatgagtggtacaccacgacggtcgccgccacgatgctcggcaggcggcccacagacgaagacgctatcctcgtcagtgcacctgcgacgagtcgcccaaacgttcgcataaaagctgtattcgacggccatgcaggggaggccacctcccagtactgcgccaagcacgccgccaaacacttggggaagctctccgagttcaccttcgcggaagtgaagaaagcgtgtctctctctggacgctgagatcatccgaaagctgggaccgaagcacgttgcagggtccacaggcatcatcgtcgcgatcgagcgtctcagcgcacctgtggtcgagaacgttgtggggcgggagatcgttcctcgtgctcacgaagaaacgttcgtgcctctggagaagctgattcaagaggaagaggaggcagaacatccggagcttgtcggccgctacccccgcgtccccgacgtgcagcaaaagacgattcctgcaggctctttcctcgtcaccgccatcaacataggcgattcgagagcgacgctgatccacagtgacggaggactgacgcgactgtcgaaagatcacaagccgaaccatccgactgaggcctctcgcatcgagaaggccggggggtctgtcgaaacgttcgacgtccctcgcgtggacggtgttctggcgctttcacgagccttcggagactctgacttcaaaatgaatcccaaccttcctccagaagagcagaaggtcattgccgttccagacgtcaggcagttctacgcgctgtcgagcgatcttctcttgctggcgtgcgatggtgtgtatgaaccaagcggcatggactgggcgtatgttcgagacctcactgttgctgagatgcagaggtcaaagggggatttggaggaggtggcggctcgcgtgatggattacgcctatgacatgaattctcaggataacatcagcgtcatgctcgttgctttccataaccaagaagttgaacaccctactgctgtctacaaggtcgtctctggccaaggtgtagttctgtcggagacacgacggccgagcgacgcggaggacgacagcgtcgagggcgacacagtttccctgttttag

SEQ ID NO: 135 - DNA, 1440 bp, Toxoplasma gondii
  source 1..1440: mol_type = genomic DNA
atgttttcgtgcgagtgtcacttttgttgtgcaaacccaaataaatctctgcctgtcattgaacaagtaactgcatacacttgtgccaaagctaccgcagccatggcttcgttaagagtgttggcgctggcatgccttccgctcttcgcagtgctccatgcggacgccaagacattgctggggaaagtcaaaagagcaacagggatgggagtgggagaaggtccttcagttgccaaaaagccgaaatacacagcgacggtcccaggattcactccaccgtctggcgatcagcggatgaatgaattcatggctgtggacacatcaggggaattcatgcgtcatctctacatcgaagaagggcgcacagtgtgtgctagtgccacctcccgcaatagaagaccgacgagcgagagcccccacagcgatgatgtggtggtcgtcgaaggaatgctccggggaagaccagaaacgcgagtacatgccatgttcgacggattccagggacgccacagtgctatgtggctcgcgcagaatgtgatgaactatctcaacgatctgagagatgtcaacgaagaggagattactcggcagttcgagagaatggatggagacttaagagcagcgaatctccctggcgggtcgtcagctctaatcatttttgtacggtatgaaaaaaaaccgactgaggcccgggtggtcggtaggcagatagtaccggaaggtgccaaggagttcacgtcagtcgctgaggcgctaggaggtccgctcatgccagtggtagccatgaacttcaggcgcgatcccagagctgccaaggggatctataccatacatgtcgctagcttaggcaactctcgttgtgtacttaagtctggcagaactgcgattcacttgtcgactcctcacactgcctcgtctcataaggaaagacaccgcgtccaggcagcaggaggggtattcactacagtcaatggcgagcttttgctaggcggagttgtccctatgacgagggcattcggcagttttgacttcaagaaaggaggacaagggaaacttcaacaggatttggtgtctgcagttccagacgtaacgacgttttttgcatatcctggtgacgatatcgtcgcgggtactgcaggcgcattcgctcatttcagatcacatgcggcaatagcggctgcgatcgctctctacccggtcagtccagaaacagttcttgacgcagcaaaagcaatggtggtgaatgcaaaaaggaggaaggtaaccaaaaacatcagcaccttcgtaaggcatctccccgagtcacgcacaaggagtcaaaagatgctggagggcacctccggagagaatggcgaagaagacttctcgatcgacaggacaaacgagcttacacaggcgcttcaggcgggatttttttccttcttattgtattatccatga

SEQ ID NO: 136 - DNA, 961 bp, Toxoplasma gondii
  source 1..961: mol_type = genomic DNA
atgacgggcggcgcggctgcgccccgctcctcttcgggggcctctcgcacacctctctctctgcgtttctctctgacgcttctctgctctctcgtagccctcctcactctctctgtctctctctccactcccgcttctcacacctatgtcttcgccgtcgtcgccgccgacaccggcgtatcctctgtccctggacacgagcgtggagcttccaaggccgggccagacgcggctgtgaaatctaagaagcgtcgtgagagatccaagaaaagcgatggaaacgtctccgcgaaaggcggtccagaagagtcagagatgcaggaccaatcgaccaccgacgtcgacttcgagacaacgcctcccgtggcacgtgatgcaatgactcaaagcaaacgcgatgcaacgacaagagggaagaagagtaagagtaagaggagcaggagcagaaggaagcgtggtgagaagtccaagaaaggcaatcgggaggcgggagcgaaaggcgattcagaggcgtcactgacggaaggcgaatcgaaggccgacatcggaggggagacgacagcccaggtggaacgcgatgcaacaacaaaagggaagaagagtaagaggagcaggagcaggagcaggaggaagcgtggtgagaagtccaagaaaggcaatcgggaggcgggagcgaaaggcgattctgaggcgtcactgacggaaggcgaatcgaaggccgacatcggaggggagacgacagcccaggtggaacgcgatgcaacaacaaaagggaagaagagtaagaggagaaggagcaggagcaggaggaagcgtggtgagaagtccaagaaaggcaatcgggaggcgggagcgaaaggcgattctgaggcgtcactgacggaaggcgaatcgaaggccgacatcggaggggagacgacagcccaggtggaacgcgatgcaacaacaaaagggaagaaga

SEQ ID NO: 137 - DNA, 3963 bp, Toxoplasma gondii
  source 1..3963: mol_type = genomic DNA
ggagcgaaaggcgattctgaggcgtcactgacggaaggcgaatcgaaggccgacatcggaggggagacgacagcccaggtggaacgcgatgcaacaacaaaagggaagaacagtaagaggagcaggagcaagggaaagcgtggtgagaagtctaaggaagctgatcttcaggcgggtgcgaaaggcgattcagaggcgtcactgacggaaggcgaatcgaaggccgacatcggaggggagacgacagcccaggtggaacgcgatgcaacaacaaaagggaagaagagtaagaggagcaggagcaaggggaagcgtggtgagaagtctaaggaagccgatcttcaggagggtgcgaaaggcgattcagaggcgtcactgacggaaggcgaatcgaaggccgacatcggaggggagacgacagcccaggtggaacgcgatgcaacaacaaaagggaagaagagtaagaggagcaggagcaaggggaagcgtggtgagaagaccatgaaacgcgatacgcagttggctgggaaaggcgagccgcagacggctgcgattgtcgatgcattgctccagatggagagcgggtcgttgaccgaaagggaagccgtggcaaaagatccgaaagaaggtaatgcagatgcgattgtcgggaccgactcgatcgacgcgagagtcgctgtcagcgcggagagaacggaagaaggcggcaagccagctgaggcggtttctgtcgccgatgcttccaaatcggccgaacagggccggcagaagtccacgaagagggggaagaagcgccaccgcagaaaccgcaagaggagcaagtcgaagaagtctcacacaggctccagcgcgccgaccaccgctggtgtttccgcaccgacaggctcgctccccctgtcttccgagactccgacctctgcagaaaaggaggcgacagagtttctgctcagcagcggtttccccgccatctcagcggttctcgcgagtcgcgggtcgaagcttgacgccgcgaaaaagtcgaagggggcccccgggtcgacctcggtggtcgattcggagtcagtcgtttcaggacgcgagcgacagacgcacgatgagtttctgcctcccgtcgacgtcgcttccgtactcaggagggcgaacacaggggacgagtctctcttcgacccagacgaggcggataacaccagcgctgcgaccaaggcttttgaggtgacagatgacgaacccaaggctgaaaagccgagtgagactgaaacgcagttacaggagttgatggcgactgttcctcagcttgacgagctgttgcagaagttacctaagcttgaagagctcgcgacgagggttcctcagcttgaaaggctgtccgagagtgaggctcagcgtgaagcgtcaaacgagcatggtcgtcattctgccgagctgagagcgactggtccttcgctggatgagccaatgcgtgggcctcggtttggcgcgctgcaagcgaccgagtcgaagccagtcccgacgtctctcgcgaacgttctaatctcgtctcttgtcttccctcctcgcttatcgttgctcttcgcccagcctgccagcggggcgacgcagaagaaggcgaccgttggagaacaaacttctccggcagactccccgcagacgaaaggagcgctgccgccgactgcagagttgccgaaggagcgggcagcggctaactcgaatgtcgagacaacagctaagtctcagggcgacagcgaagcggagaagctgttgaaagagttgagggagctcgagaaggggatgcagtcgcagacggtcggagacatcagttcgacgcggggtgagacagagtctgacaattcgcggactcggcccgagagcgatatcaagtaccgggggatgtcgggctcgttttccggttccggcccggcatcttcgcggcatatgaagcaccgcgtgagtattcgtggttcgtttggtgaagcggatgttgtccttctgcaccaaaagccacaacgcggcaacgagaccgccgagcgcaccagcagcttctcggcaaccgccgacaacagcgtctctgggcctcggcgccgcggcttcggccctgtcccgcgctccatcttcggttccgcgttcagcgacttggaagcggaactccaaggcgacgtcgccgagttcggtgacgcggccggcatcgaggagagcttcggcttcttcggcgagaggcgtggcgggggtgaccgcagccgccgcagccgcgagcggaggagcgaggaccggtcgcgacgcagacgcaagggcagcaagggccatcgcgaggccggttcgtctgcagcagccccaggctcgagacacctgcggcaggtggaccgccgatccggattggcgcgcgccgaagacgtcgaccccgaagagagcagcgaggaaagtcgcggaagccgtgaagagcactccatgaaaaagctgccagcccgcgagcgcagctcccgatcggccggtccgagcctttcgcgcagacgttcgcgcctcgatcacgaactggagcagcgacgagccaaggaagcgatggaggcggcagagacgttcgacgagcgcggtgggtacggcagcggagggcacaactggctgacgcctgggccgcccctcgtggtgtctggtgagagctggccgagacgcgggctgctgtatccggagccggcgttgctgttggaggactcccgcgcggtgcagatgatggagaacgcggcgaaggaacttgcgcattcgcggcagacgccagttctcccgggcgaccgcggcagagtcgccgccgcgggtggcgcgttcgagaggctctttccacgtggtgccctgttcacactgcagccgacgcacggtcagccgttcgagccgaagaccttgaagcgcggccgcttcctcaaggccggcggaggcaccctgctcttcgaagtctgggagggtcgaacgcgctgggccctgcgcctgcacctgacggagctgagtgagcgggagcggactgggctcgtgtcgcgtttccccgtcgaccgagtgtcgggtgccggcgtgagtgcatggcagcggacggcggatggcgtctgcgcagaggctgaggagctcgagctgcatgcagtgcggattctcatgcagcagaacgagcaaccgcgggacctgttctgccgcgagagaatcgcgctgcccgtagccgtgggcgaagtctcctcgctgcccaaggtgacgcagctccgcgacggcgagcacgtgaccaacatcggaggcctgtacccgctcgcggcatgcgacatgcgggagctggcggagcagtacgtgatgcccgaggaagtgaagctcgaggccgtgcggcagatggttgcggcggtcggccgtctgcactcgcgtggagtcgtccacctggacctgaagctcgagcactttctgctcgacaaccatggcaaagtgtaccttggagacttgtcgacgagcgagaagatcacgggcgtcaacgtcgagccgaccagctgcgagttcggctccctcgagagtctgagccccgagcacctcgcctgctgggcgcgacagcaaaggaagtttacgccctcaatggccaccgactcgtggtctctcggtgtcgccatcgtccagctatggtgcggcgaagcgcccttccgcgtccccgacgcgctctggagcaacggcccggtcgccgtcgcgcagtacctcgaccaactcctcagacggacagatggggagatcgacttctccggctgtccaggaggcgacatcacgaaccctgaactgaagcgcattgtgactggcctcctcacttacgaccgcgtcaagcgctggctgccgcttgacgtcctcttcacctctccgctgatgatcgaccccgctgtggccagaaacgcatcgagcccttccatttctcccttgacccccgggaaacgctcgagcaaaaacagaaaaagaaataactga

SEQ ID NO: 138 - DNA, 660 bp, Toxoplasma gondii
  source 1..660: mol_type = genomic DNA
atggcggctaaagatgaatactacgattatctctacaagattgtcctgattggagacagtggcgtcgggaaatccaacatgctttctcgatttacgcgggacgagttcaacttggagagcaaatcaacgatcggcgttgagttcgcaacaaagagcgtatacttagatgagggcaaggtcatcaaggcacagatttgggataccgcgggacaagagagatatcgagccattacttccgcgtactacaggggagctgttggagcacttcttgtgtacgacatcacgaaacgtcagtcgttcgagaatgtagaaagatggcttaaagagcttcgcgaccatgcggaccccaacatcgtcattctgctcgtgggaaacaaaagcgatctgaagcatctgcgtgctgtttccgttgaggaggcgacaaagtttgcgaacagagagcacctcgccttcatcgagacttccgcgttggatgcgacaaacgttgagcaggcgttccaccagattctggcggaaatctatcttcttcggcagaagaagcaaatcgaggataacccccagtcgactactcaaccagggagaggacagaaaatccaccttgatgaggagcgaacagatagccaaatacggcaaagcagacgtggctgctgttccgcctga

SEQ ID NO: 139 - DNA, 997 bp, Toxoplasma gondii
  source 1..997: mol_type = genomic DNA
atggcgacggatgccaggagactagccaccggccttgtcttgttaacgtgcctggtatggcgggcaggcgcatttcagccatcgcctccaacctccagagccaatgagctgacgtcgggcattcccggtgaggctccggagaacactgcggaggagcgaggaatcggagacatctcagattaccctcattcagtggtcgacgatgcggccgatattagcggtggcacagttcccgaagggccaggatcgcctgccagcacatctgggtctgggggtgtcttcaacagattatttagcagatttcgtcaggtaagtggatccacacaaggcacgggagtcgctgacgaacctcagcaggggccgcgaccgtcacttcgggagagacttgctcagcacttccgcaggctgagggtcttgtttgggcgccttatgccgaggtggggctttggattcggtcgccatgtaggcaggtggtggccaaggaggtggccggacccgctgtttccttgtatggaaccgggggatgagttcattcgctctagactgagtcagacagaatatcggactcgcttttaccgccggggaatggtggaagggtacgaggtggaggttaaagctgtgacggcagctatttggccccagaatactgccagagaagtggcgtcgctgttggacagaagaaaaaggacactgagagtggttggggcttttggacgaagtgttcgatctgtcttgtatctggcgcaagatgtggagagtcaagagcgcatggccatcgaagtcttcactctgacgagcgggaacactgtatcagaccttgctcgtgtgcatgacaacttgtttgctatgacggggttggttagtgaaagcccccagcaggcacgggacatctgcagactccttcttcccaccgatgctgtgacagttccgactcaaccccccttcgaggaactgaatccaggacagagcaattatccagtagcgaactattcctcct

SEQ ID NO: 140 - DNA, 669 bp, Toxoplasma gondii
  source 1..669: mol_type = genomic DNA
atgtttccccgtgtcgctttattccctgtcctcacttgcgatctttttcttgtcggtaggagccgtctatcacgtgctgcgaagttgcatcttacgcgacagctggtggtgtctgttgcgtggctgcatcgtcacggcgtcgctcacaatgacttgaagcctgagaatgtctttctcagtgaagaagggaaggctgttattggcgactttggtttcgcagcggaagttgggacctcaacagaactccggtcaacccctgcctttctagacccgcaaaccgcggaagaatatcttcaacggaaaacggaaacggtcgtgactgaggaaagagatgcatgggctctgggaactatcatatttgtgatttggtgcggatcttacccgttcttttcatttgaagaggctgtccttcctcctgcagtgttgtggcaaaatgtggtgtttatgtcaaagaccactagacctgcacctccacttcagcattgtaaggggatgccatctccagtgaaagccctcataaccggctttctccagtggaactctgacgatcgacgccgccctcgtgatgtcgttgaaggattcctcgccgctacagcctcggaaccagcgacctcttcggcgactgcggcagaaggaagcgtcaggccgcgcgcatccagatctcagtga

SEQ ID NO: 141 - DNA, 1369 bp, Toxoplasma gondii
  source 1..1369: mol_type = genomic DNA
atgagaaggctgctgctttcacctgttggtttcgtcattgtcctggctacactgttagaatgtcacccgcccgatcggtgtgttgctcatcatggcagcagcactgatgaatcgaacgtgtggtctcctcgaggggcccaatttgtacccggggcgtcagaggccgctgtaaaaaatcaggttggtattcctgacagtgcccttctgtggccgtcgcaagatgctacggaaaccgggctgcggcctacggagcaagtagaggcacgatcgtcatttcctgctgcaaagcaatatttatcagaggcggcacctgcgcgtggcgaccttccaccgcgcgccacaggccttctgagacgtcgaggagctagagtgcgaacggtgaaagctcacgagatcgttgtggagactccaaaaacgtatggctgggatcacagggttgtcgacagtgaggagcagaccacggtgcccgttgcagattcaagtggcttcattcaaatcccctcttcgcgcgccacgcctaccaccctgaacgctccgattgacctccagggacggcgcgatatcagaaacatcgtcaggaatcgacctcccgccgactcagatttatcgcctagcgagattgcagccaaaaacggattcgagcgaagatttgtccagggtttacaactgaaggttgagtcattatttagcggaggtgttttcacgttgacaggaccggcgcagttcctgggaattgggtcaacggcaattgtgtatagtttgaataaggtgcaagcggacacagcaagtgcgccagaacgggtggcggccaagataagcgtcaggaatctaaattctctaagagacgcttctgcgtctgagagacaacaggtgctagatcaggctccagaacgctttgtctcaagcgaaggcgcagtgaggaaccttctgccaggcgtgacaccagaaacggctctggaacaaggaattctgctaccgctagatatttgccgcgttactaacatgccgtctaattttcgtgctggcccggactacaacgtgtttccccgtgttgctttattccctgtcctcacttgcgatctttttcttgtcgttgagagcggtctgtcacgtgctgcgaagttgcatcttacgcggcagctggtggtgtctgttgcgtggctgcatcgtaatggcgtcgctcacaatgacttgaagcttgagaatgtctttctcagtgaagaagggaaggctgttattggcgactttggtttcgcagcggaagttgggacctcaacaagactccaatcaacccctacctttctagacccgcaaaccgcggaagaatctcttcaacggaaaacggaaacggtcgtgactgaggaaagag

SEQ ID NO: 142 - DNA, 1056 bp, Toxoplasma gondii
  source 1..1056: mol_type = genomic DNA
gtccggggtttacaactgaaggttgagtcattattcagcggaggtgttttcacgttgacaggaccggcgcagttcctgggaattgggtcaacggcaattgtgtatagtttgaataaggtgcaagcggacacagcaagtgcgccagaacgggtggcggttaagataagcatcaacaatctacaacgcctaagaagcctttctgtttttgacaggcaagagttgctagataagacgccagaacgctttgtctcaagcgaaggcgcagtgaggaaccttctgccaggtgtgacaccagaaacggctctggaacacggaattctgctaccgctggatatttgccgcgttactaacttgccgtccggttttcgtgctggcccggactacaagatgtttccccgtgtcgctttattccctgtcctcacttgcgatctttttcttgtcggtaggagccgtctatcacgtgctgcgaagttgcatcttacgcgacagctggtggtgtctgttgcgtggctgcatcgtcacggcgtcgctcacaatgacttgaagcttgagaatgtctttctcagtgaagaagggaaggctgttattggcgactttggtttcgcagcggaagttggaacctcaacaaaactccggtcaacccctgcctttctagacccgcaaaccgcggaagaatatcttcaacggaaaacggaaacggtcgtgactgaggaaagagatgcatgggctctgggaactatcatatttgtgatttggtgcggatcttacccgttcttttcatttgaagaggctgtccttcctcctgcagtgttgtggcaaaatgtggtgtttatgtcaaagaccactagacctgcacctccacttcagcattgtaaggggatgccatctccagtgaaagccctcataaccggctttctccagtggaactctgacgatcgacgccgccctcgtgatgtcgttgaaggattcctcgccgctacagcctcggaaccagcgacctcttcggcgactgcggcagaaggaagcgtcaggccgcgcgcatccagatctcagtga

SEQ ID NO: 143 - DNA, 330 bp, Toxoplasma gondii
  source 1..330: mol_type = genomic DNA
atgcagagcaccacttctcttgccacgcctgctgacctgaacgctccggttgacacccagggacagctcgatatcaacagcgtcctgaagaatcgacctcccgcagaggcacagctctcgcctcgcgagattgcagccaaaacccatttcgaagcaatgtttgccaaaggcctgcaactgacggttgaatccatattcaccggagaaacctttaccctgacaaaaccggcccgtttcttaggatggggatcaacggcgattgtttttggtttgcaccgcgtgaaagcgggcggagcaagtgctccacaacaattggcagctaagataaac

SEQ ID NO: 144 - DNA, 1064 bp, Toxoplasma gondii
  source 1..1064: mol_type = genomic DNA
ggctgggatcacagggttgtcgacagtgagaagcagaccacggcgcccgttgcagattcaagtggcttcattcaaatcccctcttcgcgcgccacgcctaccaccctgaacgctccgattgacctccagggacggcgcgatatcagaaacatcgtcaggaatcgacctcccgctgactcagatttatcgcgtagcgagattgcagccaaaaacggattcgagcgaagatttgtccggggtttacaactgaaggttgagtcattattcagcggaggtgttttcacgttgacaggaccggcgcagttcctgggaattgggtcaacggcaattgtgtatagtttgaataaggtgcaagcggacacagcaagtgcgccagaacgggtggcggttaagataagcatcaacaatctacaacgcctaagaagcctttctgtttttgacaggcaagagttgctagataagacgccagaacgctttgtctcaagcgaaggcgcagtgaggaaccttctgccaggtgtgacaccagaaacggctctggaacacggaattctgctaccgctggatatttgccgcgttactaacttgccgtccggttttcgtgctggcccggactacaagatgtttccccgtgtcgctttattccctgtcctcacttgcgatctttttcttgtcggtaggagccgtctatcacgtgctgcgaagttgcatcttacgcgacagctggtggtgtctgttgcgtggctgcatcgtcacggcgtcgctcacaatgacttgaagcttgagaatgtctttctcagtgaagaagggaaggctgttattggcgactttggtttcgcagcggaagttggaacctcaacaaaactccggtcaacccctgcctttctagacccgcaaaccgcggaagaatatcttcaacggaaaacggaaacggtcgtgactgaggaaagagatgcatgggctctgggaactatcatatttgtgatttggtgcggatcttacccgttcttttcatttgaagaggctgtccttcctcctgcagtgttgtggcaaaatgtggtgtttat

SEQ ID NO: 145 - DNA, 1617 bp, Toxoplasma gondii
  source 1..1617: mol_type = genomic DNA
atggcgacggacgccaggagactagccaccggccttgtcttgttaacgtgcctggtatggcgggcaggcgcatttcagccatcgcctccaaccgccagagccaatgagctgacgtcgggcattcccggtgaggctccggagaacactgcggaggagcgaggaatcggagacatctcagattaccctcattcagtggtcgacgatgcggccgatattagcggtggcacagttcccgaagggccaggatcgcctgccagcacatctgggtctgggggtgtcttcaacagattatttagcagatttcgtcaggtaagtggatccacacaaggcaggggagtcgccgacgaacctcagcaggggccgcgaccgtcacttcgggagagacttgctcagcacttccgcaggctgagggtcttgtttgggcgccttatgccgaggtggggctttggattcggtcgccatgtaggcaggtggtggccaaggaggtggccggacccgctgtttccttgtatggaaccgggggatgagttcattcgctcccgactgagtcagacagaatatcggactcgcttttaccgccggggaatggtggaagggtacgaggtggaggttaaagctgtgacggcagctatttggccccagaatactgccagagaagtggcgtcgctgttggacagaagaaaaaggacactgagagtggttggggcttttggacgaagtgttcgatctgtcttgtatctggcgcaagatgtggagactcaagagcgcatggccatcgaagtcttcactctgacgagcgggaacactgtatcagaccttgcgcgtgtgcatgacaacttgtttgctatgacggggttgcttagtgaaagcccccagcaggcacgggacatctgcagactccttcttcccaccgatgctgtgacagttccgtctcaaccccccttcgaggaactgaatccaggacagagcaactatccagtagcgaactatttcctcctcatgcccccgcctataatgagccttgagccgctccatagaatagtcgatcacgaagaattcctcacgggcgacatcggccgagtagtacgtatggtcttgactgcggaactcataagaattgcagcaaacattcagatccgcggacttgtgcacggacgtatcacatcagaaaaccttttcattatgcctgatggccgcctgatgctgggggatgtatccgcgttgaggaaggtcggaacccgaggaccggtgtcgagtgttccagtcacctatgccccacgagagttcttgtcgaacacagagacggcggcatttacacacgcactcgatgcgtggcaattaggcctcgttatacatcgaatttggtgcctcatcttgcctttcggactggtgacacctcgaatgaagagatcagggaggaggccaagcatgcgtgttccaggattagacgttctgtcagtcgaagcgtgcacgccaatgcccgacgctgtagagatgctagtgaggcactttctcaatttcaacactcgaaaacgcctgcttcccctgacagccatggggacgcctgaattccgccagctacagctcgacatatccaccagcctgtcatcaaaataa

SEQ ID NO: 146 - DNA, 1617 bp, Toxoplasma gondii
  source 1..1617: mol_type = genomic DNA
atggcgacggacgccaggagactagccaccggccttgtcttgttaacgtgcctggtatggcgggcaggcgcatttcagccatcgcctccaaccgccagagccaatgagctgacgtcgggcattcccggtgaggctccggagaacactgcggaggagcgaggaatcggagacatctcagattaccctcattcagtggtcgacgatgcggccgatattagcggtggcacagttcccgaagggccaggatcgcctgccagcacatctgggtctgggggtgtcttcaacagattatttagcagatttcgtcaggtaagtggatccacacaaggcaggggagtcgccgacgaacctcagcaggggccgcgaccgtcacttcgggagagacttgctcagcacttccgcaggctgagggtcttgtttgggcgccttatgccgaggtggggctttggattcggtcgccatgtaggcaggtggtggccaaggaggtggccggacccgctgtttccttgtatggaaccgggggatgagttcattcgctacctggttagagcgaagaaagaccggattggtttctaccgccggggaatggtggaaggatacgaggtggaggttaaagctgtgacggcagctatttggccccagaatactgccagagaagtggcgtcgctgttggacagaagaaaaaggacactgagagtggttggggcttttggacgaagtgttcgatctgtcttgtatctggcgcaagatgtggagactcaagagcatatagctgcagaggtcttcactctgaccggcgagagtcgagggttggaccttcagcgtgtgcatgacaacttgtttctctcagcggcgtttcttgctgagagccctgtgctgtcaagggacaggaggcgtcttttgcttccctacgatgctgtgacagttccgtctcaaccccccttcgaggaactgaatccaggacagagcaactatccagtagcgaactatttcctcctcatgcccccgccaatgatgagccttgagacgctccatagaatagtcgatcacgaagaattcctcacgggcgacatcggccgagtagtacgtatggtcttgactgcggaactcataagaattgcagcaaacattcagatccgcggacttgtgcacggacgtatcacatcagaaacccttttcattatgcctgatggccgcctgatgctgggggatgtatccgcgttgaggaaggtcggaacccgaggaccggtgtcgagtgttccagtcacctatgccccacgagagttcttgtcgaacacagagacggcggcatttacacacgcactcgatgcgtggcaattaggcctcgttatacatcgaatttggtgcctcatcttgcctttcggactggtgacacctcgaatgaagagatcagggaggaggccaagcatgcgtgttccaggactagacgttctgtcagtcgaagcgtgcacgccaatgcccgacgctgtagagatgctagtgaggcactttctcaatttcaacactcgaaaacgcctgcttcccctgacagccatggggacgcctgaattccgccagctacagctcgacatatccaccagcctgtcatcaaaataa

SEQ ID NO: 147 - DNA, 1578 bp, Toxoplasma gondii
  source 1..1578: mol_type = genomic DNA
atgtcgtcatccagattggtactcgtttccaagatggtcgatagctgtgcccggctggcgtgcttttgcataggattatttttctgtctcgctgtctggcagcatcaagcaggtcatgcctacagtgcaactcaccaccatgcagtgaacagtgacaacaaatccttcaacgactctgcgccccactggacccttaaccaggtgctccgggatggcacggtgcagagtgaatccccatcctacctgcagcacagttcgcttccatctaacatcagtccagcactcgaactggctgcgctaggtcaggatcccgtgagacgtcgcccacaaccggtgcaagtggccaggactggtaccactacgacaggcagagtgcagctcggtcgccaagtcgcgagagttacaccggaggagcttgcaacgatggtagagccatccttgaaagacttgttgaatagaagcactctccctcaaacaccgttcgtgattgaaaccttgcgagtgttcgcaacgccagagggtgacacctctctcccatacaccatggagcgcattctcggggcaggcgctgcttccattgtcatccaggctgtacaggaaactgtcccacaagagccagcacggcggcgacggtcctggttttcgaggttgaggaagtcacacgctccagcggatactcgtcctcgtgtagcgctgcggtttcctgtggtggacgtgcgtaagaagcagcaagaactacccgaagtgcctgaggcagaattactgtcccagctggcggaggagcagttgcgactggaaatccacaaagttgcactggtttcgtcagctgctgggaccgagggcaattttgatagtgagtggggctttgcgctacccttcagggtcggacgtctctccaacgaggggttggtgctggcaatggatgggtcaggaaaggctattctaaattttgttacggtgtcacctgctatgatgtgcgatcttcacactcttcgatccagttcacgcacaccagccatggacgagtttgtggtcatgcgcgttttacaacttgccgcgaacttggagagattacagctgacgcaccttgatataacggatgaaaatgtgctcgtcggtcgtgacgggcaactgtttctggggggtttccagcatgtccgagcaaaggacggaggtatttcttgcgggaaaatcccgtctgtcaccttcactgacccgcggctagcccactgcgccgtcaataacccaggcagttatgctgccgttaacccagctgttgacgcatggatggctggaatgatgttgctacgatggttctgcggcgatgtttttttcaaccgaagatcatctcttgctgagccgcgccaagcggttcaggtcctggctcagttacaagcagacttcattgctgccaacgactatatggtctctttccctgcattcacacaatgggacagatgcagacatcacgtcaacgaaagattccagtttatcattcagagcctactcgatgtcaacccctacaaaaggggtgcaccgtctgctcaactgactgcgtacttccccgtcacggggtag

SEQ ID NO: 148 - DNA, 1707 bp, Toxoplasma gondii
  source 1..1707: mol_type = genomic DNA
atgagaaggctgctgctttcacctgttggtttcgtcattgtcctggctacactgttagaatgtcacccgcccgatcggtgtgttgctcatcatggcagcagcactgatgaatcgaacgtgtggtctcctcgaggggcccaatttgtacccggggcgtcagaggccgctgtaaaaaatcaggttggtattcctgacagtgcccttctgtggccgtcgcaagatgctacggaaaccgggctgcggcctacggagcaagtagaggcacgatcgtcatttcctgctgcaaagcaatatttatcagaggcggcacctgcgcgtggcgaccttccaccgcgcgccacaggccttctgagacgtcgaggagctagagtgcgaacggtgaaagctcacgagatcgttgtggagactccaaaaacgtatggctgggatcacagggttgtcgacagtgaggagcagaccacggtgcccgttgcagattcaagtggcttcattcaaatcccctcttcgcgcgccacgcctaccaccctgaacgctccgattgacctccagggacggcgcgatatcagaaacatcgtcaggaatcgacctcccgccgactcagatttatcgcctagcgagattgcagccaaaaacggattcgagcgaagatttgtccagggtttacaactgaaggttgagtcattatttagcggaggtgttttcacgttgacaggaccggcgcagttcctgggaattgggtcaacggcaattgtgtatagtttgaataaggtgcaagcggacacagcaagtgcgccagaacgggtggcggccaagataagcgtcaggaatctaaattctctaagagacgcttctgcgtctgagagacaacaggtgctagatcaggctccagaacgctttgtctcaagcgaaggcgcagtgaggaaccttctgccaggcgtgacaccagaaacggctctggaacaaggaattctgctaccgctagatatttgccgcgttactaacatgccgtctaattttcgtgctggcccggactggaacgtgtttccccgtgttgctttattccctgtcctcacttgcgatctttttcttgtcgttgagagcggtctgtcacgtgctgcgaagttgcatcttacgcggcagctggtggtgtctgttgcgtggctgcatcgtaatggcgtcgctcacaatgacttgaagcttgagaatgtctttctcagtgaagaagggaaggctgttattggcgactttggtttcgcagcggaagttgggacctcaacaagactccaatcaacccctacctttctagacccgcaaaccgcggaagaatctcttcaacggaaaacggaaacggtcgtgactgaggaaagagatgcatgggctctgggaactatgatatttttgatttggtgcggatcttacccgttcttttctttcgaagaggctgtccttcctcttgcagcgttgttgcaaaatgtggtgtttaagtcaaagaccactagacctgcacctccacttcagcattgtaaggggatgccatctccagtgaaagccctcataaccggctttctccagtggaactctgacgatcgacgccgccctcgtgatgtcgttgaaggattcctcgccgctacagcctcggaaccagcgacctcttcggcgactgcggcagaaggaagcgtcaggccgcgcgcatccagatctcagtga

SEQ ID NO: 149 - DNA, 1533 bp, Toxoplasma gondii
  source 1..1533: mol_type = genomic DNA
atgaagaacagtctgctctctcccgttggtttcttcgttgttgtcgctgtacttataggatgctgcccgccaggtcggtgtttggctcattatggcagcagctctattaatgaatcacaatggactgacagggaaacacagatgttggctgctgctgtaaagccccatgccgggtataccgacagtggtcctcggacgtccagccgggagatgaatgacactggatcgtgggccacggaacgatcaggggcattgccgcgattccgcactacaggggagcagttgtcggaaggggcgtcagtgcgtgaggaccttgcgccggggatcagaggagttctgacaaagaaaggagcgagagcgaggacgacaaaacgccacgagctcgtctctgtgacgtcggaagaacattactggaaccaagggattgccgaccacaagggacagaccgcgcctcctgttgcagcttcaagcagtttcatgcaaagcccctcttcgcttgccacgcctgtggtcctgaacgctcctgttgacttccatggacagggcgatatcactgctgctgtgaggagtcgacctcttgtcacggcaggcttgtcgcggcatcagattgaagccaaaaatgatttgaataaggtgcaagcggacacagcaagtgcgccagaacgggtggcggccaagataagcgtcaggaatctaaattctctaagagacgcttctgcgtctgagagacaacaggtgctagatcagactccagaacgctttgtctcaagcgaaggcgcagtgaggaaccttctgccaggcgtgacaccagaaacggctctggaacacggaattctgctaccgctggatatttgccgcgttactaacttgccgtccggttttcgtgctggcccggactacaagatgtttccccgtgtcgctttattccctgtcctcacttgcgatctttttcttgtcggtaggagccgtctatcacgtgctgcgaagttgcatcttacgcgacagctggtggtgtctgttgcgtggctgcatcgtcacggcgtcgctcacaatgacttgaagcttgagaatgtctttcccagtgaagaagggaaggctgtcattggcgatttgggtttcggagtgcaaattggaacgtcggcgagactgaaatacacagcggcctatttagaccctcatgctgcggaggaatgccttaataatcaagtagaaacagttgcaaatgaagggacaggtgcgtgggcactgggaactctcgtctttgtgatatggtgtagatcctacccagtcgtttcgcgtgagcaagcctgcctttccactcgtgatttgcgggaccgcctggtgacaatggcaaagacaactaaacccacgccatcatttcaccactgccaggaactcccctctccggtgaaagacctaatagccggatttctacagtggagccgtgaagcgcgacgtctcccaggtgatgttgttgacgaattccttgctgctacagtctcagaagcagcgacctcctcagcgagtgtgtga

SEQ ID NO: 150 - DNA, 1659 bp, Toxoplasma gondii
  source 1..1659: mol_type = genomic DNA
atgcgcctggatgctgtgtattacttggcgcaaatggctagccaccgaattccacgatgccaggcgacattccggcacttcatctgctggttcctcatctttgcagcattcgctgtgtcagatttttcaaatgtgcatggcagtttcctaccggaccctcatttcctctgtcaccatagaactctacggtttcggaggggttatgtcccccagctcagtccttgcccccacgcgagcacgcaccatgtaaaatccggcagtttctcaagcaagatatcctttctagaggaggcggcgcagccgccgtctccaatttcttctccagagtcgaagactgaactgttgctgtctctttcagtcggacattatggaaaatggatgaccgatgaagacgaacgaggtcggagaaaagtagccgcgtcggtttcacgcctgcttcgctcagagcgtccgaaaagcatttcagacagagtacaattccttcttgatgagacggtcgcaccagacaccgtcttcgtcgtcgagtcactagagggtgttccgaccgcgggcgttcaggtacaggcatttcgtagaggcagtccactagctagcggcagttacaatgtgctttcagaggctaccccagttccagtcccgttgccaacatctcttctcgtgaggcctaagagaggagaggtttcacagcaatctgcgcgcatgatgaatgtcgttgtggctgcggtgaaaggctctgagggacacgcagctcaagttgaagaggggaaaacaggcaaagctggtgtgtcgtcagagcccgtagccgtgagaatagcactatccgcccgttccagctgtgaggtggaggcggaagatgagtgtctctccttggcacggaggtacagcaatttaatgagtaaactgccacccttttcgagtagagatctgcttgaaaaattcgggatggtcgtcccgcagttagtgggtcagcttaggggacggccatcgttacttcgaaaacaaggtgatacatcgctgctaaacttcgtgcagataatgccgcttatggcatgcgatcttaaccagttccgaattacggacccagacgcggtcaagtttgtggtcaagcgcatgatacagctactagcgttgttcggggctgccggtctagtgcatcaggacataaaggccgagaacttcctcgtcagccggcaaggtcgcctgtatttggcggattttgacgctgtggtacgagagaacgacaccattcaatgcaacaaaaaactgagcctgttgttttcgcccccggaagtgcttcgatgcttctttaatactccagaggaaaagatagctctcacccaggttgtagactcctggagtctcgggatggcagcttgggaggtcctatgcatgagcgagccttttgacggaatgcggttcagcgaagatgatttatataatatgaaggtaatcgccgcgctgcctgaaggcggcgacgacaccagggccctagactggaatcgttgtagaggacgaccgcctgcaccgttgaggaaggctgttgaatgtcttctcgacagaaacgccgccacccgctgcaaggccttggatctgtttaaatcttcacctcttttcgctgaggaacggccagtgccaccggagccaagttcaagtgactag

SEQ ID NO: 151 - DNA, 2250 bp, Toxoplasma gondii
  source 1..2250: mol_type = genomic DNA
atggttcacgggcaaatgcattacgtgagctgggttaaagacggctgtcgacagtttgctcccgacaacctgcagccacatggactagatttagaggttctccgctctttcttcattttacagatgaatccacatgcagttgcggagattgcgcccggcgacagagcagaatggacgcgtgcaaccatatacaggcagtgtcgggcggcggcgccctctcccggcggaagccccgtcagcactggcatatcctctgtctctaattcgcgttttcctcgcagcattttgtccccgcgatctgccgcgctttcaactctcaagcttccgttttcctttctgcgtttaccttggagaaagttcgaagtgaacgcgcccacccgtggggcggtcgaagcctccagcgtcaaaagccacggcgagacttcggccgcttcgagcctcgcgggcctcggcgcaaccgatgaggacggcgacgctgaggaggctgtgggccttgtagatgaggaactcatgggggaagagaagcttatcccgctggagcagcgaatggtgctggcgcgccaacttctggagggcagcgaggcgtacaatgagtccttctccagcgacgaagactggttcgacagcgctcgcgtttcatccccacttggcttccctgcgaaaaccacgctcgagctcggcttccccacgaaccgcactgcgcgtgaacctgcagacttgcacggctcggaaggctcagacgagttcgaggatcacggacctgcgtccaccctcgtacccacggtcaagtctccccaccggcagggcggtgtgaaaagcgccgtcgactccagcgttgacagcatccagcaccatgggccatcgccgaagtcctcgcccaccacccctgccgccgcttcaccttctcacgccgcaggaggcgcgcgaacgcaaaatacgcgacaggaagctggatccagggaaggtcggacccaacgaaggctcgcaggtcaagagggtgccgcgcggaaaacagggcggccggtgcttacagtgcacactggtggaaacgctccccccgtcgtaactgacgctcgattcaagatgccttctaccaccttgaagagtctagtcaccccccaggaccctggcgagtggactgccgagaaggaagagttcgagagaagctatcctctccatacgcccattcaagttcgctccacacgcacaaacgagaagttcagcgtccaactcgaagacgtcctcggcgcaggtggctacggagtcgttttctcagcacgagacctcaggacaggtcaaggcatcgctctgaaggtcttccgcattcgcccagaccagcgtcgggaagagagcaaagaagacgtgattctgagacgtcgagtgcagtcggagttggcgatctgggagtacgtccctcgaggcatcgaacctaagcaatggagcgaaatgtctcatttggtcattccctttgatgtcatcgaagttgttacgccttgcgcgacgcctccgatggatcagactcgatacgcgagcgagtgggtcgtgatggatctctttgcaggcgatgtggcgcggatgccgaagatcatggcggcggatccaagcgtcaagctggaagtaacggagcaagtttttctggcaaacatgtatttgcatgatatgggtctggtgcactcggacatcaagctccccaactatttcatcagcatcgacggacgaattttcctcggggaccactccctcgcaagccctactggggaaaatgtcccatgcatgtggggaacactccgttaccttcctccggagaacatgaaatgcatcagcgacggccgaaagcgcatcatgaccacggagagaaaagacgtctgggctctaggagttgtgttatacaaactgtggtgcaatcaacagtacccgtacgagatgggagagctgtggtccaaagacctttttgttcgaacggcgcgcgcacacgtcgatgagttggacctaactctctgcgatggtcacgtcacgatctctatcctgagtctcctccgcaccatgctgaccccgaatgccagtcgccgcccaacgctccgagaaatctacaaattccaccctgtcttcaagcagcggaaaagcatgattctccaaaagaagactttggtgtccatcttgaaggaagtcgatcacaagaaaggagaaaacccgggggccggcggtggcgcgcaagcaggcagcgacatcggctcgacagaagaagactag

SEQ ID NO: 152 - DNA, 1836 bp, Toxoplasma gondii
  source 1..1836: mol_type = genomic DNA
atgaacttgctcttgctcaacgaaccgtccctccggctccccaggatctttacagtatcgctatgtgcgatcctttcctggggacatgctgctttccctctgttttttgcggaatgcggacttgccacaaggaacctacatgacacaggcgccagctcctgggacacagacacacggcacattgcgtcaacattcaactccagtcgtggaagcgcagaccactcgttcgcccagcgagcggaggctgtctcagacaaatctgtcgcgtactggaaaggtcgaatagtcgaggatggtgatgtcgaggtagaagacaaaatcgttcacgtggcgcaagaaatcgtcgggggcggcgacagtttgtctgcggtggacccaacggagctgacagatgttgcacgcatcctcgcggcaacagaaaggccaaaggtcgtagcgaatgcagatgccttcaaggaaaagcggttcgcgatcttcagcgctggtctccgcacgtccagctcaggtccaaaggcgaacacattccgtttcctggctccagaccgcactgagaagttcgcgtttcctggccgtcgcagcgcggacccgcaggcagtatcgcggcagttggtcccgcccgcaaacctcgtcacccgtggatcgggggaaacagtgaagctaaaaggaatagagttaaccggtgcagctcggggactgtttgtgacgaaagtttctgcagtagtcagacaggaggcagacgggtcttcgactaagaacccgctgtcaagctcgcttcagacacgcagcacacagcgccgcccatggtaccagatgctcgacggctttgtggctgaagtagacaaagtctacgaagaagaagtggaagctcgtctcgcgtgggaactgaggatatggcgccaccttccgtcttctcgtgcagaacagttagccgcagaggaacacattctgattccgggagctctgctgagccacagcggccgggggtcgccttcttcgcgacggaaggacgctgcccgcttttcgagggagttggagggaaagtggaacgaccttttgtccgaaaaagtgttcaacgtgttcatatggtacccggcggggtaccgcgacaccctagaatcgtctatgatgcactcagaccaaattacggagccgtggttcagctccacgcctcgggacgttatggagtcgataaccgtccagatgattctcgctgtggcaaatctgaatagttacggcctagtccatacgcatttgcgttcatccagtttcgtcttcactccagaagggatcgttcttctgtcggatctaaaccgcgtcgtgcgacaaggagagttcatggactgcgtagcagaccgtgaagcctcgctgaatgacttgacggcttccccagaggaacgcgtgtgcgttcacgagcacggctacaagggcagagacgcgaaaaaaaaagaagagcttgtcggacctctggaggcacacccaactgtggatgcgtggcgactagcggtgattctctacaaactttggtgcttggaaagcatgtacgaacggtcttcgtaccaccagttcgttgctcgacaagacctccaacgcgttccagactcggagtccaacatcaccttcctcagacaaaatcccttccccatgtctgcctgtcggaaagacatgccctcttccctgcaacgtctcctccgccagatgttcgagcccgaccctgcgaaccggatcacttcggctgaagccgtgaagaatagttccttctttcacgacaaaaagagagcagtgctgcgaaaaaagcaggagcggctcatccagaaatcccaaccggcagacggctag

SEQ ID NO: 153 - DNA, 1647 bp, Toxoplasma gondii
  source 1..1647: mol_type = genomic DNA
atggaaaagatcctgtgggcggcgtccgttttcatcgctgcccaactggacagcagcttcacagtccatgtttacgccaaagaatccacggtactgtcagaactcgtggaatctggaacacgtttgcgaccagaagaagaaggatcattcctgacatctccacgttcagacgaggagacattggttcaaggggcaggacccagaggaccagaagaaaaggctcaggcagcgattgatgaggcagaggtagagccgtttgcaacaaactccaacactgggacattttcgtcatttcctccggagctccatgcattcagccctttcggagtcattgttcgagagccgaaggatatgtttttcacagtgttttcaagactaggagggagggttaaagagagggactttgtgggtgagttaatacagcgtctcgccagagcggtctttccgctatttcgccgcttgcatttctggggagaatcccctggaacccaacacgcccaacagtctggtggtggcgtagagtggggacacaaggctgtagttcgtgtactaagaattatgagggacagaccggtgccgccagtatacgaagattccaggcgtcgtgtaatgctgaagacaggagtgggtgtccttcgagagcactctcctttggtaatgaattccctgtctggtaacagaaaagtcactatcactgtcaaggactacattcctgtcgcagggtggggactctgcgtgggagtggtccatccagagtcaaaccaggagtttcttttgctcaacttcgtttccttagccgatgcagcatggggaaaatggttcgaatggaggcttcgcaaaatagcggaaccgcttcaatggctaggactgaggaacccaagcgaggcgtattcgcaagaccgcttaatgcttcctctcgatctgctggaaatttccaactccagccgctactttgtgagagcgccgttcgtcgtccccaacctgttcgtcctgatgccaagaccagcgacatctctcagtgaccttgtttcgtttatgagcacgacaaaaaatatcgggcagacacttgctgttcgtctcagtctgaccttgcaaaccattcgggtggtagcagggttcaataacagaggattcattgatgcagatattcgtccagcttcgtttttcgtcaacgcgaaaggactcgtcttccttgggatattcactcgcacgacgatagccaagcgtggacgtcgtgcatctggaaggcggcagttcgatgtcgccacagctcctgaactggtcttcagggagaaggtgttttttcgccgagacgaaaaaaccaatgcgtgggctctaggcataacgctgtactatatctggtgcaacaggtttccgtttggtattttggatggagactcggcaccgcctccagagctgttccaacccgtcccaccggagttcggcgtatgcgtacacaacatgcctgacccggttaaagttctggtcgcggagctgctcgatcgacagagacgagcaagacccacagcaaatacagccatgcagagagagattttccgacatctccaggatctcctatctgcatcaaaattatctgccctgccacgcacggtgccagtagttgccctgttgaaaggcatcaagtag

SEQ ID NO: 154 - DNA, 1608 bp, Toxoplasma gondii
  source 1..1608: mol_type = genomic DNA
atggcaacgcgttcattccttttcgtgtttttggcgctctcgtcccttgggggtctgtgtagcgagtatgctactcaacgaccactagaaccgtacagaggtgaaaccgaacggccgctgcctgaacgcttgggccaaaagatgtacatttcagtagtgcaacataagacactctcgttcagtcgtagctctgggggcccgttccgtcgtcaaaaccctcagacgtggccgaattttgttcaacttaccagcacgtctggggtgccccaccggcgacgcgaaagggtagccgacgctgatgaaccgacaacaagtacgggcaatcgtcgcgacagagcgttccctctccgttcatggcttcgacacgcaatacggcgtttaggtgtaggtgcaaacaaccggagacaaggcgtccaacataaggaggtcttgccgtctaccgaagtggcatcgatagtgacactgctgcagcagctgcagcaggagatcgggcggtgccgcctgcaacaacggaccaatgcacatttggaagacacagttacgatactctttttccgccggggttccacaagagtgctcttgtccgatggcgggagacatacgcgaaacatacgctatgatggtgaaattctcggctcggggccgtggtcccttgtcttgcgcgtgatggatgtcgacgagaatcaggagtacgctttgaaggtcgctcgactgcgtgcttcgctatctggcgctgccggataccggcaactcttaagacagggcctactccaccacaggttcacaccgcctgtttctccgcatcacgcgttgtggtgcttgcagttgatggtcgctattgacctcctcaagcttccacgcattcccaggttcgtcagagaacctagctcacgactaacaattgcaaaccgtttcctcttgctgccgctcgcgtatactgaccttctggcagtactgcgggcgctgttcaccagacaggatgtcagcgaaagccccggcggttttcttgctcgactgcacatgaccgctcaagttgtgaaggcgctggcgagctaccacagccaaggcttcgtccacggagacctaaagccacagaaattcttggtcatggcaaatggaagccttgttctaggtggtttcacagaggtccgcacccccggcgcactgcgctccggcgacgtattcactgagtcgtacctgcctccggagcatctagaccgaaacagcgtctactcatttgaaagtgatacctggcagctgggcttgaccatataccagatatggtgtttgctgctaccgttcgggctgatgacaccattcgttgccgagggcccagaacgccgtgtttttgaagaagtcgtgcagcaccccggggttcaaccgtcgttcaacgatcctgactgcttctcgaatgttccggagtatatcgagatgatggtacatcacatgcttcagttccatccagaagaccgcccaagaccagctgatatcctcatcagcgataacttccagcgactccaggatcacattcagcgtttggagcggtcgcaggaagaggaagagtcggtccacggcagtccagcaggaacactctcccgtaatccctga

SEQ ID NO: 155 - DNA, 3369 bp, Toxoplasma gondii
  source 1..3369: mol_type = genomic DNA
atggcgggctaccagccgagcgccgcgtggcccgtggcttcgtttccctcagcctcgcttcccttgacctcgttctcctcttttgttgcgcgcgtcgcccgccagtttcttctcttctgtctgatttccattttcgcgagtgcatggtctgtgctggcaacggacgcgactggagaagagggagaagccgtcgacgacgggtcggcggacgcgtcgaacgacgctgaggtgtggctgcgtcggcaagactactcatcatcgggtcttcacattccgcaagctatcgcagagcatgacagagaaggcgagtctccgttgttcgattcagagcgcatcacgcgaacgcagtcccagcagcgctgggtttccgagctcgggcgccaaccttcccaggtgtcagaaagtctcccgtatggggggatgaaagcaggttcgtttggagggtacgaaacgtttcgacccgacaagctggaggccgtctgggacagaggaaccgcggcaaccgagctgcaccggtctggaggagctcgcgcttctgtgaaccctgcggctgcagccgcaggctcggcgggcggctcgacagacgtttatcgcgacgaaaaaggcgaagggaaacgcacggaaagagacggacgaaatcgggaggaatcagcgcgagtcagccgcgagggggagatccagttttccacggggtgggaggccgaagcagacccagagcctgcctggcgggtcgagacacgtcgttcggagcaggggaacgcgtcccagtggaccgaggagaagccgcagcactcgagttcaaacggcactcaaaaggcgacggccagttcccgctggggtgcctcgcctcactcggacgcttccctccgacctccccaagagagctcctggccctcgctcctgccgcccgctggacgtccccagccgccggctccgagccccacgcacttacccagtctcttgcccgggaccccgtggccctcgacgcctttcgccctcgacccccgcgcgcgcttgctgaactatcgaaacgaagggcatgcgctgcgcgacgtgtacgacgaggaagaaggcgagctctccgacacagagtctctgcaccgcgcgcatcgactgagcctcgaagggcctcggtacggcttccgcgcagggtcgtatgcgccgcgcaggcgagaaaacgacgcaggcgatctctacggggaagtctcagcgacgatcgagcttccggagacaaaccccagcgccgtgtacccgaaccagcacggagaaggacttcccgacttcgcatctgccccccgcacaaatgtccacttgcctccgcaactcggccgaagtggcgtggaccccgaccaagtccgcgccgcccagctccgactcgcgaacttggctggacatactggacatacaccaggggacgggtcttcgagctacggggcttcccgcgacgaggttcccgcgcgtcgcgaccaggtgcaaggtcgtggaggcccaagtttgctgcctggggctctgcgcgcggggttcgaccctagtgcaggtcttgtgtctctgcagtatccgggcgtctctgcgtttcggcgtcccggtgttctgggcgccgcgagctcccaaggcccggcgaagtcgctgctggtggagggcgcgccccagcagcggcagtttggagcctcaggtttcgcccaaacccccagcctcctgtcctcgtcgccgtttctggacgctttcatgcataaccggggtgggttgaatctcggggcgcagctgttcgcgacgcagcaggttctgtcggggcctgcggggatgtggggttctgccggcagctctgaaggtgaggcagacaaatggtggcgcgaacaggacgggtgggtatggccggagttgcctagcctgtcggcgacggacctcgaggccggcgtcaaagacatctctggacatgcccagatggttcgtgtcgaggcgcacctggtcaggtcccaggtcaatgcaggcaacgctcttgggctgtacatacaccaggggaagcggtacgagctcctggacgtcgaggggcgtctcgcccccatgacggccattcgcgggaaggttctcggcttcggcgcgtacggggtcgtcgtggagttggtcgacgtctcggcttctggagctcaccgccgcagctcgccaagttccacagacgcgactgctggtgagttcgggggcaccgccgtcaactcggggagtccgtctgcgtcgaactctgggaacaaggtctcgacctcggggaacaaggtctcgagctcggggaccaccgcggcgaacgtggaggcagagcccgggcagctgtccagtgccgagcgcgagggcgaacccgcggcgaaggtcgatggggacgcggcgagcgaggccggcggaccgcccagagagcacacagagaggagcagcagaatcccggggaagcgcgcgtcgggggccgtggagaagagcgggggttcggggatcgagccgcggggcgacagcgcgcgagtcagccgctccgtgacttatgccgcgaagattatgtactgggcgaaggcgaagacatctgcgaagccggaggaagtgcgacagacacttgaaggcttcgtacacgaggagttggaggcgttcaaactgctcagagagacaggcatctccgacagtgacctgttccagaaacatggactcgtagtcccgcagagcgtgcgacgcgtggcgaagctgccgacgctgctgcgcgcgagccccgcgctcttcccagacactccgctgttcttccataaccagctgattatgttccccgcgctcaagtgctcgctggacatgctggcgcaagaccgcttcacgcgcgagggtctccgggtgctcgttcgcagcctcgtgcgcctggttgcggggctgcatgcgctcggcttcagccacaacgacgtcaagccccagaacttcctcgtcggcggagatggcggcctgttcctgggagacttcgcgtacctcgcgccaatcgacgaggtccaggactgcaacaaaggcttcacggtcgactacagctcacccgagctcatggcctgcgcgctgaagaacggacggatgtccatgggtcccgaacgcgactcgtgggcagtcggcgtgagcgcgtaccgtctcgcatgcagaaacaggttccccttcctcctcgaccgaaagttcaacgcaaagtccgacccaagactcatcgccacacacatcgccaacctgaaagagacagacctcgaaacctcccgctgcggaactgaagaccgagttgtgatgtccatcgtccttcgactccttcaccccgacctatcgaaacgcgcaactgtcgaccaactcgtccacgaacctttcttccaagactag

SEQ ID NO: 156 - DNA, 1308 bp, Toxoplasma gondii
  source 1..1308: mol_type = genomic DNA
atgttgttaagcatatctgctggaactggcgatacactgagctcgagaagccaactatatagagaattgcagaatcaggcaatgaatcccgcggctgcctcacagaggcccaatttcgccgcaggtctcggtgtgatccttaccaagggaagacaatatagggtacgattaccgtcagaggaggacctgaatcttctcaggaccatgctaactgcccgaggacgtctgattccaccgagtggacaaccgtcgctgagcatgcgtctccgtcctattggaattggtgggaccgaaaaacatgtcagttttctcggagtggctggtgtgcacgaagggtttattctcttgaaaatgcgagacaagcaggatggaggaaatgtacctgaccacatttactggcaacctctcttttatacgaatccacacagtgaaaaagaaagtgtcgacccgcaattcttgaaacacgggctcgtgcagagggtgcagaagcaaatttcacttattcctccaggatacgaaggaagatccgaacacctctgttcacattatggcgtgatgtttccaggtggaacgtatgtccttgccgcggacaacgctcccctacaattcgacgtggagagcgatcagagtggatcccgagcagtcttgaaccttttcattcaattttctccggcagagattcccttatccgtgttgagctataaaaacctgagtccgacactggctgcgtttctagtgaaacagatgattctcaataccgccatgttgcattcaatgggcgttgtccataatggaatttcttctgcagcattcttcttgagtggaagcgaattgacagggacaacgccaccagctcgtctgctctatttggtgaactttggtgcggctaggttttacacaggaaagccggaaccattcgaagaggcgggacacgttatgtattatgaccctgaaactgcgtcggtcttcacaaaagttgctgcgttacgtcctaatgtcgtatatggtcaagctcgagattcttggtcattgggacgagttatgtttcagcttctttgtggtggatctcagcatccctttggacaccttgggccgcctgcctcgccgctcgtcactgcgaagcgaatttctatgttggctcgggacagacctgctctccgattgtcaacctgtttccccccgacatcggcgcctgaaatgcaagatctcatgtccatcatggctaacttcctcaaattcgatgccaatgaaaggccaacgcctctcgaaattgtcaggagatatccgcagttgtttaccccattataa

SEQ ID NO: 157 - DNA, 2928 bp, Toxoplasma gondii
  source 1..2928: mol_type = genomic DNA
atgaagtcacaggttctccccggcggcggcgttggcgccttgccagtgttccccgtcaagcctctcggcctcgtcgtgctctgttttcttctccttctgctcgtctccgaagtgttgttcttgtggcgcctccaacagctggagaacgacgcgtccaggccatcgctcgactctctctcgccctcgacagagacttccaccaagccaccaccctcgtctcctctggaggccgatctctctgcgtccctcgtggacgcgaaggacctccttcgtctcctctccaacatttccaccgtcactcgagagaaaaccatcgtttctgagaactcgacacgcgttgcggacgaccctggagccgtccactcggacctggacacacacattgtctcttctgtctcctcgctcacagcgcggccctcagtctccgacaccccacgtctccgctctctccagagcccgaaggctcctctccctccgcctgcaccgagccactccgaggcgtcttccatctctccttcttcctctctgacgggcaaggaagaagaaatgtctctccatcacacaccctccactcctcccaggccttcctcttcttctcctgcacatggccaccgctctcctgactcgccgcactcccccgcaggaacgacctcccttgtctctgcctctggggaagtgcaggcgtctgcggttcatgcgatctcgactgcagaccctcttgaggcgaacagacgaacacagccagaagagcgtggaagcgagaagaagaggacctcggcgaatgagaagagagggcgtcgcgaccgcgaggcggtctctgtggcgcctgcagctgtcgaagacgaggaagaagtcgaagaagtcgaggctttccacgacccgttcagcgaagacgacgtcgctcttctgcgggtgccagacctccttgtgtcccagaacgccacggcctttcgcatgcagttcctctccgaggatgagcgccggcgggtcgcgaagcagaagcctctagcggtccagggtgctccgtctcgggcgaagaaaaaacgcgcccctgacacgtcagcctctgcgtcgttctcgcctccagcttcgcatgcatatggaagccttcggtggaaggacgtatcctttcccgcgtccgcgactgtcacgcacatccccggacacacgggttcgttcgcagaggtctacgaaccgttcctcaaaggcgaagatcctcggttgctcccgcactacctgctcggcggatctctcggcttgacaggcgcatacggagccttcgccgcggagggtgcgtacccgagattcagtgcagggtcgacggaacgccgtctgaagacagacctagcgtctccagatggagcggcgacgctcggccaccgcagtccggcccgcgtgtccagacaccgcagcgcggagcggagccgcagctcgctgcgcgcggggcagcgggcggcgggggtcgatgggaactctgtggacccgcagcagcaggaagcgaagggtgaagaagccgcgcgacgcgagctgcagagagacgcggaccacgtggaaaacgcaaaggggaaggaagcagaaaacgaggcaagaccgaccgcaagaataacgcgatccgtcgtcgggaacgcgctcttgactcgcgaggtacgggagagctccgaaaacttggcaaacctcgtcaacgccttagacagcggcggaagcccagctggagagcaccgcggggccctgcagacagaagacaaggaaggaggaagcaatgttccagaggcgacgactccccgccttcgccttgccgacctgcccaaggtgctcttcagcaaaccgtcgaggagcctcgtcaaagctgcgcgcgctctcgaacgatctgtctcgtctaaagaaaagcaaaaactcgctggtattattccgtttgacgtccccgttgtggtccgaagtttggcaacgcagaaaaggcgaaccgtcattttcgatggtgtgttgggcgcaggcggccagggtgtcgttctgctggcccgggacgtggatcaccccgggttggagatggccgtgaaaattttccgcatcaaaaagaagaaccggggagcctcagcgctgcacgaaatcgcgaggctccagcgaagactgcgttgggagacagcgattttgaagcatgcgcccagggacgtgtcgtcctacgtctggtctcaactcgctcatctggtcatgccgcttgacatcgtcgagccggtagaaaagtgggaacactcagatgctgaaatgcgctactggcaccagtggctgatctttgaaagcttcgcaggtgatgtcactcgtctcaagaagctacattccggctcgggacaagctcgcctggatgcctccaaacaaatttttatggcgtgcatgcgactgcacgatactggcatggttcactcagacatcaaattggcgaactactttatttcgtcagagggccgtatcttcctgggagactactctctgtcccgaccaattggggacgtgagtccgtgtgttgaaggaacgctccgcttccttcctccagaaaacatgaagtgcattcgagacggagagaagaaccttgttctctcatcgaagaaagacacctgggcagtaggcgtcgccttatacaagctctggtgccgcaacttcttccctttcgacctcgattccttgtcttctgaacacgccgtcgatcgcgttgcggaagtgtcacgagatgaactaaatttctatccctgcgctcccgatatgcccgtagcagttatggatttgattcagcaaatgttggatccgaacatagagactcggccgacgctgagagaccttttcgtctctcaccctgttttttctcagctacgaaaagtcactttgcagtacacacttgcggatttccgcgaggaacaggcgaaccagaagggcatttga

SEQ ID NO: 158 - DNA, 2085 bp, Toxoplasma gondii
  source 1..2085: mol_type = genomic DNA
atggccgaacagaaagtgtgccataaaaagatgacgcagttcgccgcgcagagcatggtatcaagcctcagctcgccaccacgcgttctccgtgtcatccaactgttgctgctgcaaattacacttgtgacttttgctgttgatgcacaggtagaaccgcgacgattgctgcggcaagctcggaaaccgtttgaagcgcacttgcgtgggcagaatcgcttttacccccatttggagaggcggaaccctccgaggggacagcaacgctacgtgccgccccgtaatcagcagatcctcagacatgggcagttctcgccggatgatggtgccatgcatttcaaacctcccgctaaccgtgtccagtcaccctacaatttcgtgaaggcaggtcaagcacctacgtcaactccctaccgggtgtacgttccgctcaaggagcgtcgcggacttgctgtgcctgtgaatagccgagaggaagacaagcttatcaacaaacgggatgggctacgtacatttcgaaaggaacgaaacgtccctacatctgcatcttcacagcctaaggaagagtgggctgatccacagatgatacgtcctcttgatgctaaggtgctgaacgaaggcaagcaattcatcgctcgagccgttatggctgttcaaggaaaaggtgtttctccgtctttccttacgctgcaaacactctcccaacatgcagggggagatgaaaaacgcaaccatctccacagaaggtatgaagaagccgaaggggaatccgacgagagcgttatttgggacacagcagctctgatacagtggatgaaacccagtcgatcctataatattcgtgccacggatgcccttggcataaaaaatgcatcaggtgcccagcaagaatctagttggccactgagtacttcgtcattcctagaaatagctcgcaagttcaacaactggactcgtgcctctggctttctcaacaccgtcaggcggttctggccttctggcacggtagccaaagtcgctgacgatgcaggtttaaagcacaacataatctggcacaagcttttgggagtaggaggcattggtggtgtgctgctccttgaagacaaggatgagccggttggaagcccccttaagaaattcgcaggaaaaattctgtatcaattaagcgacccatccatgaacctgagtcagtcgaaagaatatttctaccaggcacgcaacgaggagatcggagtagcatcactgtttaagcatgcggccctgagtttgcatgactgcccagtgactgctactgataggatgcagtttcttttccagaggggctttgtactcccgcaaaaagcgttctggtttgaaggcactacacagataccacgctttcaggatatcgtcgaggccagtccccgggtagtcggctcccccggcggagagattatgcgacttgatcgctacatcatcgcctaccctatagtggggcctgaccttgaggacttggatccgcggaagttcagcttaagcgctgtaacgtatatcatttataagcttactaagttgatggccacgatgcaagagatgaacctcgtgcacacggacattaaggcggagaactttcttgctcgagatgacggcgaactgtttgctgcggatctctctatgtcaattaagatggaccctgcgacattgattccctgtcttcaagggactatgctgtacttagacccgaacggagccgaatgtgcttatagaagaggctatcagtcaccaagggccaaacgggacgcttatgctctcggtgttactttctataagctcatctgccacgacggcccttttcatcttggacgactcgaaaaagaagcaatggaacagaccaaaacatgtccgggaaacaacccattgctgctaatgctctctggcatatccagatttacaaggaaggactgggtcgaacggaaatgccccttagccgataccagtctcctgacaatcgtgaagctactcttagaccctcgggaggatcgacggtggacaccgcttgatcttgtgagaaaaactgcgttttttgatcaagcgccgggaatttag

SEQ ID NO: 159 - DNA, 1470 bp, Toxoplasma gondii
  source 1..1470: mol_type = genomic DNA
atgagcatcttgggaaagcatacggcgaccgtcggagaccgatacaaggtacgactcacaccagaatatggcccagggggcggttatgggcattgtcgcgattacctgctgcagagcgagagttgttggaggggggaccttacgtcgggggtcagaggagttctgacaaagaaaggaacgagagcgagaacgacaaaacgccacgatctcgtcgctgtgacgtcgggagaacattactggaaccaagggcttgtctaccacgaggaacagacagcgcctcctgttgcagcttctaacagtttcatgcagagcaccacttctcttgctacgcctgctgacctgaacgctccggttgacacccagggacagctcgatatcaacagcgtcctgaagaatcgacctcccgcagaggcacagctctcgcctcgcgagattgcagccaaaacccatttcgaagcaatgtttgccaaaggcctgcaactgacggttgaatccatattcaccggagaaacctttaccctgacaaaaccggcccgtttcttaggatggggatcaacggcgattgtttttggtttgcaccgcgtgaaagtgggcggagcaagtgctccacaacaattggcagctaagataaacgtcaggagtttgcaagaactgcaacatctttcctcgtctcagaaaaaaacggctcttgaggatatacaagaacgttttctccgggaagagagctcagcgaggaatgcgctgcaacatgtgaccccagaaacggctctggagcacggtgtcctcttcccagttgatgtttgccgtatttctaaattgttctccggattttgtgcaggcatttcctacgtaatacttcctgttctagcattgtttcctgtttttacttgcgacctccagcaggtcgttaagagtggcctatcacgtgcggcgaagttgtatatcacccggctgctgctgcaggctgttgcgtggctacatgccaatggcgtggctcacaacgacttgaagctagagaatgtccttctcagtgcagaaggaaaggctgtcattgcggattttggtttcgcagtgaagcttggaaccgcatcagccattcagttcactgctccctatttggatccgcaaaccgcagaggcagtgcctcaagagaaaacgaaaacgaccgcgagtgaggaaagagatgcatgggcgttagcaactctcctgtttttgctttggtgtggatcgtttccatacgtatcggatgagcaggccgacctccccaccagcgacttgctgaaattgctggtgacactgggaaagacagaaaagccagcgccgaacttccatctgtgtaaagacctcccacctgcggtgggacatctcgtaaccgcatttctacagtggaacagcgacaatcggtctcgccccggggatgttcttgacgatttccttgctgctacagtgtccgaaggagcgagcgcctaa

SEQ ID NO: 160 - DNA, 1413 bp, Toxoplasma gondii
  source 1..1413: mol_type = genomic DNA
atgcgtgactcctcaaggtttgggaggactgtattttctcgtattttcaatgtcatcgcacacttcgaaaatatgtcgtttttttcgcttctgcatcttcactcccaccaaagcgtagagaatgcgacgccatcgacatcgccagtcgcggagcctaatgcgaacgccaaggatcatccgccacgcgcgggtgacactggatatctgttgcccaagccagactccggaaagtcttcgtcgacgcacagtggttggtgtctctcaccacatcgagatgcccgagatcacattttctcccattcgtgcatctcttcagctgcgtcggtgaaaattcctcggcggacgaaatctaccaaccccgtggatcccaactccaacccatcgccctcgactccaccacccgaaggtctttgcgcgaagcgcagtcatagcgaaggaggtagcgcagcagctcggtcgaaggcacacggatggggccaccgagaaaggcacgcaagtcgcaggcacacgacccagcacctgaatccggtgaaagccggacagccgggtgcgtatggcgctgacgggggcacacacgagaagaacatgagagagaagggcgaggaaagtgctccacagtgccggtcgtcgaggtggcaccttggcgagtctcagagagagcacagtctcgcctctgtattccattccgtgatggttgcaatgaagtctctgccggcgacgtttcagcgcgagtggagcctggtgcgtaaaatctaccggcaaagtgggcgagtgaagcacgcgcagagactggagcgggcgcgggaggcaaagctccagaaattcggactctctcgaagagccagttccagaaagccgctgccctcgcttgtatccatgcagcaggtggtcccgacggcggaatgtgcgagcgcgctgatcaaagaggtccgtcgcaacttggagaagagtatgcgggatttccagcatgcttcgccagccctgagtttccgcagagagcgtcttttccctccaggacgcgaattcgtcgtgcggagtctcgcgcgaaacccgccgtttaccactatggcgctggtcgcggggcgtctgctcgggggaggttcggaggcaatggttttcgcggctgaagagatcgagttgccggagaagcgtgacgtgtttataggcgcagacgacgcgtccagggagacgtccggcgaatatctgccccggctattggcgataaagatctacctgtgcgaggcgaacttgctcgaccagccagtcaaagcagcggaggaggcagaagctgtggagtggctccagatggcattctggcgtctcgttccgtcttgcgtggacgttctgctttcgcgtcagctgggagtggccgcgccttcctggcgctacgagtggcggaccgaatctacttga

SEQ ID NO: 161 - DNA, 1596 bp, Toxoplasma gondii
  source 1..1596: mol_type = genomic DNA
atgcgagcccaggtggcactgtgtttgtccctgtttttgtttgcgactggtgttttcggtatcaagctacagattacgtccagacaaaagaaagtgggcaggctccctgctgacactcagcctgaagaatctgcactcgagacaggtttctcagactcacgggcaaaacgcggcttctcccaggcaagcccggacgggagaaggcagtctgcgggacggtcaccgagtagacgaagcgactggatatctgaaatcagtgcctcccctctggagacaccttccagtgcgacatctacaggaagaagcgggacgtatgctgttgatcgaacacagcagcgaagaccagtgtggaacagattcagagccgttcaaacgcatttcgcccgcttggcttggcgactttgcaggccgttcatctgcccgtccgttcgccgtcggttccgacacactgagcatgggccaattcccgcagtcaactttcgtatgggtcttgagactggtcaggctgcgcttgccgattactgtggcatgcttcgtctgacggaaagagaggcatgcacggaaactgcgcaacaagtgagcgacttgctaatctccacccaagtgatgcctcccgacagaaatcttgtgtttgaatctctgttcaatccgggatcgagagtcaaccttacaaggggagagctcctcggctgtggaggtactagcaatgtctactctatgactcaggaggacggcaccaaagtcgcagtcaaaattttgagtagttacgctcaaatgactaatttggcatcagtcctgtcagctggcgcctcagccatgaaaattatgcgccgagaagcgggaatttccgagcttctaggcaatcaagatctcgacgatattctatataacgaccggctactagtccccagcgacgtgctgcggctccctggcaaaaatgattggtttttcccggaacagtcaacggtgatatacaatttttttctggcgttcccgatcgcggcaggaactttagaagatgtcgttccgcttcttgacaccacgcagaagagtttcgcagcgagagtttccgctacagtccaaatggtcaaagtggtagcgggactccaccgaaaaggtctggttcacggcgacctcaagccgtcgaacttccttgtgtccaacagtggcatcgtgctccttggcgacttctcgtacgcgtatgtgcgaggtcaaatgtctacttttccaattatcacttgggcttttttcagtccagagaacattcgaatggctacgcaattttctcaagttcgggttgagctgacccacgattcttggatgctcgccttcacgatctactttctctggtgcggtcgcctcccatggggtatagccatcgaagaaggcgattacagaaaaatcgttgctatcctcgatcagaatacgccggagacgctaaacttccacaactgcaatggaattcctgcaggcatccagcagcttattcggctgctcctagcgaaagaccccagtcggcgttggacgccggaaaaagcaatagctgaattgaatatattcaaactcaaccgctccgaatatgcggcgcaaacatga

SEQ ID NO: 162 - DNA, 1899 bp, Toxoplasma gondii
  source 1..1899: mol_type = genomic DNA
atggctgccgtttgccgagaccttcttccttacttcacatcatggcgaattctcctgtgctgctattccgtggggctgtttatgcacatgtcaaggtcgctgcttccgaacactatggtatgggcgtcagctaactctccgcgccggctgagtcactcaacgccaagtgttttccgttcctatacagaaattgataacaccgcgcccgtcgggtctattcacagtccaactgaatcaaatgtagaaccaacggccggtcgcaacaaacgggcactggcaacggcttctgaagagcagttgcccacaagtcaccggagtcggcggggggcagcgacaagcatactgtctggtctgaggagcgtctacaatgcttcatcgcgtccagctgttgactccagaaatcgtgccaaggatccagatcgatttgtaatgcgaagagcagtcgtacactcaattgaagaagtaacagagaggtccgatcaccacgaccttcgtggagaggacagcgcccaaaccgacagcgtcaacgcacctgacgacgaactagtcagcgagcttctacaccttggcgagtatccacatcatattgagtccctctctgatccggaagcggtgaaaatacttgcccatctcgtggctaccacaaacacgcatgacattgtctcgcaatcgcgaaagaagaaactggtcgaagcgttcaacatgtaccttccagatggcgaccgtttctttgtcgaatctctctctgatgcatctgagtccaaagaatttgtcagaggcccgcttctgggtgtgggaggaaacggtctagtttttgaggcgcaggacagtgacggccacgtatacgcactgaaactcctgcttgtgcgtatgagcacgtttctagaggccgtgggggacctcagccacgatgcctggaggcgcgaagaggattgggcattcgccagggctcttcgcaaggagatgaaagtactcaggttgtttccacctgacaagtcacccgagcagttgtacgaagaagggtttgtcctgccgttgtttcagggtatcctcgcggggaagccgcgaatgactccgttaacggaggagttcggtgcgacgagtgttgtggtcggatttcataaggtggcgtgtagtgtagggcaacttttcagtgcgcatcgtctcccggacggagtcaagctcgagctgactaagcaaatggtcgaccgcgtggctcggcttcatagctacggcattctgcacggcgacgtcaagtgggaaaacttcttcctggacgacaacggacgcgtttttctcggagatttcgagcaggctcaatctctcggtcaccgccggacggggccctgcggtccccgaggtggaggcactccttccctgcacgagcctgcacgcgctgcgtgctacttcagtgagccagatcgtcggttggatttgctcgaaagtcgagacagctggtgcctcggagtcgtttcttataaactctggtgtcatcgcttaccctttggcttgcacctaaatcgagctgacatggaagggttcatgaaccaggtggccaccatagaacgagatcgcctggtccccgacttcgacgattgccgcggttccgaacaaacaccggaagacgtgaaagagttgattgctgcattgctctatcatgaccggtaccgtcgggagacgccactgagtctcatcgaaaaatcgcatcttttccgtcgccctccttccgagaggaacgacgtcagcgtggaacttagagcccatgaaagtgacgcggccgacgtactccgtccagcggctcctttgccggaggagcgcttgcatgcgccagaaacaaagtttttcaaaccgagaaaacactggtggaggagttatttgcaagcctgttcaattcaataa

SEQ ID NO: 163 - DNA, 2241 bp, Toxoplasma gondii
  source 1..2241: mol_type = genomic DNA
atggcttctccacgccgctttccatgttccaccatggcgcggctatgtgttttgcttcttttctttactctgtgtctcaccactgcgtcgtccctggctgcgtcggacgcgaaactcgcttcgggtgctcccgccagtgacaatgagacacaggagagaagccaggcaaatacagcgtcaccctcgctaaccttggcgctgagtccgtcggacaactctgaagcggagacagaaaatgcgggggaacactctaattcctcgcagcaggcgaccgtcgcgcctgcaaccgagtcggtcttgatgagtgactcagtaggctctgatccgctggccgcgaaaaccacaagcgaggagacaactgtcgaagcgctaaactcggaggcgacaaccagcgaagatccactcgctggcagggcgttttcagagagcctcgatgcctctgtgaagagcgacactgcgtcaggcgaaagcgcagaagttgcggattcgctagaatctcaggaggcttctcacctggttggagcagacgtcctgattggaaaggaacgaccgactgatagcgaagtttcgagtgcgacaagcagtcccgagtcttctgctgtcagtagcgagccggagagaggggaggatgccgtcgccctcgcgtcgcctagtggtgaggacgtaggccaagcgtctggcgacttaggtcccctagcgccccgcgtttcgttaccgtcgccgttggaagttcaaggccgcaacagagacaaacaggcggtcggcacaagcctcgaggcggcccagcgagaggcgccagtcgacgcgggcgcgatacgcgacctccaccacctccggcctcccgcgccttcccgtggaagggccgctggcgacggcaacggaaacaagccgattggaggcaagcagagtggagcggcgccagtgcctcccggctctcctgccaatcaacaggctgacaccaacccagcgaatgagacctcgacaggccctggagccggtgcgggtgcggcgaatgatgacagtggagagcaatccgcgacagaggacaagagtgacagttgcgggtcgtcctgccgaagaggccggagcgagaggcgccacaggagaggactgcagattctcacggacattgcttcgtcgacgtggaacgctatcaaagcggtaccaacggcagtcctttcgggcgccaggaaaatgcgtctgatcgctcgcgggaagctgccactgtcgtggcggaggttcctaagtaaggtgcctcgggtggatgtgaatgcggtccccgagttccgtagactgaaagagcagatgcgtcgcgaggatcgcatggtgatgctcgtggagactccgtcgaaggagctgagagcgctggtgaagtcggcgatgcgtgcgctggggctgtctcgcgtcaggccggggatcactcacgcgacggacccgtcgccaggcgatgatgccaacgcgcagatgctcgaagagccgctggtggtgaaggcgcgcgtttttgacgaacgagacgggacgcgcgtgggcctggaagtgaatgggcagctttgggccgcgccgaagaacgcctttatcctgccagcttacggagcgtggatctctgacttgggtgactggaagccgcgggcgaatgagggggagcgccgcaggaggaaaaagaagctgttcatggccttcatggtgatgcctcggacgcgaggcgacgttcgagactacctgtgcaagcggtcgcttcccgtcgacgtcaagtacgctgcagctgagatgctgtacgcagtccagaagctgcaccgcgaaggctttttacacagagacatcaagctgacaaatttcttcgtggggtacgacggccatgtgctcctcgccgacttcgacggcgtctggccgatcggagtgccggcggacgcagacaagtacctcgtctacacccggggctacttggcccctgagatagaccctcacgaccaagtcattttgaacaccgcaaagtctgatgtgtacgccctcggcgtctgcctcaagcagctggcgaagcggtacccgaagacagccgacgtagacaagctgcacgacttgagtgataagatgacggaggcgaatcctcgcagaagattcacgcttgaggaagctctggggcacagtttcttcgacggcgtcgacttcgaaacgctcgaacaacttaaacacccggcgccgttccctggagacttccaaaatcgcgcgacgttttatcgatag

SEQ ID NO: 164 - DNA, 1662 bp, Toxoplasma gondii
  source 1..1662: mol_type = genomic DNA
atgatgtttcctgccgtcgctgcaccgcggcgtcggctgcccggcgagcgtctgcagaggtcgcagaacccagtggaaacgtcttggctttctttccggatactcgcgactcgcggtccttgcgtgactttcacattcctctttctcactgtcgccttcctggggctttcctgggtctccgtcgccgtcgctgcacatgcagagcatcccgaagactctgcaaccaactttcttttttctttcgcggagaactcgctcgcgaatcgcgaaccaccggaagacagcgctgcgcgaccctccagccgcagcggtggagctgaacgccgccgtctcgactcactcatcccaggttttctgaagcggcgccgcatcttcaagcagttgcggcctgtcgacgagtttcagcttcgagagtttcaggaggcgtcgtcgaaggtgaaggctcagttcttcagcgcaggtcactcgagggtgacgtttgtggaccggccgtcggcggcgttgctaagttttctccacctcgaggaggaggacgtcccctacggcgtcgtgatcaaggcgattccgtacgacgccttcgacttctacgagtccgtggcggagccgtacatccaccgcatgttcgacgacccgcgaaagtttccgtacgtcgtgcctgtgctcgcggcgctgcgaagtacatcgaagcgagtcctgtacctggtactgccgctctaccgcgagctaccggagacggtcgacgaagaggcgcgatcggtcgactttgtgttgctgcttgcggagatggccatggcggtgtgccagcttcacgagcgcaacttggcacaccgcgacctgaaggaggacaactttctggtgagccccgagggtcacatcgtcgtctcggacttggcgacgctggacatcacagacaacaagtcgtttctgattggaacgtccggctacatgcccccagaaacgcgcagcagctacttgctgcggaagggatacacgcgctcgcggtacggcgagaagacggacgtatacagtctcggagttgccttccggcaccttgcattcatgctcgaaggactgggcgttcaggtgcctcacaggacgcagctcgcgaagctcatcaaaaagatgacaagcgccgaccccgagaaacgcccgcttatcggcgaggtgatggaagacccgttcttcgcctccgtcgacttccgcctcgtcagacaacgagctgggaaacatcctttcaagaaactccccggcgcggacttactggtcgagcgccagcgcgcgcggctcgaagcgcgcgagaaagcggacgcggcggcgaaggcggcagacaacgcagaggtcccggccgccaagtcacccgccggaaaaaccggcggagcggggacactgagtggcgaccgcgaccgcgcaggaagcggcgagaagcctgcagaacgagcagaagaagagaaaggacgcggacgcggagcacagacgcacgaaggaaaccacgaccggacagacgacaccggaagagaagaactgcgggaaggacccggggaccagaaaccatcgggagaggaaaaccgaggaggaggccaaccacctggccagcgagaagagcagagagaggggacaggactcgaagagggcttcaacaaggaagacgcacaggagagctga

SEQ ID NO: 165 - DNA, 1923 bp, Toxoplasma gondii
  source 1..1923: mol_type = genomic DNA
atgccggaacaagatcttgctagcgggtttctgcttcgcttccaaaacgcaaggcctgtctgtctctctgtgggatcttttgtttctttccgaactgtccaaccaaggaaaatgagggacagaggctggcgatgtgtctggcatcggatggcgggagttggggcgctatttggaatatttggagtcttatgcacggtcgaagcaggcgccaccgtcgccgctccccaggttgagacagggcctcttctgtctgtgcgtgcgccgcgttcgcctctccatctcagagatgtcgacgccccagaagtgacgcatgcctcctcggaaggatcccctcaattcgaatccagtctctcccaacagaggttgaggcgcccagcggatagaggagaagcacacaatggcgaggagccacgcaaagacgctgcaacgcagacagtgaggggttatggtggccagagcacggaaccaccgcctgcatcaatcgttcctgtctcttccgaggcgccacaggatggggcagaacagagacaagcttcgtctgcagcggagtcccttgctggcctagatcctgatgcgggcgacactggtctccgtagccaagaaatggacgaagaaggctcgggtgcagcccaagatatggagcgagcgcatgcggcgcagccaaccgtcagtacttgggatgacgcacacctcgtccaagtttccaccagccacccggacatgtttcctgtcgatggaagtttctccaagaaacaagaggggcgaagggaacggcgacttgctgttcgtggcgatgactcgtttgctagaggtcacaatcgcgatagggacgcatccaatggtcgctcgattctcaggagggcaccagggtgggccaaaatcgccgccctggcaaccggattgctggtatccgcgttcggatacagctcgtacaagcatggtggcccgcgggtcgctttacgaattcacaagctgcatctgaagaggaagttaccgatttcgtggcggcggtatttgaacaatttaccggtgttggatgagaggcttttcccggagtttgaagacattttgccgtggctgaggagaggggcgcgtctggtgaagcgcgtgccgcacgtgtccgaggcgctggcggactttatagggttggacgaggagacgcggaggacagggattgtgataaaggtaaagtcttcaacggacgctgaggcgcggcgcctggtttacgaagtaaacgctcacgcaaacatggtgccggataatcccttctttctgccgattatcggcgcctaccaaggtgcgagcaagcgtgctgtgtacatgattcttcctcgcgcgcgtgcggacgtggcggactatgtgagagcgcgtccgtacgatgtcgacgttcgccttgctgccgctgagatggtctactcgaactacattctccatacacacggcttcctgcatcgggacatcaaggctcacaactacttcgtgacgttcgacggccatgtcgttctcgctgacttcgaaggcgttggcgtgctccagcagcgcacccccgtcgtcggcacccgcggatacttcgccccggaactgtcgcgggccactgaccacacagagaaatccgatgtcttcgctcttggccagactctcaaacgcctggtcaagtatatgcggccgaccgtgcgtgtgccgcacctacgcgagctctgggccctcactaagcggatgaccgcgaaagatccagaggagcggccgacgctgaaacaggtcatggaagacccctactttgacggaatcgatttcgagcgacttgaggcaaaagaccagggcgttcctttcaggggggacttctcgatcgacgatcccgacgctggggggaaaatgtacataccgccatccaaggaacaagaccatgaacaggaaaacgaatga

SEQ ID NO: 166 - DNA, 1875 bp, Toxoplasma gondii
  source 1..1875: mol_type = genomic DNA
atgtaccagctactgagaataaggtcgctgttcatttttgtgtcaattctcgttctacagacggtcacagtagcggcgctggacgatggcgccgagtcacttgatccacagcctactgcaggtgagggtgcaaaggagctgggaaacagaacaacttcccgaaggaaagatgccgttgctctaaaaaccgatggaacattgtcggaggcagaagcgaaacgccctgtggaggagcggtcaccgcagtccacgtatgacttttcttctgcagcgtccgcctttcagaagtgggcggacggtatgacgcctaaaaagaaagaaccagataatcttctggttgtgaaaggagatcgaaaaccgaaggccccccggatagcggaagacaacgggaccgatgatattgcagtggacgaaggcaacgagatagaagaagtcattcttcctccgctgaccacttttctagaaagagagcactacagtgcagtagctcagatgctcaacggcatgcatgaaagatacgagcactacctctccgcgactgtgttggaggagacccgggcgttccttgacaaggtgaaagatctccggagcaatcacatcgagcgattcaacaaagtaatcggcaacaatgaatttgcattccttcgtcccctacggtactccagactgcctcacccgtccagcgatgtgttgcgcaatcttcatccagagcacaacgcagtggctgaaaagcactggaaacgtgcctggggaaatcactatgcctcgggagaagtcttgaaaatcaagagactcgacatgattaactacgggtacgcgagcgccacgtacgcggtcaagcgcatttttccgtacactctcgatcccgacgaccgccagtctcggaccctcgatcaagacggagccctcaaggtgtttgttgtgaagagaaatcgaattgaagtggatctcgtcgaagaactgctcctccaccagacgcgcgcctggcgcttttttcctcccgaacgtgcggagcagctggcagaaacggaaggtctcctgatccctgtttctctgctcaagctcgtgaacgacgatgacgaggagatcggccagaaggaagacaggatcaacgaactgctgggtccgaagggcgacatcctcaatgcgttcctactctacccgcgtgcctacgcgtgcagcctcaaattcttcctcatctcttggggacgaacggaccttctaatcaagacggcgccaatgaaagcgatgatctccatcagcattcaaatggtctacgcggtcgcgtcactcaatagttatggactcgttcacggacacattcgaccgagcagcttcgtcatgacgacagacggaaaggtgctcttgacggacttccacacagttgtggaggagggctccaaactcagctgttcccacaaacgcgttcgtgcaatggcggaccttaacgcctctccggaagagctggaatgctctcaccatggaccaggacagacgttcgaggcgtcttttgctctcgacgcttggcgactcggagtgagtctgtacaaactctggtgtcgagagtcttggcgtgaaccgaagccaggagaaacctggaccgagcgtctgaccacgagacaagtcgctttcgtcaaagcccagcagcggggacgcacgtcgcgttccggcctcgacctccaacactgcagagcagacaccccttccttcattcttcgtcttattcagcaattcctcgagccgaaccccgagactcggctaacgcctatcgatgctgtcaagggaactagcctctttcgccatatggaaaggaggttgaaagtcgttcaagatattcgcgagaccatgctgagaaagcgcagcgaggagctgtag

SEQ ID NO: 167 - DNA, 2331 bp, Toxoplasma gondii
  source 1..2331: mol_type = genomic DNA
atgggacgggcaatatctttcgtcctcctcctgtcggcattgttgccggaaggccgaggtagtgtaggggcagctgcgctgggctccttgtcgctggcgcctacggcgacaccacaaaccttgctcgaactctctgcatcctcagtcacgcctgaagagacaggcgctgctcctttagccacaccaggggacgatagcagaaagcggaaggaagatcaggctgcaggcgaactactcctctcttggctgcaagttgccggcacatctccctacttccctgcggctggaccccagacacgcagaccggtagcatcctcttaccaaagtagaccaagaaacccttctcatcagcctcctccacgaggccgaaggggtccagtgcgacgctccccgcaaccggattctgtgccgtataatcttcgccggagacctcaggccgttggggtacaaccggggtctgcggccaccagaggtcgacttcaggagaggggtggcttgcggcagttggggtcaaatcttcggcaccgaccgttagcgcggcacatgccacccgaatattctgttttaccagatcaattctctgctcctttgtttacttcggggggaaatgcccggtggttgggcgttgacccccaagaaggctctgacagtgttccagcatcgctaactgatcccgtgtctggaccactaagtgaggagccgtctatcgctggtagagaccaacggccatgccaacctgtcgcctcacctccccgttcgtatgcaccgcagcctctcgggaccagttcgcccactttcccagggtcatcgccgttggtgtcgaaacaagtaggttcagacaccccacctgcgacgacgcacacaagccagactccatcaaaaggcaaaaaaccgccagcaccgcggccttgggtagagccttccgtactttccagtgttaaaagatccgaactgacacttggccaacgtgatcttgctgaccttgtcgggggcagcccaccgcagacgacccctactatacagaaggcgtcgccaccaataacagatgtctccacagaccctcccgagcttggcgtttctccacaacgggtgctgcgaccaaggaggatgcctgagacacttccggctcgcattttaccacctcagcacatatctcagcaagtgaagcaatggagagcgttcgtacagattagtccggcgatatccgccgcttctgcgtcgagcgcacagtcgcctgaaagtcaggcgatgtcagagagtatcgatcgtatggttccacctcaggcaagttactcggtcgccgcgccagacgggacggtgcgacaatttatgcgcggtgcattcctcggggccggagccacaggtatcgtaactgagctcattgaaaagacaagtggcagatattttgcggcaaaattctttttcaaagaagttgcctcaatggagggggcgtccccggctgcttttcaggccgcccagcagcgactgcagaaagaaagcaacggcaacgaattgctccgtacgacggccgcacaagtccgcgatttgtggcaaaaaggcttcgttgccagccttggcacatacaaattgagtgcgagaagcggagacggaaaccagttgctaggcacaaatttggttgatcccgagtacaccggactcgacggccaccagcttatggtcctcagcgattttctgctccttccattgatgggtcccaggctagattcgcttcctcacactgctttatctgacaatgcacagaaatacctttttcatacgcttgtgactgtcgtcgggtccctccacaagagtggtcttgttcacggtaacattcgcaccaccaacgttctcatcaataaactaaccggagaagctggacttgcagatttctctcttctcatgcaaacgggaagcgatgtgactgacactatgagcttccatcctactcagagcgaaccggaacgcgtccactccctcttcggcctcggcacccagttacccgcgagcgaggattttgattcctggaatttgggtcagctgctctttagtcttctgtgcggatttgacaagcttccctgggctctcggtcaagtatttgcgagattttccgcagaatcgccatgggaaatggcagcagagaagttctaccgacaatttatcaaggaagtgaaacgagaaaaattcgatgccttctgcccaggcatgacaggcacgaaattgcagctcataagcattgtaaagctgttactggaccccactcatgaaacaagatggacagcacgaaaacttgtcgatgaacaccccttctttcaggtggtggaggacgcatga

SEQ ID NO: 168 - DNA, 1626 bp, Toxoplasma gondii
  source 1..1626: mol_type = genomic DNA
atgaaaaatactctgttgtcacctgttggtttctttaccgctctcgctgtacttatagaatgccacctgagtgaccggtgtgttgctcatcatggcagcagcactgatggatcaggcctacggccccctcaagaggtcgactcggcaccacgaacgccgtcgatcgctgttaaagagcttgccacgtttcctggagatgacattcagacgtcatctcaagaattgcccggctatgaactttggaccagggaacaatcaggggcatctgtgcgtgttgggtttccgcagaacgccgaaagttttctgacacaaagagaagcgagagacgaaatcgcgaatgctcacgagctcgtcgctgtaactccagaaggcgatgcgtggaatcacagtggtgttgtccccgaggagcagactgtcacgcctgcttcaggtagcttcattcagaggcaagccgcgcatgcaccgccttcgactcgattgacgcccgtggaccgccgtggcaggtcacacacagtgtcagctgtcagacggcgggtgaccgtggaagacgttatgcgaccggaccaatcggcagccatgcatgcagtgttgtcagcatttggaggaggcctggttctgaaggctaagaacaaatggggtagaacacgttacacgctacagggacccgcaacattcttaggaatgggagccgagggcattgttgtacgtctaaatcaggtgaaaagcgaccgggaaagatcggtgacaccggtggcagtcaagctgtgcctcattcgtgcagcagtgttctcggggctgacatggtggagaaaacgaaggaccagaacagaactaatgaaactgtttctgtcgaacgagaattctgtgaagcgtgctctaccagatttggacccggccgaaatgctagagcacggtctcgtcgttccacatcatgctgagcttgtttccggtatgcccacgtggtttgccgcgggcgactcattttttgtattacccgttgtttctgtgtctcctctttttacttgcgacctcgaaacggtcgtgcaaaacccgttgaccttttgggcgaagatgtacattacccgccagttgctaaagagtattgcgtggatgcatcaaaaaggcatttctcataatgacttgaagcttgagaatgtcctgctcagtgcagacggaagggttgccatcggcgattttggtttttcaagccccttcggggcttcgttgcccatcaggggcactcatctatacatggaccccgacagctcagaagcattttttgaacaacgagagaacgaaatcactccccacagagatgcatgggcgactggagtccttcttttctatctgtggtgtggcgtgtttccattcgggttacagaatgtcgctaacgcgggtccgccacaggtgatgagggtcacagtcatgcatgcaaggactaccaggccgccgcccaacttccggctgtgtcggcgcatcccgcgtgaggttcggaacctcgttaccggatttctgcagtggaacgaggaagctcggcgtctccccagcgatgttgccgacgcgttccttgccgctacggacgacggtggtagagaggcgcgtcggataagaacgcatcaattttga

SEQ ID NO: 169 - DNA, 1767 bp, Toxoplasma gondii
  source 1..1767: mol_type = genomic DNA
atgagcaaaccttttttcccacaggtgtgggtatcgtgtacaggtggagtgttgaatttgagaaggcactggctgcgtgtgggaaatatgtcacgagcttttgcgccgacagtcctgttcgttttgctaaatgtaggggggagtttgtgggtacctagaacattgccagtgagcgcttttcaggacgctgttgcacctcatcacccctgcatcggtcgtccgtgcgaccaggtggcgtctgttgtggccgtaccgccggccaacaacctcggctttaaacgtgaaccatccgtaggttctccagggcatttctccttcctgcaagcagtcggcggggtgggagggcctccttacgcaggcgacggaagcccccttcttgccagtcggttagactggcagtttctgcagcaatggcacacggatgaagacgaaaatgcccgtgacggcttcgtcgccgctctatcgagagttacacgtctaagtcaaattctagaggactgcaatatggagatggtcttgctccttgatcgcgttttttcccgcagccctcgtatcacgctgtccgctgttgagcccaggacacaccggcgtcgaaccctaaaacttaaaattcgctctgtggcgggcacaggaggatacaacatcgtcgtgaaagccttcgtaataaagtcgtggtttttccggctagggcactggctagggtcgctgggcaggcaaagaaacaccgcgcgtgcacccggcggagaaaccggtcagcagacaggcacatctggcagacggagctcgcgctccagagggcagtctggcagggaggaaggcaggcgcgagccacaaatggtatccctgcgaatccgagtggggggggctcccgattgtcaagtggcgaacgagatgcaggcagctgaagtagtccagaagtgcgtttcagaggcagatcgcatcatgcatgtgttccccgaagatgtaactcctgatgtcctggtgtcgcgttttcggttcgcagttccattgtattcggggaggatccgccacagatctgcgctcctgggacaatcccgcggttatgcgctgctaaactacatggatgtgttgccaccgatgctgtgtgatctcttcgctgcccagagtgtcgtacagccttctatgacgagagccatagcaaaacagttgcttgagctcgtcgcacatcttcaggcgcttggggttgtgcactcggatctaaaaccggaaaatgtgctagtcgacgaagccggaaatttgtttctggcagactttgacaaagcccacaaggtagggtcccgggtccgttgcagcagtcttccacactcgctgttcgcggatccacaaacggtgatttgccgagagaccactcctgatcaggaggtgactctggctttctcgcaagacgcgtgggcactcggaatgttgatgtacgacactttctgccgcaactggcccttcatgggtatggactataacaacgactcagacacatccaacacaattgtactcgcagggcttttggaccgggctgctgccgtagacacgcgagctcccattgactggataggctgtgataatcctcgagtggagagtgaaataaaagaccttatttcccgcctcctggatattgatccggaaaaccgactcgatgtcttaagcttctacatgcactcagactttttcaacgaaggacgaaacgaggcaaatcggtcacctccacagcggggcgctcccattttgcctcttcgggagtcaattgtttaa

SEQ ID NO: 170 - DNA, 1578 bp, Toxoplasma gondii
  source 1..1578: mol_type = genomic DNA
atgacaccgtcgacttgctgctttggagttttgtttcagagctttaggggtaattccgcgtctgcgtccgaggagtcatgtcttggggggggccaccctgacgggactaccgcaaccgttttccgaccgaagaccttccaggcactggggctcgccacggattctgacagtgagccagagggaaggggcggttaccaacgactgacagagtcgactcggcgaaagaagaaagcgactggacgcattgcctctctctttggccgaggcagaggcaaaggggatgaggaggcatcaggcgatgaaggcgccagcggaggaaaagaacagccactcggtcccccctctggtattccacggcgccgtcggttctggcagaaagaacacgtggagcccgaggatgcagtggtaagggcgtttcgcaggttcttgaaatacagagtattggatgtggaaaccatagagggagctccctcacagttggatcgatcgtcttggacgccttcaccgccgttctttcagccaggagaggggtcgtcgaaagccgtcgagtatttcgtcaaacagcagacaccagcgttaactgacgagatgcataaactattggaagttgtcgacccagttatgcctcccggcaggccgcttcagatgtcgagtccgtcctcgaaacgaaccacccacttcgaaaggggccccatgctgaggacagatttctttgcactgacagttgaccaccagcctttcaatatgaggatattcccgttgcctggcggattcgaaggggaacagaaggtggaacaatacaaaaaagttatgctaaatgaacagaaggttttaagcatatttggtgttgcggatggtaagaaagtcagcaatgcctatcactgttatcttccagtcgaagaagtcttttttggaaagggacagcaggtgatctcacttggtccaagcttaaaaatgcccagtgttgtttttctgtacccgagcgcaagcgcgacgctcggtcaagtcgctgaggcgataaaactagcagctcaacagcagggaactgcacttgtcgctcaggctgcccagctgcacattacactgcaactcatcaagttggtcgcgatcaccacctcaaaagggatcctgctaagaaggctctcacttgaaaatttccttttgaggggggatggggtggtttttttgagtggcttttctgaactcgtaaacgaaaaggaaattttttacgaaacagaggatgggacccttgttacacagccaccgacgcggacttcccgcggaagacgtttcacccctgcagacaacagctgtgatttaggacttgtcatctttagtttgtggtgcaacggttcgcctcctgagagagagccaagtggatgggtcaacctggatttctcgagttgcgagtcagaggtgccggtgcttgtccagcaaataatttgcgggttgtgcagggcccacggctaccctcctcagaacgctttccaaacccttgggagtcacgagtttaaacaactgaggcaattgtaccgagacgtggaacaacgtgctgaggtacatttattagtggaatga

SEQ ID NO: 171 - DNA, 1473 bp, Toxoplasma gondii
  source 1..1473: mol_type = genomic DNA
atgcgtcacgtgttcaactctagcgcttggcgcgtagatttgtcggggtctgcgaatgtcggccgcgttgcagaggagtttgatagacaggagggccctgacgctcttattgggcaaccaacgcatgcggacaatcaagaatctttgtcgaacttgtgtcatacacagaatgatacttcgaccgagccagcgggacctgtgtcgaacacctcacggaggaaagcgtttcgctggagggttcaccacgtgaatacccgggttttttctacactgcaccgctatcttcgctgtacgcctctctgttcgcgggctaagtatgatatccgcaaaaacgggctggcgtttgctcagcttgacgagcaccggggtcgttctgacatcatggcggtacttcgctgggtagacgtcgaggcgtgtgtatacaaacaagataaaggtgcgattgctgctgccgttgcagttgacagcctcgtcagcaatggtagtcatttcactttagacgtccttgataaggaatgccaacctctgcggatggtccgggggcggtacttaggagtaggggggaatggcatagttttcgaggcttcgactgctcactcaggagagttggactctttggccctcaaactactgttcctcgaccgcaccttcctgcaaagcccgcagtctgatatttcaaaagctcttgctgtaagcaaacgcatggaaatgaggatccgtctacttcttcgttccgttacatcggctcaactatacttccgcgacaggtttgccgtacctctcttttgtggacgaatacgtggacttccggatctcttcgatattggcagcaggggcgcgggatgcagcattgtggtcctttataagaggctatattgtagcctggctgaccttctgtcggcgtgcgctagcttatcgtaccaagcaaggctgttcctcacaaagcagatgatagaggttgtgcacaacttgcactgcaagggcctcgtgcatcgggatattaaagactctaacttttttcttgatgaacagggtaacatttacctcggcgatttcggccttagtgttcccaacggtagtactgaagctcttgtttacacaccaaagttgacagatccttcagacgtcggaatcgtactggcggggtgggacagaagacgagcgattttcgctcaagttacggaggctgctgatttgtgggctttgggtatgacattgtacaaattatggacaggcgtctacccttttggtctttcttcgaagcattttcgtaggacaaaggatgtcacaatgtacattcaacagttgagcgaggacaaatcattgcctgacctttttcgccagcgccgagacgctggcggtcagcaggtgcaccccgaagttcagaggatcatcaggggtctcctttgtttcgacagaacacaaaggttgcgtttaagcgaggttgtacggacctcacaagtgctttcctaa

SEQ ID NO: 172 - DNA, 621 bp, Toxoplasma gondii
  source 1..621: mol_type = genomic DNA
atgaattatctgggtctctgtgtaacgagggaaaagaaaggatgcacgacgggcaacgtatacatgttcacgccccttttgcagggagacatcaggcgggtcgccgttcagcatccttctcagtgcatcagcggcgagcttgtcctgaaggaaatggcggcgtcgctgaaggttctccatgatgcgggccttgttcacggcgatgtaaaggagcaaaacttttttgtggggagagatggccacgtagtgattgctgacttcggtgccctaggctaccctggttgtagtttagaagctggtaccctaggctacattgcaccggagcgacttgtcaacgacaacgcaaactcttttgcctcagacatatgggctctcggagtgactttcaaaaacgtgttaactgccttacgcgctacagtccgagcagaccgggaagtgttagatggattgtcaaaccggatgaccgcttccgatcctgctgctcgtccatcagtggacgacgtgctgttagacccctgtctctccgccccgcccagtctcgcaagccacgatgttgcaccgttcactcccgatgcttttggttattattgtttgactggagcgaccaatacatcagattaa

SEQ ID NO: 173 - DNA, 1533 bp, Toxoplasma gondii
  source 1..1533: mol_type = genomic DNA
atgcggttctcagccgtcctctacatgctgtcgacttgcgcggtgtgtggcgcttcgttaggtttaacgtctgatgaggtggatacggtggccaacaccgatgctgccggtcccgcggagcagaatgaccgtttccggaaactgggtgaaaaactccgttcgtcttccgataaaaatgaaacagatcaggctacttcagagtctgaggacgcccatctgtggtcaagtggatccgaaggagcgtctggagctcctgacgagctgaccagtgtgacttctatgccgttcgaggaagacatagggtacagccaagcagatttgacggggtactccgcgtccactagtcagcagtcagaaagctgggcgaaaagggcggtccgcaaaggtgccgcacctttcctcgaagcttctgagtcatcctccgcgtcaccaggagtccttggtctcggctggtctttcgtccggagtgtctgggatgatctgaaagaccttcagtcgtccaactcaagcagagataaacagaaggaaggcgacgaagcagtgaacgagactggacaaaacgagtctttctcctggatgtcgctctggaaatggtggtctttctatgcgaatctgccggaattggttgagacggactacgaagaaatgaaggacgtggtacggtcgatggagtcctcgaaggagcctgtgacgaggcaggtgtacatggggagtgcaaagctggctgaagatcttcgcgttccacatgcactgttgacgggcggcttcaccgtcaagatgtgcccggggagcagaagcaagccgtggaaagcgcttacagagatttttctcaggaagaaacttctgccgccgaattccccgttttttgtgccgctggttgcaacagcgaaagggaaggaggcagccacgcttcagttttttcctccgacgcgcggcagtctccgggcgatcgccacgcaggccccagaaaagctgaatgtagtcttggtgatggccgagatggtggcggctgtggaggcgctgcacggcctcggaatcctccacggagcgctctcgctggatgccttttacgtcagccgggagggtcatgttcagctgagcgacttcgacagcgccattgtcgacaacgtcttccggccgatctcggagatggccgaaccggtgcgggacgggtatagggcgctgtcgcggaagctgaacatttctctcctccacactaaggcagcagacgtcttcagtctagggaaggcatttgaggctctcgcggacctcacagatctcgagaacggggaccgactcatgctggaagttctggtggagcgcatgacccaagcggactcggagaagagaccgagtctcaacgacattgcacgagacaaatttttcgaccgcgtcgatttcgactcggtgcgagctcgcacaaatccatgtgtctactcatgccgctggcggcgggagaaaatgtctgcaaatgacgcagccactacggcttcagacgctgacgaagacagcgacgacgatgaccttccttaa

SEQ ID NO: 174 - DNA, 1134 bp, Toxoplasma gondii
  source 1..1134: mol_type = genomic DNA
atggcaaatactagcgtacggcgtcgtcagcttctttcgtctgttcttttgttacaatggctgacaacagtattaggtgttgcttggggtcccaatcccattgacgggtcaaaacatgggcaatttccttctttacggagaacagagggcgtcagtcagagcggcagcggccacagagggagtgtgtaccgcattccccttgcagatatgactttctggtcgtggatgtcttacctgaaggaactaccggacattgacgagagcaggaatcccattttgaagcgcctgctgagtggaagtttcctgcgccgggatgggtctacaactgtcaacgtccgcgtgcccgccagagagttagtgaggttactttcgctaacaccagaacaacaaagagagggtgtcagcgcgaaagtccggctaatcaatttacttgacccgaagtattcggtgtacgaaccatacttgtacagagaaatccttccaaaaagaagccccctactcctgccatcgcttggcgagtacagaggggcattcttaacttacatatttcatcctttatccaaaggtttggtcggagatatgctggagacgggccgctctcaccccgatgtgcaagtcttagcggcgaacatggtcgctgccttgaagtcactgcacaacttgggtttgcttcaccgaagcattgagctgaacagtttcagtgtgttaccggacggaacggtggtcctcggtggtttagatacggcggcgccaatagggacagaaacaagattgtgggtgggattctttgggcaggaaacggcccctgaaattgataggaactttctggcggatttagctctcacgcaaggccgccacacggtgaagagtgatgtgtactcacttggtgtcgcatttcgcaaccttgtgcaactgctcgggaacggtaatcttggaccggaggaccgcggtgcggttcggcaggaccacctggaactgttggataagctaagccagaaaatgatagaagaagaaccaggtaaccggccaaccattgaggaaatcatgaaggatccgctttttgagggactgaacttcgaagacatcgaggaagggaaagcgaggccgtttaggtacaagcagaaccgtctgtga

SEQ ID NO: 175 - DNA, 480 bp, Toxoplasma gondii
  source 1..480: mol_type = genomic DNA
atgaatgacactggatcgtgggccacggaacgatcaggggcattgccgcgattccgcactacaggggagcagttgtcggaaggggcgtcagtgcgtgaggaccttgcgccggggatcagaggagttctgacaaagaaaggagcgagagcgaggacgacaaaacgccacgagctcgtctctgtgacgtcggaagaacattactggaaccaagggattgccgaccacaagggacagaccgcgcctcctgttgcagcttcaagcagtttcatgcaaagcccctcttcgcttgccacgcctgtggtcctgaacgctcctgttgacttccatggacagggcgatatcactgctgctgtgaggagtcgacctcttgtcacggcaggcttgtcgcggcatcagattgaagccaaaaatgagttcgacagaagatttgctgaaggctttcaactgactgctgaatctattttcaccggagaaacctga

SEQ ID NO: 176 - DNA, 4092 bp, Toxoplasma gondii
  source 1..4092: mol_type = genomic DNA
atgaagcagggaacgacccgcccgcgggttggtctaacaggagctgttctactccttgtagtctggactgtcgcgatcctcatagattgttcttcaggcagtcgggtcctttttgaccgccgtcctatactagcccggctacgtcgcgcaacttcctttgtcgactccaccagcggtcagaatgcctccccccgcccgacgaaaacagataaaattcggaaaccacgaaacgacagtagaaactaccgctacatcgagctgccaaacgagttgcgagccctcctcgtttcagatccggaatgcgatgaagcagctgcatcgatgcgtgtgggtgtgggctccatgtcggacccgcccaagatacctggcctggcccattttacagaacacatgctgtttcagggatccaagcggttccccggtacgcatgacttcttcgatttcgtccacaaccatggtggctataccaatgccttcacgagcaagttttcgacggtcttctccttctccattggccccgggttcctggaacctgggctcgaccgcttggctgacctcttctctgccccgctgctgaaaagcgaaaacctgctcaaagaagtcaacgccgttcattcggagtacatcattgacctcaccgatgacggccgtaggaagcaccatctcattcggcagacagctaaaggcggtccgttctctaatttcaccgtcggaaacctcgagagcctcatggagcggacgaagcagcagggcatcgacccggtcaaagccatgcgcgagttccacaacaaatggtactcgtcaaatctcatgacgttggctgtggtgggccgagaatctcttgatgtcctcgaaagtcacgtccgcaagcacttcggcaacgtccccaatggtcgtgtcacccctccagtattcgaagaatgttctgaagcattcattcctcttgatccgaatgaactcggcactgaaacgctcgtagttccggaagcagaccttcacgatgccactttcgtcttttatctgccaccccaagcgaagaactggcgaagcaagcctctgcagttcatttctgaaatgctggaacacgaaggaccaacatctctgtcaagcaaactcaaacgcgagggtctcatcacgtctcttgttacggattactggtcgccagagctttgcaccgtcttacaggtcaacgtgcgcttaacagaaggaggacgatccaaggagagcgtctataaaataggccacgctcttttcacctttcttcgaaacctcggcgtctctcgccctgaacgctggcgtgtgacggagatggccaagatccgccagcttggattcacgtttgccgacatgccggatccgtatgcattaactgttagagccgtggaaggactgaactactacacgcctgaggaagtgattgctggagatcggcttatctaccatttcgacccggacatcattcagcagtatgtgcagaagttcctggttcccgataacgttcgtcttttcatatttgataagaaacttgcggcagatgtggatcgcgaggagtactggttcaagatcaagcatggagttgaacccataatggattccgtgttcaagaagtggaaggaaatcacctcagccccagctaacacggtgcagagtatgatgcgaatggaaggcatggcacttcctgctccaaatcgattccttccaaataacgtcgccatccttcctcgtccgcctggttccggtcaaggcgctgagaagagtgccttcccggagcctcttgtctttgccggcgaccacatctgcgccaacaaatgtgctgtttttcacaagcaagacaccacttttcactctccaaaggctgtcgtcgagcttcaaatatattatactggaagtcatgaagacggcgtccgcgagcgcatcctgactgcgctgtacgtgcagagtcttagattcgctctgcgtgagcggttcgccgatacgcacagggcaggcatgtctcttggcctgggtagcggtgtcgccgtcgggtccaccacgcttccgaccgtaaagcgacagagagtgctgacactctctgcggcaggcttttcggacaagctcgattatgtgcttcgcgcattcgcaaagtctctcgcggcaactgagggtgcgtcagatgaaaagccaatcccttcacctatggaacttggagtcactatgtctcacggcgtgagacatttgatgcactcccgcgtcaccgctccatctaatgtactcgcttcggtccagtcaagccgtgtatacaccaccgcagttcgcttgcctggaggcggccgagccgcgcgtcggaccctgacacacgaccagatcacaactatgcatcggaaaccggcctcgatggatgtaactctgatgagaactcccgtatcctcattgggcatccggatcgtcggcggaagagcagaaagagaagctacaccggttgttgctggtggaggaaaacccctcctggagaagcgtttcttcaggctggcctttgatcagctgcggacagacttgcgagtagcaaccctcaaccgcacccctttagcgcaagcgaacgacgctgttttggagctgatcatgcacccacatgttccagtccacaaaatgtatgccgccttattcgaaatggaaaagaatcacccgaccctggacgcaatcttcgaagaggttgcagactggggggtaaagctttggaatgaagctgccgtcgagggtcttgtccagggtaacattacctccgagtcagccacacagctcgtaggggacgtaatttccctacttccactcaaaaacatcgtcgcggccaacacgattgccaaacccacaatttcgtcgttttcttccctgaggagagcaagttccgttgccccacaatcctcgtccaaacaagattccgttccttcatctgacatgcctacgtcgaccgagacattatccatgccgtcgtctgcggagagtcaaacgcctgaatcaacagaccgcgcctctttccctatggagtctactacaggccccgcgccttactctgtggagttgtcaacagggcgcacaccataccctgatgatcttccaacaagcagtacaccataccctgatgatcttccaacaagcagtacaccatactctgatgatcttccaacaagcagtacaccataccctgatgatcttccaacaagcagtacaccatactctgattatcttccaacaagcagtacaccataccctgatgatcttccaacaagcagtacaccataccctgatgatcttccaacaagcggtacaccataccctgatgatcttccaacaaggagtacaccagccgctgatgatcttccagcaagcagtacaccataccctgatgatcttccaacaagcggtacaccataccctgatgattttccaacaagcagtacaccataccctgatgatcttccaacaagcagtacaccataccctgatgatcttccaacaaggagtacaccagccgctgatgatcttccaacaagcaggacaccataccctgatgatctcccaataaggagtacaccttcaccgattgtgctttcagcgggacgggcaccgtccgttgtcgtctctccaatagagcgtacatcatcccctgctctccttccaacagagcgtacacctctcactgaacgtattgcgcaggctctacggccagttggagaggcggcagctgtgaggaggctcttagtattgagaagatcaagcatccaccgaatgccctatagtcccttccagtactcgagtacctggtttcatccgagctcgaatagtcgaagacaaatgatgctgcgcatggcattaaggaggcagctgggggcactgactagacaggcgcagccagacacagaggggaagccatcgactgtcttcgtgttccgtcgtcttgccccaatgccacggcgcctaaacattgaacaaggtccctcatttctgcaacgccaaggcgagtatgccgcctccggttcagccccgcatagtgattgtacaaacggtgcttgtgcaaagggtgcatgcagcggcactggatgtcagaaacgcctgtaa

SEQ ID NO: 177 - DNA, 1065 bp, Toxoplasma gondii
  source 1..1065: mol_type = genomic DNA
atgccacggcgcctaaacattgaacaaggtccctcatttctgcaacgccaaggcgagtatgccgcctccggttcagccccgcatagtgattgtacaaacggtgcttgtgcaaagggtgcatgcagcggcactggatgtcagaaaacgcctgtaaagccatctggaggtccttgtaaaggggatgcgtgtaccggatcatcttgcaattcactcgaatgccaacgatcctcttcgagcaaatctgatcatccatgcacgggtgacgagtgcccggtcccatgcagagggccgggttgttcagcaccagcctctcatccctccccttgcactgaagcagagtgtggaaagaactcctgtcctggctgcaaacaggaggaagagaaactggttcagttgcgttcaataaggaagaatctgaacccgaatgacaagaagaaccaggcgtatcttttaattgaggttggtgcgcttccgaacatccacgaccgggcagtattgtacatggtcagccgatggatgtctcagcgattcttcaacaagcttcgaactgagcagcaacttggttatctgacagcgatgcattccagtcgtctagaagacagattttattatagatttttcatcacttcgacttatgacccggctgaagtggccgaccgcattgtggagttcattaacgcagaacgctccaagatcccaacccaggaggagtttgccactcttaagcaggcggctatcgacgtctggaagcagaaaccgaagaacattttcgaggaattccgcaagaaccggcgtcaagttgtactaggcgataggctctttgacatcaatgaacgcatggttgctgaactcgagcgagtgactccggaggaaattcagagtttcaaggagaagacaatgttcaacgcatcctggttgctcatggaagtctactcgcagcgagaaaagccgcagatgcttccacaagccaacggtgcatccggcgaaagcaagctcgacccgtgggtggacattgatcctgaattgctgtcgaacatcactgtccctgatatggaatctgattaa

SEQ ID NO: 178 - DNA, 4938 bp, Toxoplasma gondii
  source 1..4938: mol_type = genomic DNA
atgaagcagggaacgacccgcccgcgggttggtctaacaggagctgttctactccttgtagtctggactgtcgcgatcctcatagattgttcttcaggcagtcgggtcctttttgaccgccgtcctatactagcccggctacgtcgcgcaacttcctttgtcgactccaccagcggtcagaatgcctccccccgcccgacgaaaacagataaaattcggaaaccacgaaacgacagtagaaactaccgctacatcgagctgccaaacgagttgcgagccctcctcgtttcagatccggaatgcgatgaagcagctgcatcgatgcgtgtgggtgtgggctccatgtcggacccgcccaagatacctggcctggcccattttacagaacacatgctgtttcagggatccaagcggttccccggtacgcatgacttcttcgatttcgtccacaaccatggtggctataccaatgccttcacgagcaagttttcgacggtcttctccttctccattggccccgggttcctggaacctgggctcgaccgcttggctgacctcttctctgccccgctgctgaaaagcgaaaacctgctcaaagaagtcaacgccgttcattcggagtacatcattgacctcaccgatgacggccgtaggaagcaccatctcattcggcagacagctaaaggcggtccgttctctaatttcaccgtcggaaacctcgagagcctcatggagcggacgaagcagcagggcatcgacccggtcaaagccatgcgcgagttccacaacaaatggtactcgtcaaatctcatgacgttggctgtggtgggccgagaatctcttgatgtcctcgaaagtcacgtccgcaagcacttcggcaacgtccccaatggtcgtgtcacccctccagtattcgaagaatgttctgaagcattcattcctcttgatccgaatgaactcggtactgaaacgctcgtagttccggaagcagaccttcacgatgccactttcgtcttttatctgccaccccaagcgaagaactggcgaagcaagcctctgcagttcatttctgaaatgctggaacacgaaggaccaacatctctgtcaagcaaactcaaacgcgagggtctcatcacgtctcttgttacggattactggtcgccagagctttgcaccgtcttacaggtcaacgtgcgcttaacagaaggaggacgatccaaggagagcgtctataaaataggccacgctcttttcacctttcttcgaaacctcggcgtctctcgccctgaacgctggcgtgtgacggagatggccaagatccgccagcttggattcgcgtttgccgacatgccggatccgtatgcattaactgttagagccgtggaagggctgaactactacacgcctgaggaagtgattgctggagatcggcttatctaccatttcgacccggacatcattcagcagtatgtgcagaagttcctggttcccgataacgttcgtcttttcatatttgataagaaacttgcggcagatgtggatcgcgaggagtactggttcaagatcaagcatggagttgaacccataatggattccgcgttcaagaagtggaaggaaatcacctcagccccagctaacacggtgcagagtatgatgcgaatggaaggcatggcacttcctgctccaaatcgattccttccaaataatgtcgccatccttcctcgtccgcctggttccgggcaaggcgctgagaagagtgccttcccggagcctcttgtctttgccggcgaccacatctgcgccaacaaatgtgctgtttttcacaagcaagacaccacttttcactctccaaaggctgtcgtcgagcttcaaatatattatactggaagtcatgaagacggcgtccgcgagcgcatcctgactgcgctgtacgtgcagagtcttagattcgctctgcgtgagcggttcgccgatacgcacagggcaggcatgtctcttggcctgggtagcggtgtcgccgtcgggtccaccacgcttccgaccgtaaagcgacagagagtgctgacactctctgcggcaggcttttcggacaagctcgattatgtgcttcgcgcattcgcaaagtctctcgcggcaactgagggtgcgtcagatgaaaagccaatcccttcacctatggaacttggagtcactatgtctcacggcgtgagacatttgatgcactcccgcgtcaccgctccatctaatgtactcgcttcggtccagtcaagccgtgtatacaccaccgcagttcgcttgcctggaggcggccgagccgcgcgtcggaccctgacacacgaccagatcacaactatgcatcggaaaccggcctcgatggatgtaactctgatgagaactcccgtatcctcattgggcatccggatcgtcggcggaagagcagaaagagaagctacatcggttgttgctggtggaggaaaacccctcctggagaagcgtttcttcaggctggcctttgatcagctgcggacagacttgcgagtagcaaccctcaaccgcacccctttagcgcaagcgaacgacgctgttttggagctgatcatgcacccacatgttccagtccacaaaatgtatgccgccttattcgaaatggaaaagaatcacccgactctggacgcaatcttcgaagaggttgcagactggggggtaaagctttggaatgaagctgccgtcgagggacttgtccagggtaacattacctccgagtcagccacacagctcgtaggggacgtaatttccctacttccactcaaaaacatcgtcgcggccaacacgattgccaaacccacaatttcgtcgttttcttccctgaggagagcaagttccgttgccccacaatcctcgtccaaacaagattccgttccttcatctgacatgcctacgtcgaccgagacactatccatgccgtcgtctgcggagagtcaaacgcctgaatcaacagaccgcgcctctttccctatggagtctactacaggccccgcgccttactctgtggagttgtcaacagggcgcacaccataccctgatgatcttccaacaagcagtacaccataccctgatgatcttccaacaagcagtacaccataccctgatgatcttccaacaagcagtacaccataccctgatgatcttccaacaagcagtacaccataccctgatgatcttccaacaagcagtacaccataccctgatgatcttccaacaaggagtacaccagccgctgatgatcttccagcaagcagtacaccataccctgatgatcttccaacaagcggtacaccataccctgatgatcttccaacaagcagtacaccataccctgatgatcttccaacaagcagtacaccataccctgatgatcttccaacaaggagtacaccagccgctgatgatcttccaacaagcaggacaccataccctgatgatctcccaataaggagtacaccttcaccgattgtgctttcagcgggacgggcaccgtccgttgtcgtctctccaatagagcgtacatcatcccctgctctccttccaacagagcgtacacctctcactgaacgtattgcgcaggctctacggccagttggagaggcggcagctgtgaggaggctcttagtattgagaagatcaagcatccaccgaatgccctatagtcccttccagtactcgagtacctggtttcatccgagctcgaatagtcgaagacaaatgatgctgcgcatggcattaaggaggcagctgggggcactgactagacaggcgcagccagacacagaggggaagccatcgactgtcttcgtgttccgtcgtcttgccccaatgccacggcgcctaaacattgaacaaggtccctcatttctgcaacgccaaggcgagtatgccgcctccggttcagccccgcatagtgattgtacaaacggtgcttgtgcaaagggtgcatgcagcggcactggatgtcagaaaacgcctgtaaagccatctggaggtccttgtaaaggggatgcgtgtaccggatcatcttgcaattcactcgaatgccaacgatcctcttcgagcaaatctgatcatccatgcacgggtgacgagtgcccggtcccatgcagagggccgggttgttcagcaccagcctctcatccctccccttgcactgaaacagagtgtggaaagaactcctgtcctggctgcaaacaggaggaagagaaactggttcagttgcgttcaataaggaagaatctgaacccgaatgacaagaagaaccaggcgtatcttttaattgaggttggtgcgcttccgaacatccacgaccgggcagtattgtacatggtcagccgatggatgtctcagcgattcttcaacaagcttcgaactgagcagcaacttggttatctgacagcgatgcattccagtcgtctagaagacagattttattatagatttttcatcacttcgacttatgacccggctgaagtggccgaccgcattgtggagttcattaacgcagaacgctccaagatcccaacccaggaggagtttgccactcttaagcaggcggctatcgacgtctggaagcagaaaccgaagaacattttcgaggaattccgcaagaaccggcgtcaagttgtactaggcgataggctctttgacatcaatgaacgcatggttgctgaactcgagcgagtgactccggaggaaattcagagtttcaaggagaagacaatgttcaacgcaccctggttgctcatggaagtctactcgcagcgagaaaagccgcagatgcttccacaagccaacggtgcatccggcgaaagcaagctcgacccgtgggtggacattgatcctgaattgctgtcgaacatcactgtccctgatatggaatctgattaa

SEQ ID NO: 179 - DNA, 2352 bp, Toxoplasma gondii
  source 1..2352: mol_type = genomic DNA
atggcgcgttcgtcgcgagctgccccgagcggggcgttcgctcacggagtagccaaagcatcgtttacgtggatttcgggaatgaaaactccgtttggctgcgtgtttttcttctgtctcattgctttatgggggttttcggccgcccttcggacctctgacattggtgttgacgccttgtccgtctcgtctcgtgcggcggcgaacggttccgaaggtggcgtggctcagtcggaacaagagcgtgctagcgatgaacagcgcaacgactcagaggcccacgattccgtcgcttcctcggagtcctccgatgcggaacggaaagacgaccctcccgacaacaagagtactagtgaaactccggaagcaaagctggcgggacgggatgcatccaaccctcctgcctcatcgaagagcccgaccccaagccctgccccaactccagctgtaagtacaagcaccactccagccaagtcgtcggcagacacatcaaaggacccgaaaaacaaactgagttcggcgaggaaagagaaacgaataggcaagaaattcaaaaggcatgatgagtttctcgcagatgctgttattgacaagttggacagcatgagatctgtgcaagtttccggtgccttgctccggcggatctggaaggagcaccagcgggttggggacgacatgcgggatctgctgcgagaatacatcttggctctcgaacgggagctgtacacccaacaggcggaagttttcggggtggagcaactaaagatggacgacgtgatccaccacgagcactcctcggaggcgaggaagcgcgaggtggagctggagatgcaggctctcgcggaacaacacaattttatgaagaagctcttcggtcacattcaggctaatgtggaagcgaaaaacaccagtgcgctcgtgaacaggatcgaagaactggacaaaccaattgatatcatcgacgcaatcgacaagaggtctggatcggatgttcttcattgtttgaaagtaatcggcaaaagcatcagatacatgcaggagtcggtgaagaagttttcccgcgaactcaagacgctggagcggcttgatgccgaacgcccctctggagaagcggagcgaatcagagaaaccctcggattcgtgatggatcctctgtccggacccctcagttctatggactatgagtcactttcctggatcccgtcaaagggacaagctctcctccatgtggacaaagcctaccacgaccgcatgcaacacgactatgactcttttctgatggacaacgatgacgcagatttcgaccacagccaccactacgatccattcgactataatgacccctttgacttcgacgacgaagacgatgacgatgacgatgtgcctcgaaaaaaaagaacgcacggacacccggagaagcagttacattttaagaggaaccagggatcttggaagcatgatttccgcctgccttgggagaaggaagaggcacacccctggtacaagggttccagcaagccttctcgcgctcattcgcaccgtcagtccgtgtccgtctatgcgtctccaacggaacccgtggaggaccacgaggaagattcctccatgaaccacgaggattctgctgttttccctggtctctttttcctcgaactaggcagcaaacgcaccgttggcacagcagccgacaatacaccatacgccaagcagaaatcgtttgtgcagcgggctcaacactccgtgcaagacattcgggaacaccgggacgtagacagagaagacggagttgaaggagagcagccgttgagcttcctcgagaccagaagctcggcagaggagggcggaggctctgatgagatgcgctcggaaagcgaaggacaaggatccgcagcgaatggaacagaaggtgaaagtgacaaagctgaagaggcagggaaaacggcaggagggtctgcagagaaagataaggacgcttcggaagcagagggtgcagaggaagcctcaagtgagaagacggatgggcaagggggaaacgatcagccatcggagagtgaaagcgccggcggagcagcgacgcacggggagagctctacgccagaggagggggaaggcagcgaaaaggctgaagagaaagggggtcacgataagcctgaagagaacgacagcagtgaaaaggctgaagagaaagggggtcatgataagcctgaagagaacgacagcagcgaaaaggctgaagagaaagggggtcacgataagcctgaagagaacgacagcagtgaaaaggctgaagagaaagggggtcatgataagcctgaagagaacgacagcagtgaaaaggctgaagagaaaggg

SEQ ID NO: 180 - DNA, 876 bp, Toxoplasma gondii
  source 1..876: mol_type = genomic DNA
atgaaacacttctgcctaaagacgcctgcgtcaaccaaggcaagtcgttttacatccggtttctgcagaaacaaattcccacctgctgcagctccaagctaccagtccgtctcgctaacaaagcaagcattcgaaggcatcatgcgtggctgcgaggagttcagggacaagccgtcgtgtgatatgatggaaaaggcgacacaacgactcaaagagtcggggacccctgttatctatgactgccactggctttctgagggtcccgaggtttcaggtgaagtgcttagtgatggcacacaacctggcgacaacgaagaaaaagaggttggcaaggaggaggcggctcagacgcaaggtggccgtagcatctgcgtgaaccgcctggaggcgcccacagctgagaaacttctgtgggggacaatcattgcagagaaagaaaggaagctccaagagctgcaaattagcaggaacctcacaccagacaaagtctgtgttcggcctcgcgaactggctaacgccatgctcaatcctgataaacctttctacgcactgggcgaccaagttgaggcaagtcattgttgttttgtgaaatgccggcccggtgcctcgttcatgggaataagtcgggtaatcacttgtcatgaggaaggggtattcgatccgcaggttgcctgtatcgcgaaggggacactttccagtcagcaacaagcgttcatgaaggaggtacaagactacgctgatgtcgtagaggcagcacccgaattggcagccgctggcttggagacaggcggagccttggctacagctagcacacaaggcgtggcagttgcggctttcgcgctaatcggagtttcagcaatcgtcaagacattctag

SEQ ID NO: 181 - DNA, 3477 bp, Toxoplasma gondii
  source 1..3477: mol_type = genomic DNA
atggcgcgttcgtcgcgagctgccccgagcggggcgttcgctcacggagtagccaaagcatcgtttacgtggatttcgggaatgaaaactccgtttggctgcgtgtttttcttctgtctcattgctttatgggggttttcggccgcccttcggacctctgacattggtgttgacgccttgtccgtctcgtctcgtgcggcggcgaacggttccgaaggtggcgtggctcagtcggaacaagagcgtgctagcgatgaacagcgcaacgactcagaggcccacgattccgtcgcttcctcggagtcctccgatgcggaacggaaagacgaccctcccgacaacaagagtactagtgaaactccggaagcaaagctggcgggacgggatgcatccaaccctcctgcctcatcgaagagcccgaccccaagccctgccccaactccagctgtaagtacaagcaccactccagccaagtcgtcggcagacacatcaaaggacccgaaaaacaaactgagttcggcgaggaaagagaaacgaataggcaagaaattcaaaaggcatgatgagtttctcgcagatgctgttattgacaagttggacagcatgagatctgtgcaagtttccggtgccttgctccggcggatctggaaggagcaccagcgggttggggacgacatgcgggatctgctgcgagaatacatcttggctctcgaacgggagctgtacacccaacaggcggaagttttcggggtggagcaactaaagatggacgacgtgatccaccacgagcactcctcggaggcgaggaagcgcgaggtggagctggagatgcaggctctcgcggaacaacacaattttatgaagaagctcttcggtcacattcaggctaatgtggaagcgaaaaacaccagtgcgctcgtgaacaggatcgaagaactggacaaaccaattgatatcatcgacgcaatcgacaagaggtctggatcggatgttcttcattgtttgaaagtaatcggcaaaagcatcagatacatgcaggagtcggtgaagaagttttcccgcgaactcaagacgctggagcggcttgatgccgaacgcccctctggagaagcggagcgaatcagagaaaccctcggattcgtgatggatcctctgtccggacccctcagttctatggactatgagtcactttcctggatcccgtcaaagggacaagctctcctccatgtggacaaagcctaccacgaccgcatgcaacacgactatgactcttttctgatggacaacgatgacgcagatttcgaccacagccaccactacgatccattcgactataatgacccctttgacttcgacgacgaagacgatgacgatgacgatgtgcctcgaaaaaaaagaacgcacggacacccggagaagcagttacattttaagaggaaccagggatcttggaagcatgatttccgcctgccttgggagaaggaagaggcacacccctggtacaagggttccagcaagccttctcgcgctcattcgcaccgtcagtccgtgtccgtctatgcgtctccaacggaacccgtggaggaccacgaggaagattcctccatgaaccacgaggattctgctgttttccctggtctctttttcctcgaactaggcagcaaacgcaccgttggcacagcagccgacaatacaccatacgccaagcagaaatcgtttgtgcagcgggctcaacactccgtgcaagacattcgggaacaccgggacgtagacagagaagacggagttgaaggagagcagccgttgagcttcctcgagaccagaagctcggcagaggagggcggaggctctgatgagatgcgctcggaaagcgaaggacaaggatccgcagcgaatggaacagaaggtgaaagtgacaaagctgaagaggcagggaaaacggcaggagggtctgcagagaaagataaggacgcttcggaagcagagggtgcagaggaagcctcaagtgagaagacggatgggcaagggggaaacgatcagccatcggagagtgaaagcgccggcggagcagcgacgcacggggagagctctacgccagaggagggggaaggcagcgaaaaggctgaagagaaagggggtcacgataagcctgaagagaacgacagcagtgaaaaggctgaagagaaagggggtcatgataagcctgaagagaacgacagcagcgaaaaggctgaagagaaagggggtcacgataagcctgaagagaacgacagcagtgaaaaggctgaagagaaagggggtcatgataagcctgaagagaacgacagcagtgaaaaggctgaagagaaagggggtcatgataagcctgaagagaacgacagcagtgaaaaggctgaagagaaagggggtcatgataagagtgaagagaacgacagcagtgaaaaggctgaagagacaggtagtcacgataaacctgaagagaacgacagcagtgaaaaggcagaagcaacaagtcataccaggagcgaggaccatcccagatgcattgagatcatggatccgcaggagtgtgttaagaccaaaaactgcttccacgacgacgtctatcgtcagtgctttttcaactgtacggccatcgtcgaggctgacaaatgcaaagagcaccagaattgcagatatgaaacacttctgcctaaagacgcctgcgtcaaccaaggctaccagtccgtctcgctaacaaagcaagcattcgaaggcatcatgcgtggctgcgaggagttcagggacaagccgtcgtgtgatatgatggaaaaggcgacacaacgactcaaagagtcggggacccctgttatctatgactgccactggctttctgagggtcccgaggtttcaggtgaagtgcttagtgatggcacacaacctggcgacaacgaagaaaaagaggttggcaaggaggaggcggctcagacgcaaggtggccgtagcatctgcgtgaaccgcctggaggcgcccacagctgagaaacttctgtgggggacaatcattgcagagaaagaaaggaagctccaagagctgcaaattagcaggaacctcacaccagacaaagtctgtgttcggcctcgcgaactggctaacgccatgctcaatcctgataaacctttctacgcactgggcgaccaagttgaggtgaaatgccggcccggtgcctcgttcatgggaataagtcgggtaatcacttgtcatgaggaaggggtattcgatccgcaggttgcctgtatcgcgaaggggacactttccagtcagcaacaagcgttcatgaaggaggtacaagactacgctgatgtcgtagaggcagcacccgaattggcagccgctggcttggagacaggcggagccttggctacagctagcacacaaggcgtggcagttgcggctttcgcgctaatcggagtttcagcaatcgtcaagacattctag

SEQ ID NO: 182 - DNA, 2508 bp, Toxoplasma gondii
  source 1..2508: mol_type = genomic DNA
atgcctgaggttaactgcctcggtgcagaacctgcattctgcaacccctccaaatgtattttcaaccttcgtctccgtggggcctctcctcttgtttccatctttgtcttgactcttcttgtcgctgcgccaaagttgagtcctcagtgggccaccgcgacgaccgttttaaaggaccagggcttccatgcggcaattcaccatttgggaaataacagggaagggaggcgccctgagtcgtcttcttggggattctcagaccagtctccctcagctcccaggtttgcagcaatcccgaagtcagtcgagctgtcctctttcctccagactgatgcctcaccctccagcggaggcatctgggctggcgtaaagaaatacgtcgagctcggcaccagtggcgagcggcacgtagcccaagatgataatgagaaaaagacaacgaatggcgatactgctcaaggggacatgccttcgcaggaaggtgccactgcggcagaagcacagccgcaagaagcaaaggagtcggaagatgcattttcacacgaaaccacaggaaaggtggagacagaaacggaaaataaatcggaagtgtaccgccacatggcccaggaagagctacgaagcgccagggccgatttggtcaagcaaacaaacggaacaccggaagagtacgaggagacaggaagctttccttccctctgtgggtcatggcagacagtaccgtcttcgccgcacttctcctcaaataaggagttcacgcgctacagccagcaaaatgccagccttttggaaggcgagtcggacacagcagatcccttaccgtatccaacatgccagtggctaccgcgacgcggcattcacatttccgagaggcgtacttacgggttcaaaccaaatgtcgtcagcatagaacgcctcgagttccattctgaagagggatgcctaccgaaacacctggcaaaagtctggcgttactcgggatactgggacccgcagtctgcggcaaaagatccgcagacgaaatcagaggaaatcccagcaaagctttcctggtcaagagtaaacatcaagatggaagtcaatgctctatcgcgctcacagcacctggcgccacccgatgcgcgttcaggggagccgacgcctgtagaggcggagtgcttgggcgatggagaccgcatgtggattccgccggtaaggcacatgcacttggatcttcgagacacatgcacgcgacctcacggaaatttcctttattctcaaccagtaccacctgagttcatcatcacgcctcaagagatccccgtcagccacgaagtgttggcgcatcgactcaaacgccgactgcgggcacggatgagtattctgcaacggaaacacacgaactctcctgatgtgccgcgcgacgtctctctaaaatccgaggcggaggaagcgattgcaagcaaatggactgacgccgttgaccagcgattcgccacccggtggagagactacttggttcaacagaacctttggatcgaaaaagtgtgccagtggcatttgctccgagaaagctgtttggtcccgcctcccttggcaggtcccactccaccggaacatcacaaggataaaggagacggcaagaaggagcacgagagccagtgctacattccatcagtccgacactctctgacccgagagaatggcattgactacctcgatgttcctctgtttccttttaccgaagacgctgaacacgtgcggctacgcaaagtcggcggttgtaatccccacttacaagttgacttacgacagaacaaagacgctagtaaattggctgaagaacaggaacggcactccgcagacgaagagttagcctccgttgcagttacttcgaagagtattcaccctcacaaccacgcatcgtcgcctggtgtgaatcagggtgccgcgggaggaaccgcgattcccgtgcccagtgtaacggatgcgaaaaacgttaatacacatgaacgtgcagaaaacgcaccagacgctgttgcaccggagatgctggctcagaacgtcccgactgatgaagctgggcagcaggacgcagccaagctcggcagtcaagatgaagcaactatcaaacctgtggcacaacaagacatcccggtggaaaaagctacctccacagatgcgacagagtcggttgaaacgcctgttgagaagattggtgaaaactcgcaggaggagcctgcggctgtcgagcagccgtcgtcagtagagggacagacggagccagaccagcagcccagtgacgaggaagcccaaaaggatggtgctgaaaacgagacaccagaatctacgggtgaaacagcagagacaccagctgcagagattccagagcaagaagcagagagtgcagctcccgccgtcgatgctagttcgtcggacgcagccggtccggcagccacagaggcacccgaccaggagacgggtgaagcaaacgaggaagcatcttcggcgacagaagactcttcttaa

SEQ ID NO: 183 - DNA, 4440 bp, Toxoplasma gondii
  source 1..4440: mol_type = genomic DNA
atgactaaacgcgctggcctgcccttgggcagggcatttcttgtcctgattcttctatctgcagcggattcactcttcttctctagctttccccgctctgctctccaactcttttcttccgttcttttcacagacgctgcagaacctgactcggacgccaccccgggtctgcggccgcaacccagcccacgcactttccggcctacggggtatcagcgaatcgaggtgaaaactgtcgatgaagagttacccgaagacctcaaagtttacaccgcgtcgacacgcggatcttcgtctcgtacattcgaagtcagaaatgccggaggccgacaggaaggctttactttgtccgtcctcaccgccggcgggcctctgccgcacggttcctggtcttggagcggaacccctccggaagtgcagaccacggggggttctcaaatcagtttcggctgggtgccagacaccgaaacgccgagtttgcccgaacggaatcttctccagttgaagagaatgcttcgcgacgagggtttgatcgaggctgttcagctgagggccgcggaaaaggggtgccccgtggccgttctgcacaatctgcggcaacttccggtgaatttccgcgaggttctccacgaggagtacgagagccgcagcaaccccgcgaaaatgtacgaagtcgcgaatagctatgtccaacagaggggcagcgatgctgctcgctggtcagtctctcagtccgtcgagctttctctcctggaaatgcatgcgacgtcaaccacggatccccgcggttcgagtgccgtcccgtcctttctggaaactggacctcaagtgcgagttgcaatgactgacgccgtcccctcaggaattcgcgtgtacgcaacgcctccggcgcctcgtccagtgcctgtgcaaagtaaccagacagaaaaggagagaagtccgacctccaagcgccttgttggtatgcagctcggcctctacttgatttgcaagcttgcggctctttttggccacccgactttgtttctaaatccgtactacacggagcagcagctcctcgaagccgtggcgcaggctctcgggatcgcgccaccgcaccgcggtgatttcgaaaacgaaggaaatgaagcgcaagcgacagccaaccagcacaacgggagcgccgaccagctgcttgcagccatcgaaatctttcgcctagggccgaatccctacactatcggtcacgttctgaccctgatgattgcctacctggactacgagtctttcttcggagcctcgccgtcaaagccttttcactcttgggtctcgttggcagcttctgcggggaacaacacaggcttcgcgatgctcgacgaaatgtgcgacaaccaccgtggacctaagcgacgtggacagaaacactggtaccagaccgggggcgcgaggaagcacaaaaaccgagacatgttgcctctccaccgccagctgtgcgacgccctcgaactagtgctcaacggcgttcagcagatccaaatcgacctgatggatgaacttggaaaatacaagactggcgtcgagcctctcgtcgaccccgcaactaacagcgcgagaattcacactcgcacctgccgaggtttgtccccggtctgcgactacgaagcaacaattctcgctcctgtgcgcgctttagagccgcacgaacaacaagactctctccgtaccaagaaggcgttcaacctggtcacgggatacgggagcggtcacgtcggacaaatcacaggaagcatcgccgagccgttctcgcatagctggcggacgcggtggggaaaagttgtggcggacccaactgcctacggcgaaatcttcgagcgcactctgtggttcgacgaccgcgagttgatggcgaagagcagcggcgctctcttcagacaatacgacagaattgcaaaagactcaatgtctttcggtgtcttcatgaacgtcgaaaacggactcctgaagaaagacatgcgcagcaagttggaggcttacatctcgcaaagaaagagcttcgtcgagaagagacagcagtcgagattcgcgaagcttcgaaagaaaatccccgaaaacgacccttacgcactcagagccgccatcttcctcgcgctcaattctcggacgttctgcgcgcagccgacgtcgtttttatcgagtttccggacctttctcacgaaccaataccacaagctaagtcaaggaagaaatctcccgagatctcagagatcgttgatggcgttcatgcgcaccgggcaggttaaattctttcaagagtggtgcagcttcgaccccctcgctgtcaacgccctctttctcttccgattcgcggtctctggaacagaccccgcggcgctgcacgacaggcaacacacccgtgtcagcagaaacaagaagacgatgcggattttgaattccaagtggactcccgcggtgctgaagaagctgatgcgaaaagtcaaccacaaacacatggcgcgcgaagcgaaggctctactgcttcggagcttggatccgacagtcttgtcgagcatcgtgacggcgtttgacttcatcacccacacacaggcgaacctggaagtgaatcagaacgcgttcatgtaccacgaggtgcgggcgcgggaggtttcgcgccagtcagcggcagagaaaggctcgcacaggctgcatgagaggggtctcgttcgcgagacagacgacatgatcaagaggtgggcagagcacggaattccaggggacatcaagcgtcgcctggcacgaggcgagaagcttccagaagggatgtcgtttggcggcatccccatccccaatctgacgaactgggatgcacagctgaattccaagtggcttgaggcgtacaacgcgtatctgcgacacccgtacggccgagcagcactgaacgcgcgcgacccagttgcgttgctcgtgaaggactcgcgagaccgcctccaggctgaggccgagggcaccatctttcttgggcgcatcgcgaagcgcgtgcaccagagcaaaaaccttctgcgacgagccgggcgggcgctgaagactttttttctgtcgctgctgagagagaacgaacgcagcgagtacgccgtctggtttggtgtgaaggtcgacatgcggcaggtgattcagacctgcaggcaaatcaactcggtggcggaagtcgtgaagaacgaccgcctctacgatttcatcaccgacggctggatggagctcgtgaaagacgtcgtcgcagggtacacgaaggcgtcggtgcgagttcctggtttcgacacgatttctgcggcaaacgagcaattgcggaaggagggagtagcagctgccactgcgcggaaccaaggtttcctgtcgattcactacgattacgcgaacctgccggaggaagagcgcaagaaggagttccagcggtcgatgtgcatggagcagtgcgaagcgctttggaagctggtcatggcgttcgtgatgccgaatctgcagaatccgaagaagctgaaggggtacgagaaggacttttcgggagcgaaggaaattgagaagctgaacagtccacaccacgtgaacgcgttccgctttagtctctctgtgcagatcgacttcttcgacaacatgctcgacaagacgtccaaaaagaatctgaaggcgatgaagttcggcgcgagcacttggttcacctacgccatgaagcttgcgggacaggtcaactcggagatgggcaatccgaacctcggcactgcgctgtacatgcaggccgcgtactacgggaactacattcgaaagtggatggagcagcggcggaagtcgcggaagcaagccattatcggagtcttgacgctcggcatgatgggtctgtacgcgctgctgaatgttgcagacatcgtgcaacatatggaagacattggcggcgcgccgccggtctcctgcgtgacgaacgagatcctcggagtcacctgcgcgccgcaggccatcgccaaggccaccacgagcgccgcgagagtggcgacccaagacttcctcaaagtcggcctcttcgcaggcatggcgccgtacctcatgctgcccatggccgtcgtctccgtctggaacatcctcaagtcggaaatcaaggtgttgctgcagttcgaaatggctctcaaacacaccttcacgcgcctcaagaggtggcttgcggcgcctttcaagaactggtgggcgaagcgcggcagactgaaggacgcgctcttccggagagcctcgcagacttacagaaaaacggaacaggaaacgaagcagccgcctcgacccagaaatctgcacaacccaagcagctggggagacaccgaactcgacagtctcggcgtgcctccagagcccttcgtccaagacttcgaaatcaagtacacgacccccgtcttccccatgagtgcgcctctcatcaaagcctga

SEQ ID NO: 184 - DNA, 5877 bp, Toxoplasma gondii
  source 1..5877: mol_type = genomic DNA
atgacgacgtctccccgagtcgccaagtgggcacttcgcgtgctagctctcgtctttctgcaccatgtgacagtctgtacggtatgcgaggcgaaagccttgcacgtgatccgtcctcatcgcaattttgccggactcgacgttcaacagtcgtccgttgccgacttgcaggatgaaggaaagggaatcagttttgcccagacgtaccgcgagcgggatatctggttcggcatgctgtatttcgagtacgtcatcactgcgtcgacgacaatgactctcgccttcaagtcaatggctaagtacatctatacagcgccgttcctgacgaagttgtttgccagcaaccgctggctcaagtactcgacacttgactttccacagaagcagcagatcatccgcaagattgctcggcgcgcctcttcgaagtcccttttctccagagctctaccaggcgatagggtggcggatcttttcgccgacatgtacctcagaagagtgacatcacgcctgtcgcgcaccccgggtttccgcaaaccgcagtaccttaagatgaaggaggatctcactcagctgattaaggccaccaatgctccgactgaggcaatggaagttgttcttggcaacaacactcaaaacatgtttacgtggatcgactcagtgagacagaacccatttgcgacagtcaagaacgtcgttgtccacgcatttgaaaacggtttgaagggcgtctctgggatggtggagtgggagctgaaccaagggtgctttgccatcgctcagcagacgcgccacattttgcctttcggcagtctctttcccggaggcattctcgggaaaatcatgcagaaactgatgcggtcctacatcatgtttttccacccagtgcttgcgaacttcaaggggctcctagcgctcttcctcggtgtcctctgcaaggtccgtctcccgcagctgattaacgcagtctttggagcgatcttccgggcaaaacgtcgcgccgggcgctacatccacaaattcttctttaaaaccatttctctccgcaaagacatcaccgggaagatcctcgttgacgatctagtcagggggtcgggagccgtgatgatcactctgctctttcagctccacggtgttgatatcgatgccatcagtcgacgtggaggggccgtcgagtcaggcgttctcgccggccagggcgtgtggaccttgtccgatggtctcttcgtcggcttgaaggatttcggccaactcttccgagcctattttgaacgatacgtaaatctcacatccgcaatccacacctactgcgcaaagcaaacgaccaacttcttcacagaaaccgaactcgatgaattctataacggcgaaaacgtcgacagaattccccctcgtgaaagactgttggcatggtgtgacaagaacaagagttatctcgcaatcatcgagaaggactttatcggcttggccaccaacttcctcaaccacatgatcaagtgtctgaagatggacttcaagtacttcgagggttacctggcgaacatcatgtctattttctacgagatgacctttgcgactctggaaagcgacatcgtcagtgccatcaacgcgaaccagggccgcgctccgcatacgctggagctggaagccattctaaagcgtcggcagcaagccaataacccgccgaaagaggcggagatgcctcgcacgatgttcagaaaaccctggatgagggcggcgattcggaagcttgctcacggatacttttcctccgctgctggcttcgctttgaagactcttctgcagcaaatcaaacccgcgaacgcagagaagcttctggataaagccttcacgcgcgtcaaggaggggtcgaaactcattcgatcttccctgacagtgatcctaggtcgcttcttcaacagccaagcgctaattgttcgagcgcacgatcagaccgtgcgcatgagaatgtacgaattcatcaaccagtgccagaacccagaagacccgaaccaccgagacgtttgcgggaacaatgtaacaacgaacatcgatgaagtgaaatttgtatccaagtcgcttctcgcgttgaaccttggtattttggtcagtcctagagatttgctcctgtcgcaagttatcgaaacagaccctgcgaaggattccattgatccgacagagttcttcgcggagtgggaagcgtggctacaagccaaaggctacaagcctcaccagaaaggaaaggagtatctgctgttcgcggaagacatcaaccagaaagcaaatattatcgccttcgtggaagctttgaggcatacgctgcgcgacagactgcgctttggccgcttcgatcaggaaggcgcagacaatctccgcctttttgatgttaacggacgttctgcaatcttccgccccagggatccacagtccatgtgggatcgcatcaaggaggtccgcccagatccgctggatgcaccggcaacttttgaagtgcttgactataatgaaggaatcctccgctttagtagtaaacctggaattcctttcgaaggaaggctggagtatgccgatgaccgtagagagcttcgcagcatccagcaagatccacaggcaatcaaagagcttctcgtctcgcagattatgcaaatcaaaccgcgtctcagcgctgaaatgactgcgacattgatgatggtcttgcatcgatacactacttccttccacaggcacagcttcgccaccttcctgcagaacctgtcgccaaagatgttcttcgacggtgtcttggctttcgcggaccagcaccaacagcaggccgaagccactcttcacctggatcgtcgactctactcgttccccatgactttccagactttcaaggacatcgttttcaactcgttgaacacgatggtgttgcgtatgcattcgctggacactgctgactcgctgtccgtttttctcgtcggtctggttcactacgcctaccagaaaatccagaagaacaggactggaagaaccctcgtcatgcagcatttcctacggggcttggtgcatgtcatgcggtcggtggatgctgagcggttccgggaagactttcccgagtgtcagttcctcattgaaccaaacggaacgatcgacgaggttgttgccatcaaatgcgcgctgtaccgtttcgtcaaactccgctctttagaactgccacgagccatcgctccggacgtggaagaatcgagaatgacggaggcccgggcaagaacttacctgaacggcttcgttgagtatctagacaggctgcggtccgagaggacaagctgggcatcttttttgaactttaagggcttcttggagacggcagagctgtacagagaaacagtcggggcctacagctacgaggagttggagcgccagatcaagacggaaccgatcactgacctcgacgtgttggaacagttgcgagccttgatggatccctcgcttgggcgcatcgtggctccgaagaaggatgaaggcacagcccaggtcattcggaaaatctggggaaacttgggcgaattctcgagtggcacgcgccaaagagtccgcagcgcgctcagccagatgagaagccggctcgtcagcgttatgggcagcacgacactccctaaggcgatgagactgttcaacgtgatgaacagcagccaattcttcggtgcattggagttcgcagaattcagagcttttccggacacgaggacaccgcccgaagatatcctaaaggcttccgacttggccctctttggaagggtgcttctcgtgctggagacgacgccattgtatctcgacaaccccaagcaaatgtcagacatcgtaatgcaaatgcgctccattccatttatttcgccagaatgccaagaattgttccgcgaaatcgaagagatggtgcggcatatgtcccacgaagatgtcagggttgcggtgggatggctgttgactttcaacatcggcaaaggcctgacgggcagcactgtggcgctcgggcttctcgccctagcaggcgttcccttcgccaacagccaaatcagccaccaggataaaatcggcattctcaggactctggacgcggacacccttcgcttcatcaaaaaacaccttctcatgcccatggtgttcagacacatggcctcactgtctgacggagaagcgatgaatctcctccgctttgttcctaaagcgaccttgctggtcgcgtacccggcgtcaatccgatatcttccattatcggagccggtcaacgtcgtggacgcagtcgacaaactcattgcttcaaaagccatagatgcagtgcagcagcacttgggccaggtccggcagctcccgggagaggcgtcccatgacgcagtttgccgaaccatgatcaataacatcaaagtggaattaggtctgtccaccgaggatgccatgaagttctggactcgctcgcacatgttctttgacaagcgtctaccggcggcctgcattctgttgatccacctgaaagccatgcgcgagcaaaacattcgcgagacaaccgtggctgcgcttgtcgacatgttgtactacaatggcactgcgctgaacgaccacctcgctttcattgcgaagaaaggagctaacgaacttgagcgacaaaagcagattgaccgagtcggctccctccttacgatggtgtatgtggctgtcgtgagcggatcccttcaagtggatgccagctttatggggtacagcggcgagacaaagaatttgacttttcactctcgaagaagctctcgtggaactgaagttcctcttctgaccgcatgcatacaggccaccacacatataatgggccctccgaaggaaaagcccgagattttccaagcctccctgagcagctatttccttggcgaatggttccgtttcgtggagacgagccgccttgaagaatatgcggctgcgtaccgccgtggaggtggcttccagaacatcagcagagagaccttaaaaaatatcagctcggtctacaactactatgatattggagactacttcatttcgatcagacaacggtccctctatcctcagaatgagatcgtgaaaaccgcaagcatggctttgattcaagatgaagcaacgatcgatgactacggaatggcaatgcttacagttgatatgggacaccgggttagaaaggcaaaaatcaaatgctatgaggacgccctcaaagactacgtcgaatacgttgacaagagccgcagcgcccaggaaatgttcaaaattgactgcgtgcacaactatttcatcgatatgggctctctcggctactcagctgcgtcaatcactccagaacaaaaagatcaaatcattgcatcattagacagagtatttgcaggtaaatgcgaagacatgtacacggctcttattggatcacaacctgacatccacaagctgaaacagcaggcgtgggcatttgccacgcttgcgcacaactctttgaatagcgccacacgcttgggttctatcgtcaatatgttacataacctcattacggacatagccgccgggaccccctggaataatgttgttgacggaattgcggcggagcgagccaacaagatatgggagcgcttgggcgatgtatcacacagaactccgatttatacggcgatagatcgcccgtatctcttcaatccatttgccttccttttggacttcctgctctacgttaaaaccaataaagctcacaaactccggatgccgaagatgcttctaatgaagagagctgccgtactgaaggaacttcctttcaaaaagaagacgactccgccaggaatgaccgaatacaaggaaagggcagcggccctgaaggatgcctttttcgcaccctaa

SEQ ID NO: 185 - DNA, 2955 bp, Toxoplasma gondii
  source 1..2955: mol_type = genomic DNA
atggcgataaagaacacgttaactggaagtggccttctggtgttgctgactctagcatgtggaacgacggtgcagtctagtccgccaacgcctgctccacggatgtatccgaacatgaatgagcgtccgctaagcgctgagagcagactcactcctgggacatacaggagtgaacttcacatcgacctgaaatctccacagaaaactgcttctcagagttctctagcacctacaggtgacaacaacagcaaagtggagagcatcattgccgggtccgatacaacacccagatcagccgaaggtacgtctgagagcccaccagtaccacaacttggaacgccgccaagacccgcacctcgccggtcgaagggcgaaggcgagagacaacctcctactgctgctcctcggacttcacgttcggtggataccggttctgggagcgacgccagtaccgaacaacaagcaggagggcagaaggtggtcacgccgatccccgcgtcaaagggaatctaccccagcttggatgaattgcggcggagccaggagagcaacgtggatgctgggtctggtacctccacaaatgagggcggaggcacgtctgagggcccacaagtgccgcaatctggaataccaccaaggactggacgtcgccgagccaaggccaggaacaggaagcgacatcccactccagcatctcgtgagtccagcagcgaagatgagaatcaacctcctactactgcctctcgcccgtccaatggcgagggtgagagtcagcctcctactgctgctcctcggacttcacgttcggtggataccggttctgggagcgacgccagtaccgaacaacaagcaggagggcagaaggtggtcacgccgatccccgcgtcaaagggaatctaccccaacttggatgaacttcgacaaactcaggaaggtgaagaatcagcccctcaaccagctgatgtaacctggttttcaatgagcgtgcctatgggtgtcgtcgatcgccgggtttctcgtgctttgaaagagcagttctttcaatttcttcagcatctatcggcggactatcccaagcaggtgcagacggtgtacgagttcctcggctgggttgctgacaaattaccagagaacgaagaagaagttcagatgtttattgacgcccttaacacaactgaagctatggtgggcaaggccgcccggtggatcttcaaggcaatacctgaacgggaacgcgaaaccatttactcatctttctaccaaatgttccgcgacaagctaccaaagaagttcttcgaaaccgcagaaggaatgaatccggatgtcggtcaatattttagtgctgaggaaccggttgcagttactccagaaattcctgcaaaaagtgaggaagactcggaggctgcagaaactcccacacctctaagacgtcaggcgaatgtggctgctcaagttctccatccacttcccgcgaaaggagtcacgcggcgtgagtggattccttggccgaaaatgcaaaacgctatctcgaaagcccatggacctctgacgcgggtaccggagtggacaccagtcacgggcagctgtgctctaggtgatggttacacggatatcgatgtgacaaaggcgacaacggacgtgctgttccgcatcactctcttaattctccagcaaataaggagaaagaaaacagaaaggggcaaactggaagatgatcaggctctcgtggctctctgctcagccgctggggctttcgtcgatgcatggcaacatcagcagcaggcacttatcctagaggacccaggcacacccaaggcgcacgcccaattgattgagcgcctccgcaatgcgggaaaatacttcatgaaatcctacgacgaaacgactggagagagcgaccatcaacagtggaaaaaaaacaaagcagaagtttcgaagcttggcaagagtgctctgatgaagtcctgcgtgaaatacataaaggcatccggcgatgtcgcgactcgacccttcgactcaggaacggcgaaatatccctctcgatcactctatggcggaatcgccaacactctggaaacgccatttgccgactctgaagcggtggcgaaagctgtgcatgactacgcgaaagagcacaagaagcctgagaaacttgtaggcctctgcggggctctccaaatctcaggatacttcaagaagtgcttttctgacgctggccgcctctcctcggtcagttttttccaccagcatgttgacggggccagcgttctcgtccgaacactcgcgcgcgaaaggccaatcgggaggcatgctctatcccaggccatctgcgatccgaacatctcggcccagtattttgagggcgcgtttcgactgttctcgtctacggtatcccaagagtgggagaaagaaaacttgtttgcccagctggcgtcctggacaggaaaggaaatggtccttgctccgtcccttgaggagcaagctgctgttcctcctgcgcagcccgcgtacgagacggtttacggagacgaggaagaccggatctaccgcattcacgtttcaggccgccactcatcgcctcaggaagtgctctacgtgggaggcattccatcgacagtgaagcctcagcaagtccacgtgctggggccgactgtctctgacgaatcgagacgagtgatccatcccgttcgccatcggtctcgcacagcgccgtcatcggaagccgcaagtgcagcagcagagagctcagacgaagatcctttacctgctgaaaatgccacagcttttctcggcgtaacaccccaggaggaagagtccgatgcgtataaacacacgctcgatttcgatgcggtgtctccacgcaagaacaaaaacaaagagaacaggatctcagctccgctcaagcagagcgacactttgatcgaagagagtaccagcaaaactagcgagctttaa

SEQ ID NO: 186 - DNA, 5109 bp, Toxoplasma gondii
  source 1..5109: mol_type = genomic DNA
atggcagaattcacttggcggccccttttaatgtctttaccgaagatgatcgctttcttccatatcctgctcttctcgggcgctctggctgcggctgcaggttctcctgctgccgatctggtcgccagcgtccaaacagtttcaaatgaacgcaaggacctttatgcgagggatactcaaccgactgcgaggactggcattgacatcggtgtttccttcacacagcaggctagcggaaacgctcggacatttgaaattcgtcagcatggatccggtccccccagacctgcgccgagacgcgccgccgctgtagcggatgacatttttggttcggaggacttttcgcctccccccatgaatgttgcaggtgctcctttgcgggacatgggtgtacactttttggagtgccaggccactgatggcaagatcgagtgcactggacaaggcgctggggcgaggccgccgtttttccgcggcggcgttgacccgacagaaatacatgagatcgtgcagtccaggaccgtcggtcctgcagactacgatgaagaacgaccagaacaaacaccggactacctatctcccactgatgtcgtcaccctgcagcggttcgtgtcctccgcaaacgcctccaactccccacttctggaagaccctgttcaagtatgcctgtctcgaagaaagcctacgtacacgtgccacctccttcatgaattcgcagctacatccgtgatcgtcgaggaatctggcaacctagtatgtgaagataaggcacccttgacagttgcagaaaagagaaaaatcaacgacgctgtgaaagccggacggactcctcaggccactggtggacaatcatcccgtcccccaaacccgacggtgtccccttcgaaagcaggcgcagcgccgcaaaacgccgcgtcgcgtcaaccagtaagctttgtggaacaggaaaacagcgaagcctctatgcctacggcaaacaccgaacaagcatctgctactacggaagataccaagatagcatctgctgctacggatagtggagactacggagaagcggcagcaggagaaagcgctcaagaaggcgatcgccctccaccgtacaatcctgatgcagacgaggcaggggtcccacgtgcagttcaagaagcctatgaagaagctcgccccctccaggaagctaccattgacaaatttaagcaagacgccgctgcagcggctgaggcagccgaccactttgcgcaggtctctgcgtttaacgcaatgcagtctgcgttgacgaagatttccgctggctaccaccttcgtgctggctcccacgtcgtcttgagcgcctgcaagcgtctcgtcgaagccgttgcggcaaaccctcccggtccgggcactgtcattccactggaagagcttcggatgcagctcgtggcaaccttgacgcaggacttcgccttggctcaggcctttatcgactatgcgatccatatcgtccacagcgcgatcgaaaccctaactcctcagatggtagccaacgcgctgctcgagctctcaggaatcgaagagctgattaatcacacagccagagtaaaatctcgactggctgcgcgtgggcaagattctcctgcaaacgtcaggaaagaaattgtccaggaatccttcagacaactcaaagtggagctctttcaggaaattgtcactagagtttgtgaacttatggacgaccctgagtcgtttttaaagacagtacccatcatcgttggcacaacgcccacggcaccgctgcgcacaggaggccatctcggagcggactacatcattcacttgagaaacgacctttgcgatgtcacagcaagtgatgctcaaatctttccatcggccccagcggacgaaggccttcagggtttcccgagacacaatctgggggagcgcctcgtgggatggatggacgtcatggctcgtacgaagacggcgaggaaggaagtcttcaagattattgattttacaaaagcaaaagatgttttgcttttcgcttcggaaacgtggaaggcccggtacgcgaccctgcaggccccggctgcacctgctccgagcttctatggcatcaccactagcgggtgccggaatgtgaatgacataatgaagtctaaattcttcgacatgtatcttcatcagtccggtttcatgaaactccagcgacacggaaacgacaactcgcgacagagattcatgcacagagttacgctgctgcaaaacgacgggatccttcctcaactgccccttgaagctgactacgagcttatggagctcaatgcagcgatgcagaagaatttcgttgcagccaataaaagcattttttctagaagagcggcgcgccattcgaagtacggctacctggacctgtgcgacgtggcttgctatcaaaagattgacaggcttcacaacgatgtcatgactaatgtctttttctcgttggacaccacgctcatgaagatcgtcgctaaggtccacaggtcatacggaattgcaaaagcctttttccaacttggagccagacaacagcacatcgccgacccgaatctcggcatgtgggcacggcgtctcttcgtccactgggcgtcgcataacgaggtcaagcagatgcagggccaaaaagtcgtgaaggtcaattacgaaaaccttcgccatggcgaattcactctcgacacggttcgaatgcgggacgcgctcgtccgctacaccaacatgttgaaagccgacccgatcactcgggatctcatgagcctcgtcatccatacttggattcacatcagaggagtcaggaatgcggccatgggcttcaagaactcgcagaaactcaacgaatcaatgaatgcgtctgccattggggccgtctttgcgaagctgtggtatgaatctgacatttccgtcgtcgcaccgcaccaggagctgaagccgttcggggcaccattggcttcgatggctctccagattggtttcttcctccacactgtcgttgaggagtacaagatgtcgcttttagagaaagccggagctcagatcaaatcgtggttcgtgggaatgttccaaaaaaacaagcgccgaacggttccccggacctggaaggcagtcgtggcagcaacaaatcgggcccctaaagtgaacctaaaggcttaccagggcgctctcttagtgatcaaaactctcgcaaaaatgttccgtgagaggttcctctacagattctacatgcagggccagggcagcaaagtcgactttaacactcccacgcttcttatccacgctctcgtcgcttcttggatggacccctccctcgaccgtctggagttgtcaagtcgaaccattcctaatgccaagaaacttttctggtactacgtgtgggtcaacgagaatggcccgtcgaacgccgccacacgaatcgtgctgacgggttgcaagaagtacactttcctgctcccgggcgttgtccgaagcgtgacgagcagcacaagcgaagtcgtagaggcgggttccaatattttgaagattgataagattatcctcaagcgaagctcacttgaggcatatatgaatcacctccaagcgacgtatgacgacccactgacgatcgtccaggttgccctcgatttggcggcgagatgcgaggggtactcagcagccaaagatcagcctgcgcaggccatgagagggcctgccagggtgcgacgagcaactggagaatccaccacctttaccatcagaggtggtggcgtccagggtggcaccatgtcttttgtcgaagcggaagctgacgacgaacggaaagaagacagcgaagacaacaccgttgacttgagcgagcaagatcaagacagcagctttgttcaactcaagaaattgttcaacagacgggggagttcagctgcaggacaggcggtacaaacagatgcacagcctctaccaaaagcggtacaaacagatgcacagcctctaccaaaagttcgacgcgggggcccagacgtcgatgctagtgctgtgatcctcgggtcacgatttatgctggatctgtggtgcagcaaataccgaaaaatgcttgtggaaaagctctcgggcatcagtacgaaggatgccaccgtgatgcagcaggagatttccaaggtgttcagtgctgtttcctccattaaaattgccatccccgactacaaagacctctgggacttctctctccggtgcgactggatggatgggtacccagacgcagagaaaatgcgagcggctcgagcagaaatggtaacgtacgctatggcgaaggcaagcaccgggaagaggctgaagcggatgttgcagaaggtcaggtcttggataaggaaaaaagcattcgctgctgcgaggaaattgaagtccctcaagaaccgaattagcaccgcctttggacggggcaagcctcccaaggccaaggtgcccgactgggcagtcgtaaacgctgggatgggaatgtggaccggcaaagtcttcagcacacatttgaccttcaacgaagacgaaatgtcttgcaacgggccacacgagcccatccgcgtcatgtcttggaagcaaaatcatttcacaaccttcgcgtcgtcatcgaccaacgctgagcgtaactacgtgctcgttaagaagggagacgatagccactgttgggcaacacgagaggccctcgtccataagggttggtccggcattcccgtgtaccagtacgcagaacctgctgggttctggttgcaggaagtttctcctagcaaccagcccttcgtcgtcaattgggatggatacctaactaccagtgacaacctaacgctccaggatattgacatcaacgcgagctcggatagcttaaagtcacatgctgtaatgcgaatcgtcgactcaaatggaaagaccatctatcagggcccgcctacaggggtcgtgcaaactcagggaggggttgtgactctcggtagcatccgaaacctcgtctcgggtgtccactcgaccggcgatagcgttgaagttagagtcaccgcttcaggcccgcagctgacgagtgtggcggatctcgatactcagtttaaagaaatcccggatctggttcttcggtag

SEQ ID NO: 187 - DNA, 5216 bp, Toxoplasma gondii
  source 1..5216: mol_type = genomic DNA
atggggggccgagccaccacgtccggcgcacgctctctcgccctgcccctcctcgctctcttcaagccttcctttgttctcttgtttttcctctcttctgccgtctcatctggtctcgccggctctcgcatcgctgatggagtgcttctccccgccggtcaagatcgttcacgcagtgccccccctcaaatcaaacccggtgttgggcattttggtgaaggcagccatggtctgaacatttctcggacgtttttagcgaacagtgcgtccacttcactgcactcgagttctacgggtccttcgcgttctgcagctgctcggttgtccagtgtccactctgtcgcaccgtcttcgactcccttgtctccctcgtctctgttgcggggatcgaaagcttcccgttccgcatttccgtcgttttcctcactacgaaaagaaaagctatccacgagttcagcggagaagcaaggcatagttgacaattcttttgaagatgaaggtttggaaggacgtgcgcgtaagcccagagcgcctcccgctgttgacgagagtttgatagacttatctggacactcggatacacctgagatgtctccctcggcaggtgtcaacgacgttcttgctcctgcaagaatcttgaatccgaagcaattcgcaagacagctggtggccaaagttcacactgcgttcgtgcaacgagatcaacgcatagcagaggaccagaaggacgggaaggagaacgttgagaaagagcggagacatgggtccagtgcccttctcggcgtcgacgagcagctgaagcaggccgatcacggtgacgttgccgctgacgacggagaaactggcgagatagatgtcaacgaagcagaggctctgatccccgacgaagaatccgtcgggagatcagtcttcctgcaggatgcgagggaatttgaagatgacgatggcgagcaagacgacgacgccgacgatgtgtccagttcacacgacatacgcgctcgagacgcacacactttcgcgttcgtgcagaacacagaccagacagaaaaggaagaagccgaaggctcttcccaggaagacgacgacatggtcggcagtaacgaagagacaggaagcaagtcgaaatccgagggtggcgatgcttcagagaaggaggaaaagtcagaaaagggagacacgtcagagcggggagacaaatcagagaaggaagacacgacagagaaggaggaaaagtcagaaaatggagacacgtcagagcggggagacaaatcagaaaatggagacacgtcagagaaggaagaccagtcaggaaagggagacacgtcacagcagggagacaagtcagagaaggaagaaaagtcagaggcggcagacaagtccgaggcggacacgtcgaagaactcgtcgagtgcaaaagccggagtaagtgagaaatttaagagtgctgctcaaccacgtagccacctagtgcacattactactggatatttacctaaaattagagcgtaccgtgccacagtcaatccatctcacagcagacgtaggaagaagaagaaggaaggggagtccgaggacactgagtcgaaagcacatgagaaacaccgggaaggggaagcactcccggaacctcgtgactctgaaaaggagtcggagagcaaagcggaggcagccgcttctcacaacgaaccggggaacgagggcgacgaggcaccgggagactcaggtgatcaagagcgccaggctgggggagactcagtaccctctcatcctggcgacaacgcagtgaacgaatctagatccggtgataatcgcggtgaagctggagaaacacgggaggcagaaaatgacgctgcggtgggtcattccgacgagacgggaacgggtgagacaccgtcggcagagggtcaccatggggaggagagtggcgctgagacggctgttccatcggacccgcgtgaagagatgggcagggcagaagcaaggtcagctaacagccccgaagagaacactgcggaggccaccggcggcggcgcttctccctaccgtgaagaagcggagacaatagtacaaccatacactgacgcccgccaaggaggcaacaatgatgccagtgctgcctcgcccgtagctcgccatgactacacagaaggtagtcaagcatcgccagcttccagacccgatgacaatgcacgagcgacaggaagcgactcgtcgcctgtgtaccgtgaacatgcctggtcgggcgaagcacctgctggtgagggtcaacaagaatatacgggtggtgctggatatgctgcgcctgtatctcatcatgaccagacagaagcgagtccagcccggtcagtgaccacccccgaatggagcgcacaggcgaccgggagcgaaccacaacctggagaggatacagcacgcgaccaggaccatgtcgacaatgcttctgctgaccgtcaaaatgccgaggcggaaggcaatgaagcaaaatcagagggcagccccgaaaacaatgcacaggagacacatgagaccgggagtgaaccacagcctggagaggatacagcacgcgaccaggaccatgtcgacaatgcttctgctgaccgtcaaaatgccgaggcggaaggcaatgaagcaaaatcagagggcagccccgaaaacaatgcacaggagacacatgagaccgggagtgaaccacagcctggagaggatacagcacgcgaccaggaccatgtcgacaatgcttctgctgaccgtcaaaatgccgaggcggaaggcaatgaagcaaaatcagagggcagccccgaaaacaatgcacaggagacacatgagaccgggagtgaaccacagcctggagagggtacagcacgcgaccaggaacatgtcgacaatgcttctgctgaccgtcaaaatgccgaggcggaaggcaatgaagcaaaatcagagggcagccccgaaaacaatgcacaggagacacatgagaccgggagtgaaccacagcctggagagggtacagcacgcgaccaggaccatgtcgacaatgcttctgctgaccgtcaaaatgccgaggcggaaggcaatgaagcaaaatcagagggcagccccgaaaacaatgcacaggagacacatgagaccgggagtgaaccacagcctggagagggtacagcacgcgaccaggaccatgtcgacaatgcttctgctgaccgtcaaaatgccgaggcggaaggcaatgaagcaaaatcagagggcagccccgaaaacaatgcacaggagacacatgagaccgggagtgaaccacagcctggagagggtacagcacgcgaccaggaccatgtcgacaatgcttctgctgaccgtcaaaatgccgaggcggaaggcaatgaagcaaaatcagttaccgggccagacggcggtgcacaggcaaatggaggtgaatcggcgattactcaacataagcaggccagcgcgggtgatagtgagggtcgacaagactacaggaatggtgccggatatgcttcgcccgtagctcgccatgaccacgcagaagcgagcttagttcggtcagcaaccaccctcgaggggcgcgcacagaacacaggtacaccggcgtctgctcaacgtgaggagacaaaacccagacctgcagcggtcgaagacgtaagcaagaataaggaacccgagatcgaagaggaaccaatccacctccaacacacagggaccaacgcaaacataggacacacgaacgctacttccgcgaatcaccagcccaccacagaggccgaaggcggttcagcagatgctcaccacggtggagacgagcagaaggaaggcgagcacgagcgtgcgcctggtgaagggggtcatgaggcagcaggcggttcagcagatgctcaccacggtggagacgagcagaaggaaggcgagcacgagcgtgcgcctggtgaagggggtcatgaggccgaaggtggttcagcagatgctcaccacggtggagacgagcagaaggaaggcgagcacgagcgtgcgcctggtgaagggggtcatgaggccgaaggcggttcagcagatgctcaccacggtggagacgagcagaaggaaggcgagcacgagcgtgcgcctggtgaagggggtcatgaggccgaaggcggttcagcagatgctcaccacggtggagacgagcagaaggaaggcgagcacgagcgtgagcctggtgaagggggtcatgaggcagaaggcggttcagcagatgctcaccacggtggagacgagcagaaggaaggtgagcacgagcgtgcgcctggtgaagggggtcatgaggcagaaggcggttcagcagatgctcaccacggtggagacgagcagaaggaaggcgagcacgagcgtgcgcctggtgaagggggtcatgaggcagaaggcggttcagcagatgctcaccacggtggagacgagcagaaggaaggcgagcacgagcgtgtgcctggtgaagggggtcatgaggccgaaggcggttcagcagatgctcaccacggtggagacgagcagaaggaaggcgagcacgagcgtgcgcctggtgaagggggtcacgaggccgaaggcggttcagcagatgctcaccacggtggagacgagcagaaggaaggcgagcacgagcgtgcgcctggtgaagggggtcatgaggccgaaggtggttcagcagatgctcaccacggtggagacgagcagaaggaaggcgagcacgagcgtgcgcctcgtgaagggggtcatgaggcagaaggcggttcagcagatgctcaccacggtggagacgagcagaaggaaggcgagcacgagcgtgcgcctggtgaagggggtcatgaggccgaaggcggttcagcagatgctcaccacggtggagacgagcagaaggaaggcgagcacgagcgtgagcctggtgaagggggtcatgaggccgaaggcggttcagcagatgctcaccacggtggagacgagcagaaggaaggcgagcacgagcgtgcgcctggtgaagggggtcacgaggccgaaggcggttcagcagatgctcaccacggtggagacgagcagaaggaaggcgagcacgagcgtgcgcctggtgaagggggtcatgaggccgaaggcggttcagcagatgctcaccacggtggagacgagcagaaggaaggcgagcacgagcgtgcgcctggtgaagggggtcatgaggcaga

SEQ ID NO: 188 - DNA, 2202 bp, Toxoplasma gondii
  source 1..2202: mol_type = genomic DNA
gaagggggtcatgaggcagaaggcggttcagcagatgctcaccacggtggagacgagcagaaggaaggcgagcacgagcgtgcgcctggtgaagggggtcatgaggccgaaggcggttcagcagatgctcaccacggtggagacgagcagaaggaaggcgagcacgagcgtgcgcctggtgaagggggtcatgaggcagaaggcggttcagcagatgctcaccacggtggagacgagcagaaggaaggcgagcacgagcgtgcgcctggtgaagggggtcatgaggcagaaggcggttcagcagatgctcaccacggtggagacgagcagaaggaaggcgagcacgagcgtgcgcctggtgaagggggtcatgaggccgaaggcggttcagcagatgctcaccacggtggagacgagcagaaggaaggcgagcacgagcgtgcgcctggtgaagggggtcatgaggcagaaggcggttcagcagatgctcaccacggtggagacgagcagaaggaaggcgagcacgagcgtgcgcctggtgaagggggtcatgaggcagaaggcggttcagcagattctcaccacggtggagacgagcagaaagaaagagggggtgagggctctgctgaggagcaagaacgcggttctggaggtgcgtgggaggcggcagtgcatccgcatgaacaggggagagtaacggaagcagagggcgaatcgtctcgcgttgaagaggaacacgaggccggaggagcgccagtgcatgcgcacctcggcaatgaaggaggaaacgaagtgggactgtctctcggtgaccagaaacaaggtagtggaggagagtcttcctcatctcaagctggtcacgcgaagacagaggaacggaagtcagggtattcgcatcatgggcctgagactgaagaggataccgcattttcacactctgggggcggaacgggagatgaaagggaaacaaggcgttctaatagtgaacagaggaaggaaagaacggaggagggaggagcaagggatcagcctcagaatgagaagaagacggaagagcaacatgcacagaagcaggaggaacaatataaacgtgatatcgctctcagcaaacatcaagaagctgaggagaatcgtcgacatgcggacgtgctgctgcaacaccatcatctcgggcaaggcgggcctcgtggacgcacggccgtgacgtcgcattcgcacatgcatgtgcaagatgtgactcagcaccaccagttgcaggaggctacgcagatggcggggaagttgacccgccacttacaaattcagaactctctgaagctgagagaaatgtttttgaagcgcaaggaagttggccacctcaatttgctcaagcactttcaggatctgatgcaggcagttgtctcgagaatctacagtaaactcaagggggccaagcgctcgctcaaacgcatgtattcccacagtcgctcgatcatcaaacgattcctgcatgagaccgaccacaaagtcgtgcgtccagaggagctaccgtctgcggtgctgacgcccccggatgaaggcaatgtgctggggaagacaacaaacggaatagtcatggactgccccacagattgcaatccggctgcatgcgataacaagcccgtagagccagctcagtgcttcaaatacgaagcagttgccggtggcggaggctttcggcgctgcgagccgtttgcggatcctctgactgcgacatgtggaaaaggattcactagatgtgcaatggcggcacccacgcgcggcaagcactaccagatgtttgcctcgcctccagatcaccctctccctcagcctctcctcattcaaggaagcaacttgcacgcctgcttgcgcctgctgcctgttcaccaagcgaccaggtgcagcccggagagtgccgagacggttgaggcagctctgaaggatacccaggcagtcgcgcaacagcctcctcctcacgttttggaacaagccgttctctttgagaatatccaggtcccgatgccagggtcgtataagctgtgcatgctccaatattggcgacctcctgactcgaaacccaccgacaacgtattcatcatgggaatcgacgagataggcactctcgatgtcctacagcagcctgacgcagaaacgttaaagcatgtgcaaggactgcataaaaaggattcacaaatgcactaa

SEQ ID NO: 189 - DNA, 6798 bp, Toxoplasma gondii
  source 1..6798: mol_type = genomic DNA
atggggggccgagccaccacgtccggcgcacgctctctcgccctgcccctcctcgctctcttcaagccttcctttgttctcttgtttttcctctcttctgccgtctcatctggtctcgccggctctcgcatcgctgatggagtgcttctccccgccggtcaagatcgttcacgcagtgccccccctcaaatcaaacccggtgttgggcattttggtgaaggcagccatggtctgaacatttcccggacgtttttagcgaacagtgcgtccacttcactgcactcgagttctacgggtccttcgcgttctgcagctgctcggttgtccagtgtccactctgtcgcaccgtcttcgactcccttgtctccctcgtctctgttgcggggatcgaaagcttcccgttccgcatttccgtcgttttcctcactacgaaaagaaaagctatccacgagttcagcggagaagcaaggcatagttgacaattcttttgaagatgaaggtttggaaggacgtgcgcgtaagcccagagcgcctcccgctgttgacgagagtttgatagacttatctggacactcggatacacctgagatgtctccctcggcaggtgtcaacgacgttcttgctcctgcaagaatcttgaatccgaagcaattcgcaagacagctggtggccaaagttcacactgcgttcgtgcaacgagatcaacgcatagcagaggaccagaaggacgggaaggagaacgttgagaaagagcggagacaggggtccagtgcccttctcggcgtcgacgagcagctgaagcaggccgatcacggtgacgttgccgctgacgacggagaaactggcgagatagatgtcaacgaagcagaggctctgatccccgacgaagaatccgtcgggagatcagtcttcctgcaggatgcgagggaatttgaagatgacgatggcaagcaagacgacgacgccgacgatgtgtccagttcacacgacatacgcgctcgagacgcacacactttcgcgttcgtgcagaacacagaccagacagaaaaggaagaagccgaaggctcttcccaggaagacgacgacatggtcggcagtaacgaagagacaggaagcaagtcgaaatccgagggtggcgatgcttcagagaaggaggaaaagtcagaaaagggagacacgtcagagcggggagacaaatcagagaaggaagacacgacagagaaggaggaaaagtcagaaaatggagacacgtcagagcggggagacaaatcagaaaatggagacacgtcagagaaggaagaccagtcaggaaagggagacacgtcacagcagggagacaagtcagagaaggaagaaaagtcagaggcggcagacaagtccgaggcggacacgtcgaagaactcgtcgagtgcaaaagccggagtaagtgagaaatttaagagtgctgctcaaccacgtagccacctagtgcacattactactggatatttacctaaaattagagcgtaccgtgccacagtcaatccatctcacagcagacgtaggaagaagaagaaggaaggggggtccgaggacactgagtcgaaagcacacgagaaacaccgggaaggggaagcactcccggaacctcgtgactctgaaaaggagtcggagagcaaagcggaggcagccgcttctcacaacgaaccggggaacgagggcgacgaggcaccgggagactcaggtgatcaagagcgccaggctgggggagactcagtaccctctcatcctggcgacaacgcagtgaacgaatctagatccggtgataatcgcggtgaagctggagaaacacgggaggcagaaaatgacgctgcggtgggtcattccgaggacacgggaacgggtgagacaccgtcggcagagggtcaccatggggaggagagtggcgctgagacggttgttccatcggacccgcgtgaagagatgggcatggcagaagcaaggtcagctaacagccccgaagagaacactgcggaggccaccggcggcggcgcttctccctaccgtgaagaagcggagacaatagtacaaccatacactgacgcccgccaaggaggcaacaatgatgccagtgctgcctcgcccgtagctcgccatgactacacagaaggtagtcaagcatcgccagcttccagacccgatgacaatgcacgagcgacaggaagcgactcgtcgcctgtgtaccgtgaacatgcctggtcgggcgaagcacctgctggtgagggtcaacaagaatacacgggtggtgctggatatgctgcgcctgtatctcatcatgaccagacagaagcgagtccagcccggtcagtgaccacccccgaatggagcgcacaggcgaccgggagcgaaccacaacctggagagggtacagcacgcgaccaggaacatgtcgacaatgcttctgctgaccgtcaaaatgccgaggcggaaggcaatgaagcaaaatcagagggcagccccgaaaacaatgcacaggagacacatgagaccgggagtgaaccacagcctggagagggtacagcacgcgaccaggaacatgtcgacaatgcttctgctgaccgtcaaaatgccgaggcggaaggcaatgaagcaaaatcagagggcagccccgaaaacaatgcacaggagacacatgagaccgggagtgaaccacagcctggagagggtacagcacgcgaccaggaccatgtcgacaatgcttctgctgaccgtcaaaatgccgaggcggaaggcaatgaagcaaaatcagagggcagccccgaaaacaatgcacaggagacacatgagaccgggagtgaaccacagcctggagagggtacagcacgcgaccaggaacatgtcgacaatgcttctgctgaccgtcaaaatgccgaggcggaaggcaatgaagcaaaatcagagggcagccccgaaaacaatgcacaggagacacatgagaccgggagtgaaccacagcctggagagggtacagcacgcgaccaggaacatgtcgacaatgcttctgctgaccgtcaaaatgccgaggcggaaggcaatgaagcaaaatcagagggcagccccgaaaacaatgcacaggagacacatgagaccgggagtgaaccacagcctggagagggtacagcacgcgaccaggaccatgtcgacaatgcttctgctgaccgtcaaaatgccgaggcggaaggcaatgaagcaaaatcagttaccgggccagacggcggtgcacaggcaaatggaggtgaatcggcggttactcaacataagcaggccagcgcgggtgatagtgagggtcgacaagactacaggaatggtgccggatatgcttcgcccgtagctcgccatgaccacgcagaagcgagcttagctcggtcagcaaccaccctcgaggggcgcgcacagaacacaggtacaccggcgtctgctcaacgtgaggagacaaaacccagacctgcagcggtcgaagacgtaagcaagaataaggaacccgagatcgaagaggaaccaatccacctccaacacacagggaccaacgcaaacataggacacacgaacgctacttccgcgaatcaccagcccaccacagaggccgaaggcggttcagcagatgctcaccacggtggagacgagcagaaggaaggcgagcacgagcgtgcgcctggtgaagggggtcatgaggcagaaggcggttcagcagatgctcaccacggtggagacgagcagaaggaaggcgagcacgagcgtgcgcctggtgaagggggtcatgaggcagaaggcggttcagcagatgctcaccacggtggagacgagcagaaggaaggcgagcacgagcgtgcgcctggtgaagggggtcatgaggcagaaggcggttcagcagatgctcaccacggtggagacgagcagaaggaaggcgagcacgagcgtgcgcctagtgaagggggtcatgaggccgaaagcggttcagcagatgctcaccacggtggagacgagcagaaggaaggcgagcacgagcgtgcgcctggtgaagggggtcatgaggcagaaggcggttcagcagatgctcaccacggtggagacgagcagaaggaaggcgagcacgcgcgtgcgcctggtgaagggggtcatgaggcagaaggcggttcagcagatgctcaccacggtggagacgagcagaaggaaggcgagcacgagcgtgcgcctggtgaagggggtcatgaggcagaaggcggttcagcagatgctcaccacggtggagacgagcagaaggaaggcgagcacgagcgtgcgcctggtgaagggggtcatgaggcagaaggcggttcagcagatgctcaccacggtggagacgagcagaaggaaggcgagcacgagcgtgcgcctggtgaagggggtcatgaggcagaaggcggttcagcagatgctcaccacggtggagacgagcagaaggaaggcgagcacgagcgtgcgcctggtgaagggggtcatgaggccgaaggcggttcagcagatgctcaccacggtggagacgagcagaaggaaggcgagcacgagcgtgcgcctggtgaagggggtcatgaggcagaaggcggttcagcagatgctcaccacggtggagacgagcagaaggaaggcgagcacgagcgtgcgcctggtgaagggggtcatgaggcagaaggcggttcagcagatgctcaccacggtggagacgagcagaaggaaggcgagcacgagcgtgcgcctggtgaagggggtcatgaggccgaaggcggttcagcagatgctcaccacggtggagacgagcagaaggaaggcgagcacgagcgtgcgcctggtgaagggggtcatgaggcagaaggcggttcagcagatgctcaccacggtggagacgagcagaaggaaggcgagcacgagcgtgcgcctggtgaagggggtcatgaggccgaaggcggttcagcagatgctcaccacggtggagacgagcagaaggaaggcgagcacgagcgtgcgcctggtgaagggggtcatgaggccgaaggcggttcagcagatgctcaccacggtggagacgagcagaaggaaggcgagcacgagcgtgcgcctggtgaagggggtcatgaggcagaaggcggttcagcagatgctcaccacggtggagacgagcagaaagaaagagggggtgagggctctgctgaggagcaagaacgcggttctggagttgcgtgggaggcggcagtgcatccgcatgaacaggggagagtaacggaagcagagggcgaatcgtctcgcgttgaagaggaacacgaggccggaggagcgccagtgcatgcgcacctcggcaatgaaggaggaaacgaagtgggactgtctctcggtgaccagaaacaaggtagtggaggagagtcttcctcatctcaagctggtcacgcgaagacagaggaacggaagtcagggtattcgcatcatgggcctgagactgaagaggataccgcattttcacactctgggggcggaacgggagatgaaagggaaacaaggcgttctaatagtgaacagaggaaggaaagaacggaggagggaggagcaagggatcagcctcagaatgagaagaagacggaagagcaacatgcacagaagcaggaggaacaacataaacgtgatatcgctctcagcaaacatcaagaagctgaggagaatcgtcgacatgcggacgtgctgctgcaacaccatcatctcgggcaaggcgggcctcgtggacgcacggccgtgacgtcgcattcgcacatgcatgtgcaagatgtgactcagcaccaccagttgcaggaggctacgcagatggcggggaagttgacccgccacttacaaattcagaactctctgaagctgagagaaatgtttttgaagcgcaaggaagttggccacctcaatttgctcaagcactttcaggatctgatgcaggcagttgtctcgagaatctacagtaaactcaagggggccaagcgctcgctcaaacgcatgtattcccacagtcgctcgatcatcaaacgattcctgcatgagaccgaccacaaagtcgtgcgtccagaggagctaccgtctgcggtgctgacgcccccggatgaaggcaatgtgctggggaagacaacaaacggaatagtcatggactgccccacagattgcaatccggctgcatgcgataacaagcccgtagagccagctcagtgcttcaaatacgaagcagttgccggtggcggaggctttcggcggtgcgagccgtttgcggatcctctgactgcgacatgtggaaaaggattcactagatgtgcaatggcggcgcccacgcgcggcaagcactaccagatgtttgcctcgcctccagatcaccctctccctcagcctctcctcattcaaggaagcaacttgcacgcctgcttgcgcctgctgcctgttcaccaagcgaccaggtgcagcccggagagtgccgagacggttgaggcagctctgaaggatacccaggcagtcgcgcaacagcctcctcctcacgttttggaacaagccgttctctttgagaatatccaggtcccgatgccagggtcgtataagctgtgcatgctccaatattggcgacctcctgactcgaaacccaccgacaacgtattcatcatgggaatcgacgagataggcactctcgatgtcctacagcagcctgacgcagaaacgttaaagcatgtgcaaggactgcataaaaaggattcacaaatgcactaa

SEQ ID NO: 190 - DNA, 8943 bp, Toxoplasma gondii
  source 1..8943: mol_type = genomic DNA
atggtggccaccaccctccattcgttgccgtcccgctacctgtacactcttttgatgtcatttctgtttgtttgtggagctcttgcgcttcacgaaagtcccgatggcttacctgaggctcctgaccgcccccagaatgcggaatcgggtgatggcccgccgacactcgttctgacgctggatccagagtatgctgggaagtcagaagagtttgcttttactgctgaatatttccctcctacggaatcatctaaaaatgaagatggcgcgcaacagagtttcgtcgaaactccgaatcggcggctacctggaacgttcgatcccatgtcatcgagcgacgtgcggagtgaggtgcagctacgcgtgacgacgcaacaaatggagaggggactgcttgctgagatcgtcgtgctacaggagggccagatggtatcaggctttcgagcatcgcttcagacgaaagaacaggctgcactcttgcaccgtctggccgatttaacaaatgacccaaatatccatttcagggttgagtggaggggccggggcgacggcaccggcggcctctacattcggacggccgtccatctgctcgcgaccgcctacaaaccgtcggttcacttcaagctaaacctccaccaaaccggtgcgaggggagcgcgggagactattaaattgctttccagtgtgcctattgatgacctgaacgctccgggtgtagacatagggacgctcaagcagctcattgtggatcacgcggagccagaaaacattctcactgggcccgggtcattctccatcaaacggatgttcaaggaatctgacccgaagaatgccaacacacaggaggcaactcttgttccgtggctgctgcgtcttcttgacctggcgtcgcctgtcacaatcgtcggtgatctgacgcggaatcgagagttttccacagtgcttccacaagggcccgcgaattggaatgaccttctcttactttacacaggcatgggagacgcggcaaaccggggccagaacgctcccgattttgctcagcgtgaacccggttaccgtccaggaagtatatttttgtctcctgatggtttccgtggcgcggcacatctgggtgatcatcagcctgaccgtctgaaacagttctggcgacagggtggcgagacgggtctcaatcctggagacatcgagcattactacagtcctctttttgggcggtcatacgatacctcgaacaatcctctcttgatcctggatatgtacggaaatcctgtttattcggagggcggcgtgcctaagttcattgtcgggccaggcgagaacgacctgacgaaactaccggaccatgtcagtgggatggttctccccagtgtgtctgctcgattcttattcccggataagcgatcattcacagagttcattaaccctgctcggccttggaatgatatcagcaaaggctggaaagctctaatggcgaaacataaaatgaagttcaactaccgagaaccaggccttgtcggggtgtcggtcaacgggaactggtacggtttgacgagtgaatttatacaaacgtatcccactcttcttcatcttcttggaagcttggcccaaagtactccaggattttctcttgaggacgtaaccctccattttgatgacaagctccctcccaagcttcctacactttttgtcctcgatgacgcacacgatcgtcagattccatggtgcgcctttgaatttgtgattccgctttcaccgcgcggaacggttaacatcaaatcccttttagcgaaagggaaatccgcggcagagtctcccaaagggtgcaatttccgggagaagggatttcacttcaccactgttcacagatggggcttcgtcgagtctcggaatcctttgagtattcagtggcacggcgtattggactacaccggatccaagcaggaatgcgcattgcttggaaatgttctgaaggatgctcatctagctggacgtcaaattgcggtcagtttccatgcggaacataaagccacggtcattccggttatcgagacatttggccctgatggcgaactcctgaagtcgaaacctcagaagccagtgacggctactgtgcagtttggtgatgatttgcccggacttttgtatgattttcacaaacccttccaaaagaaaaaagtccccaccgtcgtgtacccctttcttcagggtcagggacagggttcgcgggatgcactcaacggtggcgttcttggagaggaatattaccatcggccgcgcaaaacaaaaatcacgatgcgccccgagattcccattctcaacactcatgatacgttcgtggatggatctgggcctcacccgaatgtccctcacttcgtcattcctttaacagcgggtccgcagcaacatctggcgcccctcaaagcgctgcggcagtggcttcgtaaggagtaccctgggtctcagttgccctttaaactcgatcgaatgagcgacgaggatctcttgggtatcgcagatcatcttgtgttccggtttcccgatggaaccgaagcaacgttgcgatcgattttcggtccagaagtgttcagtccaaactgggcgacgatgaatcccgacgcctaccaaaaactaatggatgttcttacgaggcccaaaaaggtgtatcttgcgaagaatttccgcatcgtcgtgactgacgtcgacggacagcagatccctttcgacatccagatcgagccaggagacacatgggcgaaaacacttgatgacttcttcaaggcacacccgaacttaaaacccgccaacgtcaagcttgttttgtacgacgacaaagataccgccctgcggcaattcgacataaatttggatatgtatgcttcgccctacaccgaggctgtggaccaacaacacatgaagggccttcaaataaccctggaaactcctgcgccaattgtctcgtgttatcaagctgacccggcacgtccagggcaatgcctcgccgttgacatgaaacgcattttctgcgggcgtgtcaaccctgcgaaaatggtgtcgcgtgcctggaatgaggagtgcacagctgcttggattgcgcgtgcggatctcggggaagtcgaagacagatatctcatgggtccggatgacgttcgggcccgatcaattcgagaccttctgacgtcggcaaagaatgcgctgaagcagaggaacccagagaaggcaaagcatctgaacatccctgttgcggatgtcaccgaatccgaagagctgaacaggaaaatgagggagaggacggagttggcgatgaagagtggcaagacgctggaagacttggatcgcctgagacacctcaagttcgagattagaactcttcagcgtcaaggagagctgcagtgggccaaactggtaggcgcgactatcacgaccacagaaaagggcaagcccgctgagagacacatccgtctcgatcccaagaagtttttcttaaacgacaaactctggaaagtcttcaaggaacttgcggctcaggtccctggtctcaaatttgaaaacgttttcaacttctctttcgaagttatgaacaaggaagcacgagagcagtggaagaaggagcagaccacagtcacgaaagaggcaaagaagcaaatgcggtcgcagaaaacagtggttgatgtgatattcgttgggcctgacggctccgctctttttcgagacatcggtgtggagctgcggcagctttcggatgaagccctggggcgactttcgaagggagacaagagaggtctgatcaaccagctggccaagcgttacgacatcccaaggcaatacttcattcgacggggagggtttccgtcggccgcagttaatggaaccaaatgggtcatcacagccatgctgggtcttgtcggaggcgccggcaaaaagggcctggccagtttgttaaaagatccacatgcattcgtgacacatctccagtcggcaggaggcttcagccccacagatactgtgaaactcgttttcgataacggctccgtactcgacgtgcccctcagtcagcttcctgaccaggaccttggcagtctcgcggagatctattttccgtggaagaagaccgctggccaagcccaagaggaaaagaaaaaggcagtggaatcgaaagtcgccgaaggctcaggtattatgcggaaactcgaagtcacagtcatgcagccgtctttgtggccagaggtgtttggtgcctggctctctgacttgcatgaaatggatctttttgacgacggtccaatactcttgcaagtgcgcccggaaggggcgcagaaaggccaggtgattcgatgctcggtgaagacactgggcgagctgtatcaggcgctcaacaagcccgaaattattcgctcgaagtgtcccggaatggccgacttgaaaaagccgttcacgttcgagttatcgatcagaactccggcggagcagtattacaagctctacaatcgatctcgatcacccgaagaccagaggcgtactgcagccgtcctcttgaagctgaaagatcacatacgtaacctccctgatgatggacaagtgatcttcgaatacagaaagatcaagaggactctgactccgcaagagcttcagcagctcaaggctctcatcgaggggctccaacctaacgaaaacacggatgatgtgttgaccaagattctgaggttgctggggatttcggaccaggatatcgccaagtcgggcaggttgcggttcggcatcaagcaggcgccgacttcgtcagaacaacagatgctgcgcgagggttcgattaccgctgtggtcgaggacttccaggggggcagaagaaaggcgactgtccgtatttcgatcccggaggaggagccgcttcgcctcggcgcttctgcccagaattaccaggtgcatatgtctctgttttcgaaaaacgctcaacacctcaatacgccgtgtggctcaaagtccggcgcagaagtcgccaaagcgacttggggacagctgtgccggtggtgcaatctgaaactcgccgacctccctggtctcggtcatccgacgttgtacattcgaattatctctaacgagaagactcaaaccgtgcgaggaggccagccggtgacgaccaacgtagacggccatccggtggtgtacgacatccggatgccaggagatccacgttctgcctctggaatgccaaagtcggttttctggaatttggtcgagcgacctggttccaacgaactgggtcctgtctggcaccaatcaattccgaaggccgacggaggcttgcggaaagattacagctacttcgatccgaaccctggggcgtgggacccgacgctcttcgggccgtcttcaggcacttttccgcagaacacccgagctggcattgatattgtcaccaaccccgaagccatggaaactggcgacgcctatgcgcccccaataaggtttggttttgggttcaggaactggaatgaccgagatgctgtgaaacctcagttcaacaatatggtctcaggcatcgcccctcaggagcgagacttgtacaaagtgtacattcaaatcccgaaaggagatggcaactactacccctgcagcggcgtggatatcaatctgttcatgcagctgaccaaggaacagattgcccgagcctgtggcatacatccatctctgctggaggcgcccttcggtgtgtatctgctgaaagagacacccacatacgcccgggcgcagccgagctttccgctcttcttcgtagatggcgaaggtcaggaacatccgtcattggggcactggacagacgcgcctgcaaagttcttcagtcctcacctgcggggtgcctcgccgaactccttgattcagctcgaatttgctccgggggttacctgcaatttgacccagcaagaactcatgtctctgcatacttgggaggcactcctgaagagatgtaatattgatgcgggcaaagagcgaccggcaacaatcacgacacgcattgtgcccatgttctccaccccaaacgtgacggtcaaagttcccaatgagctgttgcagccacttcttcggcagcatagaggtatctcgcctgaccagttgttcaggcagaaacccttggaggaagtcgtggcacttctgctgtcgaatgcccatctcggactctaccacgttggtttgaagtacatcgatgggactgaccaaccgtacagtgaatgcccagaacatctgcggcagctgcctccgagccaaattcccggtctccagcatatctatattgtgccggcgagcgagggcgaaggagatttcccaggggtgttccgcggaggaactctgggcgacatgatgaaaggcatgaacctcagcccccaaaccacatatggcgactttgtgcggacagtgaagaagaagatcaacagtcctgaaggtctgactattccgggagtgcggcagcacgttggtggctccggtcgtccagcccaacagattattgacttcgatttcgctggcccggaatcgccaccaggagctgccggaaaaccagggtgggaagccacgtggcggcctgctacagtgggagcgttccccgacaacatgccaattggcgatattgacagggagatgcaccacccatttctggtcttcacgaccggccacccccccaaatacgacctgaatggtttagcggcctacggcggccagcccttccgtgaggagaccacacatctagatgcaagtcttcgcaacctcgtcgagtggatgaaggactctttgggcatatctgacccgaacggaatcctagctgaaatcgtaatagatacgattcgatgcccgtttcctctgagtgctgcacaactcatttcggccacgattgggcatctactgcaccactgccaggtcaatgacttggaaatgagtcatagtatctacgtgacgccgacccccgttcccggctacactgccactccaaagcgcaacggaccgcaaattgttatcaacggccataattacggagctcctggcacagcacctcgagacttcgggcagctgttcaacctccctggcaggcctggagctcgaccgctcaatcaggacctcgaggtctcgttcagtcctcttcccggaaagccaccggtgcgcggagtccttccgggggatgttctccccttgctgcaatctatttccgacaaacatggccagcctggcgtcgctgtggtgttgaacttcctgcgacaactgcatgcgctggcggaactcccgccgggtgccaccctcaacatcgacacgaaactcattccgtcgcaaagtcctcaacagctatacgcgccagaccaagttccacaacctggcccttggattgctggcccgactgggggcggacggtttccaggcggcggtgttgtggtgaatgaatctggcgggagaaggggaccaggtggttccgcagctgtgaagtttatgccgtcgaccttgcgacttccactgcttcggcagccttccgtcgagctgcctcggaattcgatgctcagaggttccataggaggagttggaggcctgccgaggacagagtttgtcgttccgattttgccttctcagaagtcgatgcctattgaacaggttctgaaattcttcggcatcgctccggcagctgttcagaccttggatgtccaagaaaagcctgagcaaggcgcaattttgattgagtccgggacagtgacttttgtgccactgaagggacctacgttcaccgtctcgatgaagaaaataaacgcgacggacaaaaacactctagcaacgctgctcaaagcggcaggtcgctcgatcattgatctagttggggcctctgacggcactcaacctttggttctgaaaattgttgttgatcacggggcggtcagtcccacgaaggtcaccacaccggttgggacgccttcgcacgcaagatctgccatggaaggattgacaatctggaacctcttgcctccgctgattgacgtccattctgtgaagacaatcacaatcagagtccaggctgccaaggcattccaacaagctgcgaaggctgctgcggccgcagaaggtaccgaaggcgattccgctggagagcccctgtcgcgccccaaaaacgttgagccggcagtgagaaccaagttcaagaataagatcccggaactccctgccgcgttcaagcccagacagagaactgtgtccgagataaatggcgcaccgaatccgaaactggttattttcgtggaacaggatggccagaaaacaatcaggttcacttttccatcgcgcgtcaacgacgttgtcatcggtcagtcgaccgttagtgtggtcttagacgctttgcttccaaaccccggcacctggcatcggactttctggggagccctatcgccagatggcacaagctgcaagccaacaatggagttccagtacccccactggcttcagacaaaaatggcagaacttcccgttccgaaccactcttcatgcctgttgatccgcgaggtttctctcaatatcaaacaacgacctaacttcttcatcaaaccgtacatcttccacagccccctggtcattttcgcactacaaggcaagcagcggatacctatttttgaggaacaggtcgacccggcagtcacgagtcagcctttgactgccctccttgaacagctgggtatccccaaaacccagctcgatacaatccttcagtgcagtagcacgaacatagacgcccccggggagtgcccatctgatagctctacgacagttgatcccgaaaccgtgattcctgacgcggtggcaacacagtcggcgttcttggttgtgacggggaagcagaaacaggctccaggcagctttcttcaggttttgtggaggcgacagaggaggcgtaactccattcagaagcgaataacttcgcactag

SEQ ID NO: 191 - DNA, 1267 bp, Toxoplasma gondii
  source 1..1267: mol_type = genomic DNA
atgctctccgttttcccagaatctgcccgcaaaatggagagtgtcaaccggcctcgttttccccctttcttttgcccgccgtccctcggtgtctctggcgcgacggtgcttcttccgttcgtcggtgtgcttcttttttcgtcgctcttctcgtccgctacgacggtggcctccatccctaatcccgccggtgcctggtcaccgtatttgtcgtcgatgtctgtttggccagcgaacgacgaggacggctccacatctgttagctctgacactgctctcgatatttctccttttgcggacgatgaaaaggacagtctcccggtggccgcttctctctctccgtctctctttcgcgctcagcggtggcagaccccacacaacaaccgtaggacccctctcgcccactcttcccttccggtgcacgacgacggcctcggggctagctgggtggctttgaccgaagataggaacgaaggaagcggtgcggaggaggagggagaaaataaggagggggagtccgacaaagccgagagtgaagaggaaaagtcgtcagtgagtgagaatgacagcaaaaacgaagaaaagacagaatcgaaggactcggagacgggagacgaagcggcggcgaggtctgaggacagagacgagcaggacggagagacaaacaagccaggaaaacaggctcaggccgctccagaggaaggcgaaaatgcatcggcctcatctgagaagttgtcttgtccgcgtgcttgtctgatcgcaagcaagtcaggagggaagacaggaacagacgggcacgaaaaaacgaacgaggtgagagcagatcagaaaggtggtgagggagcttctaccacgcagcacgaagaggggcaggaaacggaacaaggcagcgaagaggcgaattccagttcatcctctgcacccgcacaatcgcatgaaactcctgtagccgaacatgcgccatgccctcacgcagaggaacacaacgccacgaacggcagcaactctgcagaggccgcgagcgaagattccaacccccatgaagcagtgaaacatacggacgcgcatgggcaaacgcaagcttcagaccaagctcaaggacacgatcaggaagaggcctcacagtcttcagaaacacctgcagaagaaaatgctgaagaaccgaaacaggcagaggagcaggcgaacgcctcgcagtcatccgaaacgcctgccgaagaaaatgctgaagaaccgaaacagcagaggagcagcgacgcctcgcagt

SEQ ID NO: 192 - DNA, 3480 bp, Toxoplasma gondii
  source 1..3480: mol_type = genomic DNA
acagacgggcacgaaaaaacgaacgaggtgagagcagatcagaaaggtggtgagggagcttctaccacgcagcacgaagaggggcaggaaacggaacaaggcagcgaagaggcgaattccagttcatcctctgcacccgcacaatcgcatgaaactcctgtagccgaacatgcgccatgccctcacgcagaggaacacaacgccacgaacggcagcaactctgcagaggccgcgagcgaagattccaacccccatgaagcagtgaaacatacggacgcgcatgggcaaacgcaagcttcagaccaagctcaaggacacgatcaggaagaggcctcacagtcttcagaaacacctgcagaagaaaatgctgaagaaccgaaacaggcagaggagcaggcgaacgcctcgcagtcatccgaaacgcctgccgaagaaaatgctgaagaaccgaaacaggcagaggagcaggcgaacgcctcgcagtcatccgaaacgcctgccgaagaaaacgctgaagaaccgaaacaggcagaggagcaggcgaacgcctcgcagtcatccgaaacgcctgccgaagaaaatgctgaagaaccgaaacaggcagaggagcaggcgaacgcctcgcaatcatccgaaacacctgccgaagaaaatgctgaagaaccgaaacaggcagaggagcaggcgaacgcctcgcagtcatcccaaacgcctgccgaagaaaacgctcaagaaccgaaacaggcagaggagcgggcgaacgcctcgcaatcatccgaaacgcctgcggaagaaaatgctcaagaaccgaaacagggagaggagcaggcgaacgcctcgcagtcatcggcaacgcctgccgaagaaaacgctgaagaaccgaaacaggcagaggagcaggcgaacgcctcgcagtcatccgaaacgcctgccgaagaaaacgctcaagaaccgaaacaggcagaggagcgtgagaacgcctcgcaatcatcagaaacgcctgccgaagaaaacgctcaagaaccgaaacaggcagaggagcaggcgaacgcctcgcaatcatccgaaacacctgccgaagaaaatgctgaagaaccgaaacagggagaggagcaggcaaacgcctcgcaatcatccgaaacgcctgcggaagaaaatgctcaagtaccgaaacaggcagaggagcaggcgaacgcctcgcaatcatccgaaacacctgccgaagaaaatgctgaagaaccgaaacagggagaggagcaggcgaacgcctcgcagtcatccgaaacgcctgccgaagaaaatgctgaagaaccgaaacaggcagaggagcaggcgaacgcctcgcaatcatccgaaacacctgccgaagaaaatgctgaagaaccgaaacagggagaggagcaggcgaacgcctcgcaatcatccgaaacgcctgcaggagaaaatgctgaagaaccgaaacagacagaggaaccggaagaggcctcacagtctacgcattcaccggcggaagaacagtccccagaacaggctcagggacaagagcgggagaacgcgtcacagccttcagagtcacctgcagaagaatccactcctgagcaagctgaagaaaagggtacggaggcagcggaagagccggcacaggagcaaccggcggagacgcaggagggttcagatgctgaagccgatgcggaaggcggatctggagcgaatggcgaagcacagccacaggaggagagcggcgagaataaagatgtgcctgccgcggaccaggaggcccctggcctagatgaacagggccgcgacgaagttggaaccggcgctccagaagccgcggctgcttcagctgccggagctagccacgagaacgaagcccatggggcagatcaacaagatgattctgtggagtccgcaggccccgcagctgacgagcagcaaaaagacgcgacaggcgaggtcggggagctgcacggggctgagactcagacaccacagcttgcagctgaagcggagacagctggcgcggagcaggaggcggggagagcagatagcgtcagcgacggatgctatgtcacgaggagacaggaggtcgaggccgaggcgaagaagctgctggaagtctgtgaaaggaacgataatttcaccaaagtcgaccaacaattttgtgatgaactgttcaagaggatcgatggcccgttcacagttggcgaggtctcagcgtttctccgagctgccgacactgcaaacaacatcagtcgcaatttccggttctgtcgggcaactccgacaagcagcccaccgagagtgcgggatggagacagcgttattcacgcagcgatcgctgcatccaaacctcgcgttgtcgagattctgcttcagtacggagcgttccccaacatcgaggccttcccgcgttctcccgatgcagctaatagaatgggcatgcgacctctgcactacgttgcacggtacccaacgctggaaaattacgaatctctttttcttcttttgaagtacggctctcccgtaaacgttcgagacgtcggagggcggacccctctgatgatcgccgcgcgttcaagtcaccccttctcaaagctttttgccagagctctgattgaccgcaatgcagatgtcactgcacgagacaaagctgggctctccgccctacattacgcagcggcctcgaactcgtgcaaattggtcaagctgctcatcaaccgaggtgcagacgtgatgtctcaggatattcggggaaacactcccctccactacgctgcagctttcaacgcagacaagtccatgaacactttgctcaatttggcagggaatgcgatcaaggtgaatgtgccgaataagaatggaaaggcgcctattcatttggctgccgcgccatcgtcgttcgacgtcgtcccagccaagattgttccggctctctcgctggaattgcttttagagaagcatgcagaccctgtggcgcgggacgcccacgggaacacacctctcatggacgcggttttgggcgggtacctcgaaatcgcgaaacgccttctgcagattgccagggttcccctacatgacaaaaacatggatggcaaaactgctctcgatctcgctcaggaagcagcagaacgaactggcgacgacgtcctcgcatacctcacggccgttagcagcaagccctcctgccccttcatcccgcgcgtcgcgaactcgatacacgtcttgtcagacacacaattcggttcgctcatgcgtgtgggagacacagtcacctacgagtgccaccacggcttccgcttgctcgggcatgctaccctcacctgtatgagtcgtgacggctcaccagagttcatcccagaccctcctgtgtgcattcccatggaacaaggcgccgcttcgtctctgtattcggctcctcttgggctggctactgccctgttagtctatctaattccttttttcctaactcagttctaa

SEQ ID NO: 193 - DNA, 4482 bp, Toxoplasma gondii
  source 1..4482: mol_type = genomic DNA
atgctctccgttttcccagaatctgcccgcaaaatggagagtgtcaaccggcctcgttttccccctttcttttgcccgccgtccctcggtgtctctggcgcgacggtgcttcttccgttcgtcggtgtgcttcttttttcgtcgctcttctcgtccgctacgacggtggcctccatccctaatcccgccggtgcctggtcaccgtatttgtcgtcgatgtctgtttggccagcgaacgacgaggacggctccacatctgttagctctgacactgctctcgatatttctccttttgcggacgatgaaaaggacagtctcccggtggccgcttctctctctccgtctctctttcgcgctcagcggtggcagaccccacacaacaaccgtaggacccctctcgcccactcttcccttccggtgcacgacgacggcctcggggctagctgggtggctttgaccgaagataggaacgaaggaagcggtgcggaggaggagggagaaaataaggagggggagtccgacaaagccgagagtgaagaggaaaagtcgtcagtgagtgagaatgacagcaaaaacgaagaaaagacagaatcgaaggactcggagacgggagacgaagcggcggcgaggtctgaggacagagacgagcaggacggagagacaaacaagccaggaaaacaggctcaggccgctccagaggaaggcgaaaatgcatcggcctcatctgagaagttgtcttgtccgcgtgcttgtctgatcgcaagcaagtcaggagggaagacaggaacagacgggcacgaaaaaacgaacgaggtgagagcagatcagaaaggtggtgagggagcttctaccacgcagcacgaagaggggcaggaaacggaacaaggcagcgaagaggcgaattccagttcatcctctgcacccgcacaatcgcatgaaactcctgtagccgaacatgcgccatgccctcacgcagaggaacacaacgccacgaacggcagcaactctgcagaggccgcgagcgaagattccaacccccatgaagcagtgaaacatacggacgcgcatgggcaaacgcaagcttcagaccaagctcaaggacacgatcaggaagaggcctcacagtcttcagaaacacctgcagaagaaaatgctgaagaaccgaaacaggcagaggagcaggcgaacgcctcgcagtcatccgaaacgcctgccgaagaaaatgctgaagaaccgaaacaggcagaggagcaggcgaacgcctcgcagtcatccgaaacgcctgccgaagaaaacgctgaagaaccgaaacaggcagaggagcaggcgaacgcctcgcagtcatccgaaacgcctgccgaagaaaatgctgaagaaccgaaacaggcagaggagcaggcgaacgcctcgcaatcatccgaaacacctgccgaagaaaatgctgaagaaccgaaacaggcagaggagcaggcgaacgcctcgcagtcatcccaaacgcctgccgaagaaaacgctcaagaaccgaaacaggcagaggagcaggcgaacgcctcgcagtcatccgaaacgcctgccgaagaaaatgctgaagaaccgaaacaggcagaggagcaggcgaacgcctcgcaatcatccgaaacgcctgccgaagaaaatgctgaagaaccgaaacaggcagaggagcaggcgaacgcctcgcagtcatccgaaacgcctgccgaagaaaacactgaagaaccgaaacaggcagaggagcgggcgaacgcctcgcaatcatccgaaacgcctgcggaagaaaatgctcaagaaccgaaacagggagaggagcaggcgaacgcctcgcagtcatcggcaacgcctgccgaagaaaacgctgaagaaccgaaacaggcagaggagcaggcgaacgcctcgcagtcatccgaaacgcctgccgaagaaaacgctcaagaaccgaaacaggcagaggagcgtgagaacgcctcgcaatcatcagaaacgcctgccgaagaaaacgctcaagaaccgaaacaggcagaggagcaggcgaacgcctcgcaatcatccgaaacacctgccgaagaaaatgctgaagaaccgaaacagggagaggagcaggcaaacgcctcgcaatcatccgaaacgcctgcggaagaaaatgctcaagtaccgaaacaggcagaggagcaggcgaacgcctcgcaatcatccgaaacacctgccgaagaaaatgctgaagaaccgaaacagggagaggagcaggcgaacgcctcgcagtcatccgaaacgcctgccgaagaaaatgctgaagaaccgaaacaggcagaggagcaggcgaacgcctcgcaatcatccgaaacacctgccgaagaaaatgctgaagaaccgaaacagggagaggagcaggcgaacgcctcgcaatcatccgaaacgcctgcaggagaaaatgctgaagaaccgaaacagacagaggaaccggaagaggcctcacagtctacgcattcaccggcggaagaacagtccccagaacaggctcagggacaagagcgggagaacgcgtcacagccttcagagtcacctgcagaagaatccactcctgagcaagctgaagaaaagggtacggaggcagcggaagagccggcacaggagcaaccggcggagacgcaggagggttcagatgctgaagccgatgcggaaggcggatctggagcgaatggcgaagcacagccacaggaggagagcggcgagaataaagatgtgcctgccgcggaccaggaggcccctggcctagatgaacagggccgcgacgaagttggaaccggcgctccagaagccgcggctgcttcagctgccggagctagccacgagaacgaagcccatggggcagatcaacaagatgattctgtggagtccgcaggccccgcagctgacgagcagcaaaaagacgcgacaggcgaggtcggggagctgcacggggctgagactcagacaccacagcttgcagctgaagcggagacagctggcgcggagcaggaggcggggagagcagatagcgtcagcgacggatgctatgtcacgaggagacaggaggtcgaggccgaggcgaagaagctgctggaagtctgtgaaaggaacgataatttcaccaaagtcgaccaacaattttgtgatgaactgttcaagaggatcgatggcccgttcacagttggcgaggtctcagcgtttctccgagctgccgacactgcaaacaacatcagtcgcaatttccggttctgtcgggcaactccgacaagcagcccaccgagagtgcgggatggagacagcgttattcacgcagcgatcgctgcatccaaacctcgcgttgtcgagattctgcttcagtacggagcgttccccaacatcgaggccttcccgcgttctcccgatgcagctaatagaatgggcatgcgacctctgcactacgttgcacggtacccaacgctggaaaattacgaatctctttttcttcttttgaagtacggctctcccgtaaacgttcgagacgtcggagggcggacccctctgatgatcgccgcgcgttcaagtcaccccttctcaaagctttttgccagagctctgattgaccgcaatgcagatgtcactgcacgagacaaagctgggctctccgccctacattacgcagcggcctcgaactcgtgcaaattggtcaagctgctcatcaaccgaggtgcagacgtgatgtctcaggatattcggggaaacactcccctccactacgctgcagctttcaacgcagacaagtccatgaacactttgctcaatttggcagggaatgcgatcaaggtgaatgtgccgaataagaatggaaaggcgcctattcatttggctgccgcgccatcgtcgttcgacgtcgtcccagccaagattgttccggctctctcgctggaattgcttttagagaagcatgcagaccctgtggcgcgggacgcccacgggaacacacctctcatggacgcggttttgggcgggtacctcgaaatcgcgaaacgccttctgcagattgccagggttcccctacatgacaaaaacatggatggcaaaactgctctcgatctcgctcaggaagcagcagaacgaactggcgacgacgtcctcgcatacctcacggccgttagcagcaagccctcctgccccttcatcccgcgcgtcgcgaactcgatacacgtcttgtcagacacacaattcggttcgctcatgcgtgtgggagacacagtcacctacgagtgccaccacggcttccgcttgctcgggcatgctaccctcacctgtatgagtcgtgacggctcaccagagttcatcccagaccctcctgtgtgcattcccatggaacaaggcgccgcttcgtctctgtattcggctcctcttgggctggctactgccctgttagtctatctaattccttttttcctaactcagttctaa

SEQ ID NO: 194 - DNA, 3504 bp, Toxoplasma gondii
  source 1..3504: mol_type = genomic DNA
atgtctagcaatcttgcttttctgtctctttcccttgcggagtcaacggcctctctaggaaagtctctcgaagaaaccaggacgaggctcaccgagaagctgaagctcgtagctggaatggcgttagggtttgatcaattcgccatgcaccaaacagctacggggcccggcctttccgtggaaggaaagcaaaccgaacagatgagccggaaatcggcggaggatactagagcttcatcactgtcatctgacccagacgatggtagagccgcacaattagcgggccaaaaggggcatgtgacgccttgcattgccggactcattgcaacctcaaacccgtttctgtttacgcatatgctggcgctaggagccgcttaccttgggtacgataagtacttcggtgatggcacatctgaactgctgcctttctacgggactcgtacactactgtcgacgctatctccgctggatacgccacgacttttagacagcatggcagctgccgatcgactgtcaccgaagcgttccatactttcacgtttttcaagaagaaaaaggtcgttagacgcacctgcgccggagcccagtggttgggaccaaaagaggaaatcacgtctccctttgggaagtcttcgcctcgtactggatatactggataggcacctggaagctttaacgacttatgtacagcaacagattgaaatattccggcaagcaggagttccactggaagcgtcagtaacgatgactcacaacctgaacaggttacacgtcactcgctgccagtctagaaataaccagatggtaattccctgtaggtggaaagacacaaccttcttcgaagaactgtcaaatgaaacaaatccaggcctgacagacgaggagcagctggaaaagcgtgtcaaatttcacaagcttgagaatgctttcaacacggttacaggactaggcgcgcttgaagcaatgcttgacgaggacagcgttctgctcggtggtcctgcggaggaatcagtggctcgtctttattcagacttccatctgggtgcagcaatgaacaactggtatttctacgacgccctcaacatcaataaaatgctgtcccgatttcaaaaagttggtacgaaggtcttgaagcagtacgggctggagaacctgatgaatctggccacttcccatcaagcaggaagtaccgcgtcctgggatcggacagatatcgacactaaattggctaaacaccatcattatgggagcgctcttcgtgtccgactgtacatcatggctcttcttccacaatttactccacatcgggaaggaatcctgtctccagttgatttcattcgagaagctttcgctggagaaagaagttatgctatgtcgactgctcgcctgaagcctctattatctgatgacctggtcattctcggcgttcccaagggcttctcgtttttgtggctctttgaattcctcctcgaagaagattcaccaaacgcattggtggcaaaacgtagagccttgaaacggattcccaattggacaaagaggctgttctcccacagtcgttcgatcccgatgcttttccgccaattctataaggccctgaatgctggtgtcttcgcaaaagcgagaaggcggaccctcgacagatccaaaacgttgctcagtcggcaattaccagaagggtggcgcgatattgtgatggatgctttcgccttcaccgcccacagcgcagctctcatgcaagtggtgaactaccactcattgttccgtgaccgaacactcaatgacctgcaagaggcctcctatctcgctacgcctccagctttttccattgaggatcaaagtgtcatgaagaggtgcgatgagcaaatatacgaatggtcacgttttggcttctcgcccgacgttctcgaagctgatttgcacaatgagacattcaagggcaagtgggaaaatctacggcttgaaacgatgcccacaccagacactcatcaatggtggaggcgccttcatagggctattctcgactccctcgaaatataccaagctcacgaaaggcatctgaaggggatgagcgataacttgtatacccttgtcgaggatacaataaagaatctgcaagacggaagctctcgggacgacaccattttcttcggacgaattgcgagaggcgcccgcgaatctgtgggccaaaaaatgtggcgcggcgttaaaacgttctttctcgaccttgtacgcgatgttccaggctcggatcatgccgtctggtttggtgtcggcttcaatttcccacggatcttccaaattctccgcaaaatgaaagaaattgctctacacgctgcaggagaccaaggctcggccatcctgctggacgaggcatttgtggagctggtacaagagacagtggcggtacgggcacaaacgtatagacggcaaccccctacaaccctcagaaacatcggtgtaatcgggttgagaccggactacgccaatcttgacactgaacagagatcgatggaataccagctgtcaatgtgtgcagaccactgtgtctcactctgggtgcaaatcctcggattcatatatccctatgtgctcaatccatctcttttaacagattacgagaagtcatttgggactggccacgcaatcaaaaagttggatgatcccagctatgtgaattcgtttcgctacatttttgcaaacgacgcctcgctgaacttcttcgagcacaatacccctcaagacacacggaaggctttggtgtcactcaagagtggacaggcgttcatgtacgcaaacatgatgagattcgccggaattgcattcgaacaactcagtatgccgtatttggcggtttctcttcaaaggcaggcgcccttcatgggccagatggtcaaggattgggtggccaagagaagcagatcgcggaagctcgccatagtcagcgtgctttctctcgggctcatttttgcgtacacgctgctctccgcgttagacatcgctcagttcctcaccgactcagggatgaaggcaattgaagattgcagctggaaccctattatgcaacaaatggcgtgcgtggtcgtggcaggaagtggatctctggtggctccaacgttcgctgcgctgtcggatgtcttcaaggtgggcctgtattccggaatcgggtcgacactcatcgccgcttcagtcgtaggtaatgcatatatgatcatccgttctcagagcagaacaattctgaggaccgaaatggctatcaagaacgtggctgtgaaactctggaaacagatgcgaaagtatttttcctgggttaccagattcacgaaacgccgaaaagctattcttagcaccatgatggctcgagccacggcccttgccaaaaacaagaaaccacgcagcgaaactgctgcaaccatgacaagatctggtgactccgtaatggacatgcttctacagggagtctcaccggcaacgccacagcgagcgcaggacggcagccgctga

SEQ ID NO: 195 - DNA, 655 bp, Toxoplasma gondii
  source 1..655: mol_type = genomic DNA
cagcagacgcgccacattttgcctttcggcagtctctttcccggaggcattctcgggaaaatcatgcagaaactgatgcggtcctacatcatgtttttccacccagtgcttgcgaacttcaaggggctcctagcgctcttcctcggtgtcctctgcaaggtccgtctcccgcagctgattaacgcagtctttggagcgatcttccgggcaaaacgtcgcgccgggcgctacatccacaaattcttctttaaaaccatttctctccgcaaagacatcaccgggaagatcctcgttgacgatctagtcagggggtcgggagccgtgatgatcactctgctctttcagctccacggtgttgatatcgatgccatcagtcgacgtggaggggccgtcgagtcaggcgttctcgccggccagggcgtgtggaccttgtccgatggtctcttcgtcggcttgaaggatttcggccaactcttccgagcctattttgaacgatacgtaaatctcacatccgcaatccacacctactgcgcaaagcaaacgaccaacttcttcacagaaaccgaactcgatgaattctataacggcgaaaacgtcgacagaattccccctcgtgaaagactgttggcatggctccagatacctatggccgcca

SEQ ID NO: 196 - DNA, 1341 bp, Toxoplasma gondii
  source 1..1341: mol_type = genomic DNA
atggcttgtcgtcagttactttgttcagtacaaaatcttttgttttatttcttgcctgacatatactgcactgacttcgacaccatggagcaaaggctgccaattattctacttgttctctctgtgttcttcagttcaaccccaagcgccgccctttcgagccacaatggagtccccgcttatccatcgtatgcacaggcatcgctctcttccaacggcgagccacggcacaggggcatacgcggcagcttcctcatgcccgtaaagccacacgcaaacgctgatgacttcgcctccgacgacaactacgaaacgctgccgagtttcgtggaagctcctgtcagagacccgcgccaagtccctggcagaggagaagctgctcttggcacagaggagactccaggacaacagccgccggtggctctaggcagtgcagaaggggaggggacctccactaatgaatccgcctccgaaaattctgaagatgacacgtttcacgatgccctccaagagcttccagaggatggcctcgaagtgcccccaccaaatgcacaggagctgcccccaccaaattcacaggagctgcccccaccaaattcacaggagctgcccccaccaaattcacaggagctgcccccaccaaatgcacaggagctgctcccaccaactgaacaggatctgcccccaccaactgaacaggagctgcccccaccagtgggcgaaggtcaaggtctgcaagtccctggggaacatggaccacaggggcccccagatgatgatcagcagctgcttttagagcctacggaagagcaacaggagggccctcaggagccgctgccaccgccgccgcccccgactcagggcgaacaacccgaaggacagcagccgcagggaccagttcgtcaaaatttttttcgtcgggcgttgggggccgcaagaagccgattcggaggtgcacgacgccatgtcagtggggtgttccgaagagtcagaggtggtttgaaccgtatagtaggtggagtgagaagtggtttcaggcgtgcaagagaaggtgtcgttgggggagtccgtcgtttaacaagtgctgccagtcagggtctccgtcgtgcaggagaaggtttacgtaggggtttcactcgtgtaagaggagctctcagaggtcgtggtcgtgcagcagatggtgccagtagtgtaagagaaagattcggtgccgcaagcgggagagtcagagacgctttcagcgcgggattgacgcgcctccgcaggcgcggcagaactagtggcgaggagggcaggcccctactgggcgaaggaagagagcaggatgatggatcgcaataa

SEQ ID NO: 197 - DNA, 1761 bp, Toxoplasma gondii
  source 1..1761: mol_type = genomic DNA
atgggacgacccaggtggcctcttccttccatgttctttttaagcttgctgtgtgtatctgaaaagcgcttctctgttagcggactccatcttcgatttcgcgaatcgccgcaatgggacagcctgttgcctctgcaggaccgccgcgccgtccagccgtcatcacgctgggactcctccctcacccttgaagcgcatgcaccacaaaggatcgataccagtgacgccggggacgatgacttatttttggacgcaactcaacaggtgtacagaggtgaccctgtactggagacatcttcgctaccgcccgcggcgctgcctgtacgacctgtgagttcaaaaactgaggacggcttcagcggctctagggaagaagaatctgacggaggtgttccgactgggtcagaccaaggagaagtttggcgatcaagctcactggtagatgtgtcgtcccctggagaccgtggtggtgaggaacaagaatcgtcagcccaggctaaaggggaggcggacacgaaagacgaagcagagaaatcagaggatcaaagtcagtcttcgacggccgaccctaacactcctaccgcacaggggacggacgcctcagagtcgggtgaagattctggctctgacaccatgggtgattcggaagtaacagacatacctgtagatccacttaacagtggtccagagactgcctctagtggtgaaactggacagcgaattggggctgaatcaggagcccaaccatcagcggaggcttcacaggatagcgcagctgcatctgagactattccagctgccgatgccacgtcgccaactgatctcccgggcacccttgctggcgccactgtggcggacgactcacggcaagaggcgacgacagatggcctcgagaagagcccaggcgagcctaaagaggtagatgtgtttaacccccctcttgcaacaaaaagcgatgttgcccctctgagtgtatcgaccatcagagcacaggctgccccggacactgaagcgaatataggagctgaggtggccactggaaatgagggagcccctgaagttgaggaggccactgaagatgtagcaggcacaggagctgatatgagcactggaactgacgcggccactgaagatgtagcaggcacaggagctgatatgagcattggaactgacgcggccactgaagatgtagcaggcacaggagctgatatgatcccaggagctgagccaggcactgaaaatgaggcatccactggagctgagggggccaccgaagcggatgagcaggtgccgctaaaaacagaggcccagggtagtgccggaagttctccaactcagggacacgcgtcacattcagtggaagaaacaggtcgattctcagtgattccgtttgaatttggcagcagtccacggcttcgccggtggactacccagttcctaataagggggaaagatttatttaatctgatgcagaagtccaacattgcgaaacaagcagagaaaggagccaagaatcttcgcagctccatggaaatcctgcataacaccacttctttcttcaacgccttccgcgctcaacagcgtagcaaggaggcacagagcaagaacgtccaactgtctgtcacaagtgtaccaaccgaccaaccagaagagcaaaacgcaaccacccaggagggttccaccgcttcaccagaggaagcggcacgagaggcagccgaagcgataggcacgcctgtttctacggaagatgcgcccaactga

SEQ ID NO: 198 - DNA, 711 bp, Toxoplasma gondii
  source 1..711: mol_type = genomic DNA
atggcacgcgttcttccttgtgttttccttgttgcttatttatcatgttttttactagccggagagcttacacacacgacagcccttagtgtggctccaaaggcgcagctattctccaccgatgagggccccgtgtcggagtcggcttcaaagctggatgcggagcttgaggagaaggcgattcaagaagccaaagaagctcaagaagatgaagtggacgacatcccgacagaccgtaacgccccacccacgaacggcgatcccaccgatcagccagatgtacaactcaacgctgttgatattgacgggtttcctaccccagaggtccccctccccgtcgagttagacgctgaaaagttacaggaagacgagttcaaccgagaagaagaggcagacaatactgttcccaacattcttgtcggtccggctcaaacccccgaacccgtcgccattcccgttacgtccctgctggctcctgcaccggggactgtcaccacggcctctccacaggagggagttgaagcaaaggaagagcccccggcagccacaggtgtcccctctgccccctcatcaccagctagaagacgtgccttcttccgttcccgagggacaaggacgattactgtgaacgtgaggcacttctttcctaacggtgtgccaatcgtcgttgtacgccctcagcggcgtagttttctcttgaggcggttctga

SEQ ID NO: 199 - DNA, 1203 bp, Toxoplasma gondii
  source 1..1203: mol_type = genomic DNA
atgaagagaacagagctttgtatcgcagccctcgtggctgttggtgcgtttgcttttacctcaccaaatgcagtggcgaagagctttgagcggagcctcggccacctggacgcgtcctcgttcttgtcgtctcccctcaattcggatgtggagctcggtaggagcactttccctgctcagtcactgtctttcactgaaggcaccaacgagacaaacccaccgacatcccggcccccaggttggaaatacgaaggcagcgacctgcagcgaagagtggcggctcgacgggaggaacacaaaaagcgtcaagaagagtgggaacagaggaaagccagtcgacgctctgcactcactccgagtgcacccgatcccgatggtgacggtgatccagcaacttcatttccatcacaacggagactccttgaccgttgtcttcaacaattccgtgaacaactcgtggatttggagaatctctgcaagggcagcccggaacctgatgactgcaggtcgacggtccaagaaatcctggggaagcagtcgtttggggctcttcacacaactgtcataagtttctccattttcgtcaatagggaccctcgacgtttgtcatttccagtcctcgatgcaacagatttgcgcctcacggtcaagctcaaacatctcctggatagaattccgggatgcgcagctctctccctgccagtatacattgggttggtctcttcggacgtgttcaagagcgaagaattcactagaaaggtaaatcgatgctcggaggatttcggcaggagcgccagagaggagccaagcagagctgggagggcggctgcggctgtcattcgattcatgggacttacgccggagagacaaacgttctaccaacctttcatgttcgtcacaacccaggcagcaatgctgctgtcgatggttttgaaacatccgtttctctcgatactcgtaaacatggcctgtgtagcggggagcctttgccgcaagggaattcgagaggtactcttgcgagctcttcgggaggcagacttcctgacggaggatgtgccactggactccgcacctcaggaacttgtggaccatctcaaagtgtacttgaaactacttttcttaaggaaataccgcaggttgaggaggcaagccgctaatgttgctgcccaagttgtctatgcgaattccttgaggctattgtga

SEQ ID NO: 200 - DNA, 3186 bp, Toxoplasma gondii
  source 1..3186: mol_type = genomic DNA
atgtattcctcccctcagtcagaagaggctagcctcgtgaacagtaggggcatccgagatgaaagtgggcctaatggattctctattggatctgcaacagacacggccctgaaggcaggctccccgacaggaaaaagctggaagcaactgagcctcaaccttgggcggcgcgtgtgggacgcactggatccaacatggtcttgcgctgagaagagacgccgcctggacccggagactttgaggaaactaaaatcaacgtactggctttcacggattgtttttctgcgcgcgttgggatttgtttatttcttcgcgtttcttatcgccttcaaccagtctcagggactcattgggtccgatggcattctcccagcatcggattacgtggcaatggtgaaggactcgtttgccgacgcagaggcgtggcaacgagtcaaagcatttccttcactttttctcctattccctgcaacggatttctggctgcatgccatcccttttgttggtatgatcctgtcgctgttcatgaccatacaaggtgccagcaacggtttccttctgttcctcctctggatcttgtaccagacggtgaacagtgtgggccaggcctggtttagcgtcgggtgggaggcgcagcttctcgagttggggtttctggccatctggatggcccccttctggagtttctcgcgtctccctccttcctggccgactcccaaaatctgcgtgtggggtaatcgctggcttgtctttcgcgttatgttgggttctggactcatcaagctccgcacagacagagcttggaaagatctgacagcgctcgactaccactatgagacgcagccgctgccgaacccattgtcctggtacttccaaaaccagtcgcacggcgttcatgcggcgcaagttgtgatcacacatattgtcgagtgcgtcatttctttcctggtcattcttccctttcgccagtgtcggctcttcgccggcatagtccaaatcgcgttccaggtcggcattctcctctcaggaaacctagccttcctgaactacttgacaatcgtgtcggcaatcatgtgcctcgacgatcactttctcacctgcctcttcccgtcggcaattctcagtcgcctcccggagcttgttcgcggatgtgcgggctattggtcgctccctcagatccaggcatggccattcccacaactgtttcctggcgaggagcacggaaagggcaaaggacgtcaggcgaacgacaggcccgaagctgaggcgtctttgctcgacaaagatgcaggcagagatgagactcttccttttaatgccgctacagacgacagtctggacagcccccgaagctgctgctgctggtatcgaccgtactttccccggattgtgcgttccctgaaaattccatctcgcgtgcggaaacaagtgaaggaggagatcaaagagaactgggggaaaatgcttgctgaggtggtggcatctgtggcaatgcttacatgcatggcgtttgtgaccaaccccgcgacttcggctgtttggatggttatcgccgtgtttttcctcgccatcatcctctcggcctcgtccacgtttttcacaaacactctcgtgtcaaatgcgttcacggaactcgtccttcttatcgtcaccctctggagctgcatcgccatataccagcacggcccggctgtctggtctgtttggctcaccacctgtctatttacggttctgattgcgttcgcgtacacgaccctgacgaacgcagcactcatattcaaaatccatgtcgaagtcctgatcttcctcctcatcgccgctctttccgtccccgtcgtcgcaaatctgatttcaccagaccaggttatggattcagatctcggaaatcccttttccgtggtcaacacacatggagccttcggatacattggcaaggaacggtacgaactcattattcaaggcaccaatgcgtcttcaccgacccagaccctgtattggcaaaattacgagttcaagtgcaaacctggagatctctatcggagaccctgctgggctgcgccctatcactaccgccttgattggctcatgtggctagcttctatgggtgacaaggagacagtaaaagatatgcatccctggctttccaatttcctctccagactgcttcagaactcgaaaagcgtgacaggactgttggcccataatcccttccagaactccgacccgccgactgcgcttcgagtccttcgcattcagtataggtttaccaaaggccccgtatttggaggaggaccttggtgggaggtcgtgcctgagaccagggagcttttcgttgccccgtctcaggtgcccggagctgctgcacacctcaggaaacaactgttgattcttcgcagacgagaagaaaaacagagactcgagcagagacgaaaagaagaagcagagataagaagaaaggaggaagaggccttcaaacgtcgtagagagagggccatgaaggaagaagaacgacgaaagcgcgaggcagaggaagccgagaaaaggaggatcgctgagcaagcgcgccaggctgaagacgagaaacgcatcagagagcaggcggaggcagccagaaaagctgaggaagaagcggtgaggaaacaaatagaagaagaaaagaaacgccacgaagaagaggagaaggaacgtcaagcagaagaagaaagagaacgccgagaacaacaggaagaagaagaaaaacgccgagccgaagacgagaagagacgcaaggaaaaggaacaggccacgttgctggcgaggcagcggtctgaagaggcgctaaaagaggcagagaagaaagctcgaaaggatgcggaagaagaagagcggaagcgaaaggaagatgctttacaggaagaaaagaggcaaaaagaagagaaagaagctgaggaaaaacggcgaaagcaggcagaggcacgcagggaagcagcgcgcgccgcggctgaaaaggagtctgagaaagcgagacagttgcaagagcaagaggcgaaaaggaaagcattggaggaacaagaaaggagaaaagctcgggaacggcagcgctctgctagcagtcaagtcgcggtatatacagctcaaccccacgacggcggaggagtgccactacggcatgctccgttgttgactaggaagaagcaagcgctgtag

SEQ ID NO: 201 - DNA, 1002 bp, Toxoplasma gondii
  source 1..1002: mol_type = genomic DNA
atgctgaaaacgacacctgcattcttcctcttcctaacgtggatgttccctagatgcgacggctttgtgttaacgcataagaacgggaccaccgacgcatacgattctgctgttctatcgttcttattaactacggaaggagttcgcgaaggggcggcgaagagctctggcacggagataccttcgacgttagcttgcccatcgtcgtcgccacttaagacggcaaaagacaaacatgatgcctctctacttgggctcgtatcctccgtaccggacagcagcatattgaaaccggaattcgtcggagccggagcggctttggtagctgtcaccaggagtgtaaagtggactcagctaaaacaaagtctgaaagccctggtagacacgggtgtcaaatgtaaggtgaactgcaaacacaacaataagaaactctccaaaaataccgatttcaaagaccaacaggagtttccacaaacgagtgcaaggatcttgcccacaagcgacagggagccgctcattgccggaccgcagaaagtcactgaagaagatttgcaagttcttctgttcgagatagcccacgactgcaaaatgtcagctcctcaggcggcaatcacgaagcctctgacgattctcctcgcgggtattccaggggcccacattagcaagaggcctttcgaggctgctattcctcacttcatcctacagaaagaagacactgtcgaccttttgctgactgtcgatagaagctggtgcgggaagggtctaagtcacctcgtaaggtaccatgtaggatatatgtcgttcaaccttgaggtaaacggccgacgacttgctgatgacgataccttcgaggacgacaggctataccgtcaagttgttttgacaacaaaatttacggccaagtccctcgggggtaccttaaaacaagttaggagcctgacagatatccataagaaaaccggtaaacatggagaaaaccgacctcatagctcacctttctag

SEQ ID NO: 202 - DNA, 2124 bp, Toxoplasma gondii
  source 1..2124: mol_type = genomic DNA
atgaaagtgaccacgaaagggcttgcttttgctcttgcactgttgttttgtacacgctgcgcaactgcacgatacatgtcgtttgaggaagcgcaaaaagcaagtgaagcagcgaagcgccagattgccacactcccctctccagattctactctttcgaatccaggtagcaagcatagaaaccggggagggtctcctgcggcagggcaaccttctcaatccacactacaacctgaacaagcggcggctgaagtaggtctcggtgctggtggctcgactcaggggcagggacgcaccggtggcagcgcgggtgctagagaggagcggaggagtccttccccccaatctgcttatccggcgactagctcagcctcgctaaggggctaccaaacccagctttcaccctcgcatcttccaccacgcagcagcggaccgggaggatggtttccaacagagtcaatatttacgccatggagttctccgccgcaaccattgacacaacgaaagccatctctatctggggtggtcgttaccgaatttcaagagccacaagaacagtatggcgcagcgagcagtcttgcgtcctcgccaaagcgatacgtcagtggcgcaagctcgagtgcattgtcaggaaaggcggtgccaacgcctgcgtcgcttggtcaagaaaatcctcttttccctgttcagagcgctacattggattcaggaatacagtctccggcacaagagcgtcggggatcccctcaaagacagattgcgatgtcgaccgaaaatccagcggatagcggcgcctcgcagcttgcctccagtgtttctagttatgtagcagtacaaactcctcatgtgaaacgttcagaacgcatccggcgcgttcgactttcagaagagggtctggaagaagttcagcagctgaaagcagctgccgcacagcttctcgtagcggttccggactatgaggcaatgcgggctgttctgcaagaggcggtcctctcagaacagagggttgctacccgtaagcggaagagaaagcaacctccaggagcggtggagtcagctgttgacgaagtgttccctccaaatgagcgtgtcatgatgataaatgccaacggagtgccgatcgctctatacaatcgtgggcacctcggcagtggacatttcggggctgtcatcaaggccagcttagacgatgggacgttgtatgcagcgaaggtgccgtacagccagatcgtcccgaatgctgatgccacgtcagcagaactggaggcggaaatttcctcagctagggcggagttggtaaagacaattcgacaggagttggatgttcgggataagctggtggctaaagggctcacacttacagagactgcggagcaatacggtctaccattgtgccaaatgactttaacgcttcctgagaacaaagcaaccgtggtacgtcgaggttctcgactcgttgtcgtgtctaaagaagtcatgctgctgccattaattgatggctccccatcgaacagtctagtccagtcgcaaccaccatttctcttccagcgagctgtggcaagggaagcaattattgcattggccaagcttcacgaacttggattcgcgcatggagatgttaaattgaacaacatgatgatcgatgtccacggctttgggcatatgcttgacatgggcagtgtgcggcctgttgacagctgtgtaagcgaggaagataaatattacctgcgtttgtgggctcctgaacttgcgaaatcacagcacacgtcgcagcagacatgtctgaagcgtggcgctctcgatgtgtgggccttagggttggcaatcttcgagttcgtctgcttcaaccgacttccttacagcctttcgaatctgccgagttcactctggtcgagagttgaacacctttcgcgccttcgcctctcagatttctctgccaaggattgtaacgaatctgatccagcagtgatgggaattgttgctcaatttctaaatccaaatcctgaagagcgccctgaactcccgaaattcgtcagcagttacaccttctttcggcaagcccctggagttacttctcatctcactaggattccaactaccgaactttcttcacatcggatgtag

SEQ ID NO: 203 - DNA, 1827 bp, Toxoplasma gondii
  source 1..1827: mol_type = genomic DNA
atggagttggtgttgtgctttgtgataataacgatctctggcgtcattcgcgagagctctgcccttcttttacggtcaccaacgagcaatgatgtgtttggagagttggtggcgtcggcggaacgtgcccagcctctggcgacccgccttacaaaacgcatatcaaggttgaacttcaacgaccgcgaggacgacttctgggaagaccatggagacgcttcctggaacaattcctatacgttggtgaacggcaggacaacactaggtagcgagaaccgacgaagacctgccagtcattctctgatcgaaagaccctattaccgtgatgggaggttgtcacccgttttaggtgttcaggaacgtagggggcgcagtgttcattcgtatcatgaagaaccagtttcctttttcgatcagcgtgcttttgatgagtataccttcagaagaagatcacagcttcatagacaacgggcacgggccggactgcgctcaagaataaaacagaatgtgagacgactctggagatcggccagaggcgccgtgggcgggtggggtaggcgagtacgacgaaaaatcggggatttgttcgttgggcacttgatgccccagctgcggaggctacggttttgggaccagggcctcccaccggtagttccgcctttgataggcaacgagccggggcaggcttctgtcgcactggtggcggagcgcatggaagctggccttcgcgagaaagcactcacggagaaaaaccccactgaagcccaacaagcggtcgggacatacctgataaactccgccgaaaatacgtggtttatcagtagtccgggtggccgatacatcttgttaaaaaaacgtggcttccttggtggtggcggctttggtcttgtgtaccatgttgaacatcccaccacagggcaaccattcgcgctgaagatatttgttcaacgggtgatgaacaatgaggtaggggataaaatatctgacctgatcgaggatgaatttggagtcatgaagtacttcccccccgaatggacgcctgcgcgcatgtactcggaactccggtttatggtgccacttctaaagctcagagttttaggaaagcccgaattccaggatgtgcggaaccatttgcgtatatacagtgtttgcgccctatttccgaaggcgcaaggagacttagaagaagctgttgttttacttgcagacatggacagaacaaacgcttacaacattcgtatgagctgtacgattcaaatggtcaaactacttgcaagattccacgcgtttgaacttgttcatggcgatgtgaaactgcaaaattttcttgttgataaatcgggattgcttctactttctgacttcactcaaattcttcgtacgaatgagagacgctatccacctgtggtaacagtgatttacatgtctccagaaatagcgacctgtatgatcactcgcttgcggaatgctattccatacacgcctcagatagactcgtggatgctaggaatatccttgtatcgtttgtggtgtggtaacttccccttcggaatgactctggacgccaccgcactgcaggtggctggaattgtaatcaggtcttctgcgtcgtctcttgacttcgccagttgccacgacattccagaacagttccgcgagatgatagtgggatttctacgcaaaacacctggtgttcgactatctccacaacaggcgctggagcagttctcgttactcaactggaaaggaccatccccggcatcggatacggcttccgaaagtgaaccagtcagtaccgaggaggcggctttattacagaaggagtaa

SEQ ID NO: 204 - DNA, 1665 bp, Toxoplasma gondii
  source 1..1665: mol_type = genomic DNA
atgttttcggtacagcggccacctcttacgcgtaccgtcgtccgaatgggtttagcgactcttctcccgaagacagcctgtcttgcggtgttaaatgtagcgcttgtcttcctgctcttccaagtccaggatgggaccggaatcacacttgatccttcaaaactcgactccaaaccgacaagtttggattcgcaacagcacgttgctgacaagcggtggcctgctacagttggccactacaaatatttagcaggagcgacagaaagcactcgagacgtttcattgctggaggaaagggctcaacaccgggtaaatgcgcaagaaacaaaccaacggcgcacgatttttcagaggcttctgaatctcttgagacggagagaaagagatggtgaagtctcgggttccgcagctgatagctcctcgagaccccgtctgtccgtacgacagaggcttgctcaactttggcgtaaagcgaaatcgttcttcacacgcggaatcccgaggtacttttctcaagggcgtaaccgactgcgaagtttgcgggcacaaagacggcgatctgaattgttttttgagaaggcggattctggatgcgtcatcggcaaacgcatcctggcgcacatgcaagaacaaatcgggcagcctcaagcgctaggaaatagtgaacgactggatagaattctgactgtcgctgcctggcctccggacgttccagaaagatttgtttctgtgactaccggtgaaacccggacgctggtgagaggtgcaccccttggctctggtggattcgccactgtatatgaggctacagacgtggagacgaatgaagagttggctgttaaggttttcatgtcagaaaaggagcccaccgatgagactatgcgtgacttgcagagggagtcgttctgctacaggaactttagtctagccaagacggcgaaggatgcccaggaacgctgtagattcatggttcctagtgatgttgtgatgttagagggacagccagcatccacagaggtcgtgattggtttgacgactcggtgggtaccaaactattttcttctcatgatgcgggcagaaacggacatgagcaaagtcatttcatgggtatttggagatgcgtctgtcaataacagtgaattaggcctggtcgttcgaatgtacctatccagtcaggcaatcagactagtggccaatgttcaagctcagggaattgtgcatacggatatcaaaccggcgaatttcctcctcttgaaagacggtcgcctgtttctcggcgacttcggaacgtatagaatcaataattcggttggacccgcgataggtactcccggttacgagcctccggagcgaccgtttcagactacagacatcacctatacattcaccactgacgcgtggcaactcggtataactttgtactgcatctggtgcaaggaacgtccaactccggccgacggcatctgggactacttacacttcgcagattgtccttccacgcctgagctggttcaagacctcatccgaaacctcttgaatcgagagcctcagaaacggatgctcccgctacaagccttggagaccgcagcgtttaacgagatggattcagtagtaaaacgcgccgcgcaaaacttcgaacagcaggaacatctccacacagaataa

SEQ ID NO: 205 - DNA, 1300 bp, Toxoplasma gondii
  source 1..1300: mol_type = genomic DNA
atggaaaactgtgcgtcggtcagatcatcgtcgtgtcttatctggctagctgccgcattctttgtttcggcacttggccacgtacagcaaggcgctggcgttgtgcggcctcgccactggcagaactcggaagccgctgttagtgtccggccgccgggaggcgcgtcccctagacctttccacagcccaattgagccagtagcatttattgatggggagcacgttgaagacaagcatggaggctcatggctggagcaggaagcggccgaggaagtgacccccttattgaacagccacacagagaccccgacacagtcccccagtgcttttagaaggttactcaggcgtttgcgtttttggcgacgtgggaggacaggcggatcagatggcggaggagaaccaccgcagacgcctcgcccttccctaccgacccgactgtttcagcatttgcggcgtgcggcagcagcaattcccgcggcggcatctagattctttgggagatttcgacgaggccgactacctgtattccctcccgacgagtttccggaggatgtcgacacgaaccctatttatttccgtggtacggatcctggagacgttgtcattgaggagctgttcaatcgtataccgcaagcaaacgtacggactacaagtgaatacatgcagtccgcagctgacagtctagtgtccacatcgttgtggaatactggacagcccttccgcgtagagtcggagcttggcgagcgtccaaggacgctagtcaggggcacagtgctcggccaggaagacccttatgcatatctcgaggcgaccgaccaggagacaggagaatcatttgaggtgcacgttccatatttcacggaacggccgccttccaacgcgatcaagcagatgaaggaggaggtgctgcgcctacgcttgctacgaggcatcaaaaaccagaagcaagccaaggtgcatctcagatttatattccccttcgatttggtgaaggacccacagaaaaagaagatgatccgggttcgcttagatgagagggatatgtgggtcttgagcagattctttctgtatccccgaatgcagagtaaccttcagacgtttggagaagtcctactgagtcattcctcaacacacaagtccctcgtgcaccacgctcggttgcagctcacgcttcaggtcataaggctgcttgcgagtctccatcactatggccttgtgcatacctatttgaggcccgtcgacatcgtcttggaccagcgtggtggcgtgtttttgaccggctttgaacatctggtgcgag

SEQ ID NO: 206 - DNA, 1149 bp, Toxoplasma gondii
  misc_difference 380: note = n is a, c, g, or t
  source 1..1149: mol_type = genomic DNA
atggggcaccctacctctttcggacagccgtcgtgtcttgtctggctagctgcggcattccttgttctggggctttgcctcgtccagcaaggcgctggcagacagcggcctcaccagtggaagagctcggaagccgctttgagtgtcagtccggcaggagacatcgtggacaagtattctcgtgattccactgagggagaaaacactgtctcagagggggaagctgagggcagtcgggggggttcatggctggagcaggagggggttgaattaaggtcgccttcacaggacagccagacaggaacctcgaccgcgtcccccacaggcttcagaaggttactcaagcgtttgcgtttttggcgtcgggggagtacacgcgntaacaggtatctaagatttctggccccgttcgatttggtgacgatcccggggaagccattagttcagaaagctaagtcacgtaatgaggttggctgggtcaaaaatctgttgtttctgcttcctccaactcatgtcgatatggaaacgtttgtcgacgagattggtcgatttccacaagaggaccgccccctagctgatgccgctcgattgtatcttactgttcaggcggtgaggttggtagcgcacctccaagacgaaggagtggtgcacgggaagataatgcctgattcgttttgtttgaagcgtgaggggggcctgtacttgcgtgactttggctctctggtgagagcgggcgcaaaagtggtggtgcccgcggaatatgatgagtatacgccgccagaaggtcgtgcggccgcccgaagtcgtttcggctctggggcgaccacgatgacgtacgcattcgacgcctggacactgggttcggttatatttttaatttggtgctctcgagctcccgatacaaaatcggggtacgaatacagtgtcgaattctttttttcgaggtgccggcgggtgccagagaacgtgaaacttctggtttacaagttgattaacccttctgtcgaggcccgcctgctcgccttgcaagcgatagagactccggaatacagggagatggaagaacagctgtccgctgcttcgcgcctgtactcaggtgatgggacgttgacagggggagacgatgacatgccaccactggaaacgtga

SEQ ID NO: 207 - DNA, 1386 bp, Toxoplasma gondii
  source 1..1386: mol_type = genomic DNA
atgagcggcggcagagttccccgagtgccagcatcgtctaccaccacatctgcgtccgaggggattttcagaagattagttcgcagacttcgtcggggaagaggaaccgcagatggcgcaggagttgctgacgaaacccatcaggagccgcgcccgccacttcggaagagacttgctcagcacttccgtaggctgaggggcttcttcggacgccttacgccgaggtggctctccggtctcggccgccgggcgcaaagatggtggagagggagacagagaccgctgctggacccttcgtttcatgggttggaagctggagattcgttcatgcgcgacctgctgaaacgtgaaaaagagctgattggatactgtcgcgaagaagcgttgaaagaacctgcagcgatggttgaggctgtcacggcaactgtatggccgcaaaatgctgaaacaaccgtggattcacttttgagtcagggagagcggaagttgaaattggtgcagcctcttcgagtcggtgaccgatctgtcgtatttttagtaagggatgtagagcgcctggagtatttcgctctgaaggtcttcactatgggtgccgagaattcccgatcagagctggagcggttgcatgaagcgacttttgcggcagcgaggttgcttggggagagtccagaggaggcacgggacagacgcaggcttttacttccctccgatgttgtggcagttcagtctcagccccctttcgctcagctgagtccaggacagagcgactatgcagtcgcgaactatttgcttctcatgcccgctgcgtcggggggagaaggtattttagcgcgtcacatactaacggcacagctgatccgtctggcagccaacctgcagagcaaaggacttgtgcatggacgcttcacaccggataacctttttcttatgccgtatggccccgtgatgctgggggatgtatccgcattgtggaaggtcggaacccgaggaccggcatcaagcgtcccggttacctatgcgcctcgggagttcttgaatgcaaacacggcaacatttacacacgcgctcaatgcgtggcaactgggtcttagcatataccgggtttggtgcctattcttgcctttcggactcgtgacacctgggatcaaagggtcatggaaaaggccaagtctactagttccagggactgacagtctgtcattcttcccatgtgcacctgtgcctgacttcgtggagacactgattagacggttcctcaacttcgataggcggcgacgcctgcttcccttggaggccatggagacgccagagttcctccagctccaaaacgaaatatcgaggcgcctatcaacaggacaacctactgctgcgccctcagtcgcttga

SEQ ID NO: 208 - DNA, 1650 bp, Toxoplasma gondii
  source 1..1650: mol_type = genomic DNA
atggcgacgaagctcgctagactagccacgtggcttgtcttggtaggttgcctgttgtggcgggcaggggcagttcagctctctccgccaaactccaggacgaatgatctggcttcgggaaccccgcatgtggctcgtggggacactgaggcgcagtcaggaactggagacgattcagattttccgcaggccgtggccgaagaggtggcagatatgagcggcggcagagttccccgagtgccagcatcgtctaccaccacatctgcgtccgaggggattttcagaagattagttcgcagacttcgtcggggaagaggaaccgcagatggcgcaggagttgctgacgaaacccatcaggagccgcgcccgccacttcggaagagacttgctcagcacttccgtaggctgaggggcttcttcggacgccttacgccgaggtggctctccggtctcggccgccgggcgcaaagatggtggagagggagacagagaccgctgctggacccttcgtttcatgggttggaagctggagattcgttcatgcgcgacctgctgaaacgtgaaaaagagctgattggatactgtcgcgaagaagcgttgaaagaacctgcagcgatggttgaggctgtcacggcaactgtatggccgcaaaatgctgaaacaaccgtggattcacttttgagtcagggagagcggaagttgaaattggtgcagcctcttcgagtcggtgaccgatctgtcgtatttttagtaagggatgtagagcgcctggagtatttcgctctgaaggtcttcactatgggtgccgagaattcccgatcagagctggagcggttgcatgaagcgacttttgcggcagcgaggttgcttggggagagtccagaggaggcacgggacagacgcaggcttttacttccctccgatgttgtggcagttcagtctcagccccctttcgctcagctgagtccaggacagagcgactatgcagtcgcgaactatttgcttctcatgcccgctgcgtcggtggatcttgaattgctctttagcacattgaacttcgtgtatgtattcagggggggagaaggtattttagcgcgtcacatactaacggcacagctgatccgtctggcagccaacctgcagagcaaaggacttgtgcatggacgcttcacaccggataacctttttcttatgccgtatggccccgtgatgctgggggatgtatccgcattgtggaaggtcggaacccgaggaccggcatcaagcgtcccggttacctatgcgcctcgggagttcttgaatgcaaacacggcaacatttacacacgcgctcaatgcgtggcaactgggtcttagcatataccgggtttggtgcctagtcttgcctttcggactcgtgacacctgggatcaaagggtcatggaaaaggccaagtctactagttccagggactgacagtctgtcattcttcccatgtgcacctgtgcctgacttcgtggagacactgattagacggttcctcaacttcgataggcggcgacgcctgcttcccttggaggccatggagacgccagagttcctccagctccaaaacgaaatatcgaggcgcctatcaacaggacaacctactgctgcgccctcagtcgcttga

SEQ ID NO: 209 - DNA, 1650 bp, Toxoplasma gondii
  source 1..1650: mol_type = genomic DNA
atggcgacgaagctcgctagactagccacgtggcttgtcttggtaggttgcctgttgtggcgggcgggggcagttcagctctctccgccaaactccaggacgaatgatctggcttcgggaaccccgcatgtggctcgtggggacactgaggcgcagtcaggaactggagacgattcagatttcccgcagggcgtggtcgaagaggtggcagatatgagcggcggcagagttccccgagtgccagcatcgtctaccaccacatctgcgtccgaggggattttcagaagattagttcgcagacttcgtcggggaagaggaaccgcagatggcgcaggagttgctgacgaaacccatcaggggccgcgcccgccacttcggaagagacttgctcagcacttccgtaggctgaggggcttcttcggacgccttacgccgaggtggctctccggtctcggccgccgggcgcaaagatggtggagagggagacagagaccgctgctggacccttcgtttcatgggttggaagctggagattcgttcatgcgcgacctgctgaaacgtgaagaagagctgattggatactgtcgcgaagaagcgttgaaagaacctgcagcgatggttgaggctgtcatggcaactgtatggccgcaaaatgctgaaacaaccgtggattcacttttgagtcagggagagcggaagttgaaattggtggagcctcttcgagtcggtgaccgatctgtcgtatttttagtaagggatgtagagcgcctggaggatttcgctctgaaggtcttcactatgggtgccgagaattcccgatcagagctggagcggttgcatgaagcgacttttgcggcagcgaggttgcttggggagagtccagaggaggcacgggacagacgcaggcttttacttccctccgatgctgtggcagttcagtctcagccccctttcgctcagctgagtccaggacagagcgactatgcagtcgcgaactatttctttctcatgcccgctgcgtcggtggatcttgaattgctctttaggacattggacttcgtgtatgtattcaggggggaagaaggtattttagcgcgtcacttactaacggcacagctgatccgtctggcagccaacctgcagagcaaaggacttgtgcatggacgcttcacacctgaaaaccttttcattatgcccgatggccgcctgatgatgggggatgtatccacgttgaggaaggtcggaacccgaggaccggcatcaagcgtcccggttacctatgcgcctcgggagttcttgaatgcaaacacggcaacatttacacacgcgctcaatgcgtggcaactgggtcttagcatataccgggtttggtgcctagtcttgcctttcggactcgtgacacctgggatcaaacggacatggaaaaggccaagtctacgagttccagggactgacagtctgctattcgactcatgtatacctgtgcctgacttcgtgcagacacttactagacggttcctcaacttcgataggcggcgacgcctgcttcccttggaggccatggagacgccagagttcctccagctccaaaacgaaatatcgagcagcctatcaacaggacaacctactgctgcgccctcagtcgcttga

SEQ ID NO: 210 - DNA, 1443 bp, Toxoplasma gondii
  source 1..1443: mol_type = genomic DNA
atgaggagctcagtagggcagtctcgtctgccgctcaagtttttccttgcgccgttctcggtgaaaaattcggttttcgccctctttttcgtgttcgctcttgtctgcgtctccggtctgtcttgggaagatgctgaggacggcgcagcgtgggactcagtctcgaacgattcggacgacagcttcgcgaaagggtctgacttcggggaagtcaagttgggcagcgcaggccaacggcagctcctcagtcagctccagaacgagttgggcggtgaattcgaggacgcagacgtgagtatgctccagagggatcacggaatccacggagaggaagccggtttgttccgcaaggctgttccgggcttggacgacccagctgaagacgatgaagccgacggcgaaagtgcctcggatgaggcagaagccgactctgacgtcttggcggacgacgaagaagggacatccctcatcgaaaatgcgagtgaggaagacacagacaactccgaggcagacagtcaacaggaggatgacagtgtgggagaggattcctttctccagcaggagggcgaggactccgaggaagaaagagcagtcgaggacccgtatgctgccgccgaaccctcttatcttgaagaggacaacactgttgacgacagcgcggcggaggattatgcccctgcttcgtttgtccagatcggcagtggagagagaaaaatccgggcgcacatgcatcttgacagccgccaagttgcccccgaaagattcgcgcatgcgttcaaccaggatcatgtcagacttctggaccagaccgccgtcgaggacgaacttctcgatgaggccgccccgggcggaggcgcgagcgccgtagtctcccccatcgacgaaaaccctgcagagatggaaagcaccatctccgagggcgaagcaggttctgcggtggcggctcctgaacaaggtatccagccagaggcagaatttgctaccgccagcgaagaaccacgtcccctggaacctgtcgaccccgaaatggcagctcagcagccgcaactgcctcaagaagctatgccaactgagaatgcggaccttcttggaaaccagcccagaatgcgcaatgctctcgaaccctctgccaaggtcctcgaaccggaaaccctggaagggtcacctgctctcgtcccgccggcagagactgaagaggggacagccgcccaaattgcggaggaaatgagcaagcaggatcagggcatgcaggaagccaggcctcaagaagttctcacacgacacacctggcaagatatggagagaactgaggacctacgaaagaacgacgtcccggctgcagtggcgaattccggcagccagatcatcacggctgcgtcgtccgtcgcccttgctggtctactggtcgcaggacagcttttgttcagcgtgggcatgtactga

SEQ ID NO: 211 - DNA, 274 bp, Toxoplasma gondii
  source 1..274: mol_type = genomic DNA
atggggcaccctacctctttcggacagccgtcgtgtcttgtctggctagctgcggcattccttgttctggggctttgcctcgtccagcaaggcgctggcatacagcggcctcaccagtggaagagctcggaagccgctttgagtgtcagtccggcgggagacatcgtggacaagtattctcatgattccactgaaggagagaacactgtctcagagggggaagctgagggcagtcgggggggttcatggctggagcaggagggggttgaattaa

SEQ ID NO: 212 - DNA, 1728 bp, Toxoplasma gondii
  source 1..1728: mol_type = genomic DNA
atggggcaccctacctctttcggacagccgtcgtgtcttgtctggctagctgcggcattccttgttctggggctttgcctcgtccagcaaggcgctggcatacagcggcctcaccagtggaagagctcggaagccgctttgagtgtcagtccggcgggagacatcgtggacaagtattctcatgattccactgaaggagagaacactgtctcagagggggaagctgagggcagtcgggggggttcatggctggagcaggagggggttgaattaaggccgcctttactggacagccagacaggaacctcgaccgcgtcccccacaggcttcagaaggttcctcaggcatttgcgtttttggcgtcgtgggagtacacgcggatccgatgatgcagcagaagtttccaggaggactcgggttccgctgcatacccgtctgcttcagcatttgcggcgggttggaagatttttccgacatggcattccagcggcagctggcagatttttcaggcgagtttggccggagcgtccacaacccgttttcactgaaggtgatcctccggatctcgagacgaattccttgtattatcgtgacaaggttccaggagaggtgataatccgggaggttcttggcaaggtggcggggttcggaccaacgtccgggcatggtgtgtttgccgcatatgaaaacgcattctcggaaatgctgtgggcggaaggtggggctgtcacagtgatttctgaattgggccggcccgggagacagctcgtcaggggtaacctaatcaacattgttgatggaggattgctgtttcaagcgacagaccaagcgacaggagaaccgatgactgtactggttggcagtacttggaacaaaccgtctgggaaggacttagataagctgcggcaccaagcactagctattgggttgtttcaaaaggtgaagaacccatatctagctaacaggtatctaagatttctggccccgttcgatttggtgacgatcccggggaagccattagttcagaaagctaagtcacataatgaggttggctgggtcataaatctgttgttactgcttcctgcaattgagatcgatatgggaaggtttgtcgaggagctgtacgagcttccaacagaggaccgccccctagctgatgccgctcgattgtatcttactgttcaggcggtgaggctggtagctcacctccaagacgaaggagtggtgcacgggaagatattgcctgattcgttttgtttgaagcgtgaggggggcctgtacttgcgtgactttggctctctggtgagagcgggcacaaaagtggtggctgaaaatgctcaaggcttttcgccgccggaagttcgtggatcccgcggaggacttctttttggtccacgcaagacccagatgacacacggaatggatgcgtgggggttgggagcgactatattttttatttggtgctttaaagctccaactacaggacctgaagaggaatactccatcgaattcttgttctcattgtgccggcgggcaccagagaacgtgaaactcctggtttacaagttgattaacccttctgtcgaggcccgcctgctcgccttgcaagcgacggagactccggaatacagggagatggaagaacagctgtccgctgcttcgcgcctgtactcaggtgatgggacgttgacagggggagacgatgacatgccaccaccggaaacgtga

SEQ ID NO: 213 - DNA, 1764 bp, Toxoplasma gondii
  source 1..1764: mol_type = genomic DNA
atgccaaagattctcgcgagaactgtggatgcccttgtcacatgtgaacggttgttttgtgtgttacacatctgcaacatggaaaactgtgcgtcggtcagatcatcgtcgtgtcttatctggctagctgccgcattctttgtttcggcacttggccacgtacagcaaggcgctggcgttgtgcggcctcgccactggcagaactcggaagccgctgttagtgtccggccgccgggaggcgcgtcccctagacatttccacagcccaattgagccagtagcatttattgatggggagcacgttgaagacaagcatggaggctcatggctggagcaggaagcggccgaggaagtgacccccttactgaacagccacacagagaccccgacacagtcccccagtgcttttagaaggttactcaggcgtttgcgtttttggcgacgtgggaggacaggcggatcagatggcggaggagaaccaccgcagacgcctcgcccttccctaccgacccgactgtttcagcatttgcggcgtgcggcagcagcaattcccgcggcggcatctagattctttaggagatttcgacgagtccaagaacctgtattccctcccgacgagtttccggaggatgtcgacacgaaccctatgtatttccgcggtacggatcctggagacgtcgtcattgaggagctgttcaatcgtataccggaaacaagcgtatggaatgagaacgaacgcgtcctgtcgaacgccaaccatctagtgtccacagcattgtggcgtaatgagcagagcttccgcgtggagtcggagctgggcgagcgtccaaggacgctagtcagaggcccagtgctccgcgacgacggctcgtatatctgtctcgaggcgaccgaccaggagacaggagaaccacttgaggtgcacgttccatatttcacggaacggccgccttccaacgcgatcaagcagttgagcgagcaggtgctgcgcctacgcttgctacgaggcatcaaaaaccagaggcaagccaaggcgtatctcagatttatattccccatcgatttggtgaaggacccaaagaaaaggaagatgatccgggttcgcttagatgagagggatatgtgggtcttgagcagattctttctgtatccccgaatgcagagtaaccttcatattcttggagacgtcctactgagtcattcctcaacacacaagtccctcgtgcaccacgctcggttgcagctcacgcttcagctcataaggttggccgcgagtctccagcactatggccttgtgcatgccgattttcaagtcaggaatatcctgttagaccagcgtggtggcgtgtttttgaccggctttgaacatctggtgcgagacggcgccagtgcggtgtcgcccatcggtcgaggatttgccccgccggagactacagcggaacgaatgctcccctaccgccagcaccacccaacgctgatgacatttccgtttgatacatggacattggggttggcgatctactggatttggtgcgccgatttgcccaataccgaggacgcggagctaggcggaattgaatggatctatcgacgctgcaagaatatcccacagccagtcagagctttgcttgagggattcttgcgatactcgaaagaggatcggctcctcccattgcaagccatggagacttctgagtacgagcaactgcgcacagagctatcagccgttttgcccctgtatcaaactgatggagaaccggcatga

SEQ ID NO: 214 - DNA, 1728 bp, Toxoplasma gondii
  source 1..1728: mol_type = genomic DNA
atgttttctgtgttacgtaaccgcaacatgagacacggtccctcgattggatcgtcatcatgtcttatctggctagctgccgcattctttgtttcggcacttggccacgtacagcaaggcgctggcgttgtgcggcctcgccactggcagaactcggaagccgctgttagtgtccggtcgccgggaggcgcgtcccctagacctttccacagcccaattgagccagtagcatttattgatggggagcacgatgaagacaagcatgaaggctcatggttggagcaggaagcggccgaggatgtgacccctttaccggacagccacacagaggcccagacacagtcccccagtgcttttagaaggttaaccaggcgtttgcgtttttggcgacgtggggtgacaggcggatcagatgctggagaagaggcgcctcagacgcctcgaccttcactacgtacacgaatacttcagtacttgcggcgtgtgggaacatttttcagacgagacattccagcggcagcacttcgattcttcaggcgctttcgacgagtccgccaacctgtattccctcccgacgagtttccggaggatgtcgacacgaaccctatttatttccgtggtacggatcctggagacgttgtcattgaggagctgttcaatcgtataccgcaagcaaacgtacggactacaagtgaatacatgcagtccgcagctgacagtctagtgtccacatcgttgtggaatactggacagcccttccgcgtagagtcggagcttggcgagcgtccaaggacgctagtcaggggcacagtgctcggccaggaagacccttatgcatatctcgaggcgaccgaccaggagacaggagaatcatttgaggtgcacgttccatatttcacggaacggccgccttccaacgcgatcaagcagatgaaggaggaggtgctgcgcctacgcttgctacgaggcatcaaaaaccagaagcaagccaaggtgcatctcagatttatattccccttcgatttggtgaaggacccacagaaaaagaagatgatccgggttcgcttagatgagagggatatgtgggtcttgagcagattctttctgtatccccgaatgcagagtaaccttcagacgtttggagaagtcctactgagtcattcctcaacacacaagtccctcgtgcaccacgctcggttgcagctcacgcttcaggtcataaggctgcttgcgagtctccatcactatggccttgtgcatacctatttgaggcccgtcgacatcgtcttggaccagcgtggtggcgtgtttttgaccggctttgaacatctggtgcgagacggtgccagggtggtgtcgtccgtcagtcgaggattcgaaccgccggagcttgaagccagacgagcaaccatatcttaccacagggaccgcaggacgctgatgacattttcgtttgatgcatgggcattggggttggtgatctactggatttggtgcgccgatttgcccattaccaaggacgcggcgctaggcggaagtgaatggatctttcgaagctgcaagaatatcccacagccagtcagagctttgcttgagggattcttgcgatacccgaaagaggatcggctcctcccattgcaagccatggaaactcctgagtacgagcaactgcgcacagagctatcagccgttttgcccctgtatcaaactgatggagaaccggcatga

SEQ ID NO: 215 - DNA, 1062 bp, Toxoplasma gondii
  source 1..1062: mol_type = genomic DNA
atgacgcacccaaatccccttcaaacacgtttttcgcgcagtgcttccctcgtttctcggatgccgctggttcggctcttcttcaccatcgccgcgccacttctcttctccccctccccctgtccgtttctgcctctcaaaacgcactgcctcgcaattcagctgggaaaaccccaaggatcgccgccggcgtcacaaaaagaagcaattagggacacgggggtttctcaccagaaaggggaaccgtcggatagctcatctgaacctaaaccgcaaggcaccgtcgcggagacgcccggagcagcgtctgccgcagcagcggaagttggtcgaccttctcggtcctccgctgggccggggaagaagaagagaggtccatccttgttcaccgaggaaacgatgggaccgtccaagagacatccttgcttaaagaccctggctgcagctgtcgagcgctttcaggcacagcacctcactggcagggacgcagctaaagcgtttgttgacgccatccaagaatgcggcattcaagtagtcgccagcgactacgacagaaccgccatttcggttcactcgggtggcagtgcgcgacgcgacgatctttccgtgcttggggctttgactcctgacttcaagttgcttggagaagaacttacaagacgaaatatcccaatttactttgtcaccttttctgataagggggagaatcgcggtgacaggatagcggcgggacccctcgtcgaggctacgctgaaagccagtaatgcgaatttcgaagcccagggtgtctttggctactacccaccgttttactcggaacccgaggactatgcgccacttggtctgtccgcgcctatgccgaccgacaaatcgttccatatccagcaggtctccaaggcttcaggggtgcctgaagataaaattcttcttctggatgacgatagggccaactgcgtgaacttctgcaggagtggtggtgcagcaattcatgtctctggccatgaaggctttgatttcggtgctgttcgcgttgtggtcaagccctcgttgatcatgcagtga

SEQ ID NO: 216 - DNA, 309 bp, Toxoplasma gondii
  source 1..309: mol_type = genomic DNA
atggggcaccctacctctttcggacagccgtcgtgtcttgtctggctagctgcggcattccttgttctggggctttgcctcgtccagcaaggcgctggcatacagcggcctcaccagtggaagagctcggaagccgctttgagtgtcagtccggcgggagacatcgtggacaagtattctcatgattccactgaaggagagaacactgtctcagagggggaagctgagggcagtcgggggggttcatggctggagcaggagggggttgaattaacgtcgcgtttactggacagccaggcaggatcgtag

SEQ ID NO: 217 - DNA, 3033 bp, Toxoplasma gondii
  source 1..3033: mol_type = genomic DNA
atgaaaccaccgcgagagacaagcaggggtggaatggagggaaaggtggggtttggggcctcaattcgtgaccgttggttttttcagaacttttctgatggtctatccaacggggaaaagtcctggtggcgtcgaagcgtcgtccattttcttcagatggcagaccctacgtggtcctgcagagaaactcggcgcgctttggagccaggaatgctggagaaaatgaagtctacgtattggctcaccagaatcgtttttatcagagcgctgtccttcgtgtacttcgtcgcctttctagtcgcgttcaatcaggcgcaagggcttattggctccgatggcattctgccagcacagacccacgccgactccatcagggaagtcttggcggaggaagacacctggacaaaaatcaaggccttcccgtctctgtttctcttcctcccggccaatgacttttggatacactgtctcccatttctaggtatcctcgtctctttggtgacaggcgtactcggcgggagcaacgggttcgtgatgctgtttctctggatactttaccagagcgtgaacagcatcggccaagagtggtatgccttcggctgggaaagcgagctccttgagatcggcttcctctccatttggctatgcccattctggagtttctcccgccttcctgcctcatggcccacgccgaaaatctgcgtgtggggaaaccgctggctgctttttcggctcatgctgggcgcggggctgattaaactccgcaacgacaacctatggacggacctaacggctcttgactaccactacgaaacgatgccgatccctaatcccttttcgtggtacatgcacaatcagtcccatactgctcacgcttttcaagtgattgtgaaccacgtcgttgagtgcgttttccccttcctcctcctcattccttttcgccagtgccgccttgtcggtggcgtcacacaaatcctttttcagggagcgattattttctcaggaaatttctcgttcctgaaccacctctcgatactgccggctctcatgaccttagatgacaacttcgtctcttgtctcttcccttccaaaacactggagaggcttcagcctctccttcagggatgcttaggagcttggtcgctgcctaagcaccaggcctggcctgtcgattcatgttcagaacacacgaatgaacaccaaggagtgggttctgtcaaggacccagaggctgctgcgctcctcaacgatggagggagtcagctggagtggtctgtggacactgatgatgattcaaaccaagcctccgcgcgcacctgctgctgctggtattctccgaggatactgcaattcttccgctcgattccacggaccattttcccttcccgtgcaagaaatcgaatgaagcgagatatggaggaatcttggaagagcatgttgctcgaactagttgtgtccatcggagtacttgtgttgatggccgtcgcgacgagctctgaatctccgtctctgttgagtgtccttgccataattttcttgtgtcttgctcttgcgacgtcgtctcatttctatacgaaaactgccacatccaatgtatttaccgagttagttcttctggtcgtttctctgtggagtgctgtttcgctatacaagtacggccccttgccgtcgtgcctctggctcacgatcgttcttttcaccattcttcttgcattttcttacaagactatttccaatgcggttttagtctataaaattcacgtcgaattactcctacttctcctcatcatcagcttgtctgtgccagtggtagcaaacctcctctctcccaaccagctcatgaacgccagcatggcaaatcccttcgacatcttgaatacatatggggcgttcggcactgtcacaacggagcggtgggagctcattgtacaaggaaccgacgatccaacacccgacgagaacagcacctggataaactacgaattcaaatgcaagcctggtgatgtcaaccgccgcccgtgcctcatctcgccttaccactatcgcctagattggctgatgtggtttgtgcccatggacattcctgagatagttggcgtccggcatccatggttcccacgttttctcggcaagctgcttcaaaattcgccaagtgttactgggcttttagcggacaacccattcaaaaataaagatcctcctacagctgtccgagtgcttaagacgctgtaccggttcaccaagaggcccttttggggttctggcccgtggtgggaaattgtgccgaacacgacaagtgtgttcgttgctccgggcgatgtccctgacgccgatcagcatttggaacaaatgattgtgttaaaaagggtacaagagcagaaggcccaagaagagctacttaggaaggagctcaaagaggagcagaggaaggctcgggagagagccgaggcagagaagatggtggcagaagaagaacgaaagaaattactggagcagcgaactcaggaagagttggagacgaagaggcgtatccaagaagagaaggagctgcgtgagaagcaggcagaagaaatgaggaaacaagaggaagaacagcggaaaaaacaggaggcggaagagaaggcgagggcagcagctgaagaggcgcggaagaggaaggaggtagaaattgcccgtgcccaagaagaacaggaagcggagcgacaacgcgaggctgcagaagaagagaagagaaaaaaagaggctcagaggacggctgaggaagaagcagcgaagctgcgtaaagaggaggcacgtaaacgtgacgaagaagctgctaagcttgcggaacagagagagtccctgcgacgtaaagaacaaaaggagaaacaagcaatgcttgcaaagaagagagcagaagctgctgaaaaagaacaagagaggaattcacaactctctgaccagagcagagcttctgcagatggaggcgtccctctccgagcggccgccctgttcaaccgcaagaaagcagcaattttcagactgaatcagtaa

SEQ ID NO: 218 - DNA, 3192 bp, Toxoplasma gondii
  source 1..3192: mol_type = genomic DNA
atgttgcgccacttcggtggcgggttcatgccttggcgtcacctagacatcagctcgcttcactgggtggacagcgccaggttcggcagtcattgtaagcgttacaaccaggagtcagcgacagagcgtctgcgcgaaggagatgcatggaacccatcaaccgtgcttgccgtgaacccctccgtttcaacaatgagtaacggggccgtggccgactctgctggtgattcggggcagcagacaccggaggaaaccagaggctccagagacactttcgtttttgggccgttcaaagaatggttgaaacaccactgcagtctctcaaaaaaggaccatgccctaactgccgaggatctgaaggttatggaaggcacgtactggctggctcgcattgttttcttccgcactttgggattcgtgtacttcacggctttccttatcgcccacatgcagggaccgggcctcttcggacaggatggtttgctccgcctcgaggatacgcctccgtgcaagagcagtggccaagacagccgagagttgtggacacgcttcgctgctgagccgtctctcttccacttcttcagctgcacggacgcatccctcctgttcatcacgtccagcggtctggttctttcagccgtgctcatcctcactggaggcgtcactgtgccagtgctcttgtggctgtggctgtcgtacatgacgattcaggcagccggtcagaggttctacactttcacctgggacactctgctgctggaggtcggcttctgggcgatgcctttgacgctggtctgcttcttgcgccctttcttgccactgacgagcgctccttcaccctctaatacgacgccggatggtcctggcgcacggccctcgaccctgaaatctgcgacgatgtcacagtctgcgggaggtggcggcgtttccggcgctcaactcgaccccggccatccgaaagagggagcagacggtcgtggaagtacatcggctgccgcggagctctcttcgacagatggcgttcgcgaaaatccctctggtcctgagagcgacagttcttccagtgggaaacgttccaccctgcgaggtcagcagatgctgaggtggccgcgcgcagccctccagcttcttcttcggtgttgccattcactcgtctctcccggggcgccattcttgccaccgacctggccaaccccatggatttctgtgtggggataccggtggttgttgtttagactgatgctcggcgcaggcctcatcaaactccgcgcagacactgcgtggaccaacctgacagcgatgcagtggcactacgagactcagccgctcccgaaccctgttgcctggttcgtgcacatgttgcctatgagcatgcacaagtttgaggtactgatgaatcactttgcggaactggttctccccttcgccgtcttgtccccctggagacaactccgcttgttctccggctgcttccaacttctcttccaagtcgccatcatcatcacgggaaatctggcgttcatcaactggctcacaatcgtcttcattgtgtttcttttcgacgaccgattcctcatgtggttgtttccgacttcgactctgaataaattgcggcctctcctccagggctgtccgggcaactggtctttcccgtcgagcgactctgtgaccaaagacaccagcacaagtgtctcgaagagcgagtccgagaagtccccaagggagccacaagcttgcagtgaacagaggccgctcttgcgcaacgacgtaaaactcagagaaacctcagaagctgaagaggcgcactgtcctccatcttcgtcatcggccaccacggctgcggtgtctcgagcgcttccgtggcgtctcttgacggggccaaagtggacggggcgggcactccggcgcatgctcgcaacctggggctgctggcgaattccgttgtttctgttcatcgcggccgttctggtcaccagcgatggcattcttcttctccttctcgggaaagccgctacagccccatccttgtcgacgacactcgtctgggagtctgcgggtctccttcttctcatcctgacttccgtggtggctttgggcggtcttgccggggccgcgggagtcccgtggtctcttctgggggcagctgtatctgccttttctccccgtttcaccgtagagaaccaacaccctctgacaaacctggcgtctgtggagcggtcggagacagcagagaatgcgagcttaccaacacaccctcaagactctgaacggcgcggcacggtgctgcgccggcctcgacagactgaggaggatgtgggaggacacgagggcggagtagtcgagagtcgaagacagtcgaagtctgtggtcgatgcagacgaaggccgcgatgaggcaaaacttctgtggaaaagaacgcaagatgtaggagcccttgccttcgaggttctggtcgccggcgtcgtgcttgcgaatctcctgttcatgcactttcacctcggtccaactttcgccggtcttgatctcctgaccgggttgctctgcgtccttttgtttgccttcgcacatcgccactgttcaaactccttccttgttctgcgtgtgatgacggaagtggggctccttatcgttctggtttggcgttcgatccccgttgtcgagaatcttctctcgccccaccagatcatgaacgatacatacgactcctttcgcctcgttaacagttatggtcttttcggattcatgaccaagcaacgggaggagctcgtcattcagggaacgtatgaaccagatcccccgtcggcacctgccaacccagcgtggcaaacatatgagttctactgcaagcccggagacatagaccggcgtccatgtttcgtctcgccatactattaccgcctagactggctgatgtggtttgccgcgttcaacgccgacttgcaagctccatattggctccttcggctagtcaaaaaaatgcttgccaacgatcccaaaacttcggctctgctcgcgcacaatcccttccgaggaaaacgccctcccacattcattcgaattctccgctacgactaccactttgcgtacaaaggaaaggaacaggacatgtacgagcagggaaagtggtggcagagaaagtatttgtccgagtttctgccacctgttagcgccgccctgttccgcaagatttga

SEQ ID NO: 219 - DNA, 3765 bp, Toxoplasma gondii
  source 1..3765: mol_type = genomic DNA
atgggatgggttcccccctgtgcggcacctgcccactcgcaggcggctgcgaacctacgggtggagtctctgggttctcgttcttttcctgacgggtcgactaaaaagaggcgaagggaggaaagaacagacaggtttcggaacctgcatttccggactttgctctactcttgctccagtttctcctgcagcagaaacgcgcctgcaaacggacacaaaaccagctctcctggacatcctgaagaaagcctacgacccactcccctgttcgtgaagcgcgctcgtttctgtttttatcttctctttcttttctctgttctggcctccaactttttttctcaccgcgctgacgaatgcactcgcttctgcaacgtctttgctcaagcgctgcatgtgaaactcgacaatccggaactttctcggcagacgcttccagcctcgttgcggtggcagcaagtgaagacgaagaatggagaagaggtgaacgcggcagagagtgcctcttggaaaggtttcgctgacgtccaacttgccccttttcgccccgacgaaaagccaagccgcgaacgaacggttcacgaacacagagacactgtacacggactttcggggcgcgatacgctgggaattgactccttccgaggcactgacctccgtggaaaccgcctctttgttcgccttccgcggccagcactccactcgcccttcctcttcccctcgttctcttttccggctgctacacaacctgcagagtcgtctgtgttcttcggcgcagatggcatcccgtccttctcagagatccacagtgaacagtcagaggacgcggaagaaccggaaagtcaggactcttcgtcttccagaaatcaggacgaggcgcccaagccaactgaacatgccagccaagaaaaagcacacgaaagtcaaggcgaaccgacggaggactcgggggcagctgagtcggcttcggaacacccttcgccttccaactccatcccagctgaagaagaaagttctgcaactgcaacccaagagaaacccactgaggggccttctgccccgcagaccctggcctcgccgcttggtggggacactgcttcctcttcggggacggaacagacggagcgtcggtcgggatcccctgtggaagagcaaggcaaggacagtacgcgaacagcttctttgggatccgtgtcgtattcctccacaacaacgacgaccggcactcccagcgccttcaacgtcaaagaggccctcctggcgccggtacccacgggcgcggtcgcgggaccgctagctgggcgcgaggcgagggcccagcgaggggcctcggcggacagcggcgagcgcggcgccgctggggcgaaggaagcggcgggagaggcgcagggaccgagcgaagtttcagaggagaaggccgagccgaagcagaaggaagcgacagaaggaggaaagactggcggagacaaagacggacaagaacgtggaagtgcggccgggaaagaagacagcgcccccacgacggagaagccgctctcgaaagccgagatggaaagagcggccgcagaattcgtcaagaaagagggtggaatggggtcgttggagaaaaaattggccgaaagtggacctcaactcaccgaggaacagacgaagactttcgtcgacacccaagaggttgcacagaatgtgcggaagctcattggactgaaggccggctcgaacctccatctggaaaaccagaaactgatcaaagcggactgcgacttggcaaccttcggacccgagtactgcgctgcccgcgataatccgaacgccctcagtctcctgtggtcactggagcaccggaaaaacacaatttactttgtcattgccatgattacgcttgctttcggcattgcagtgcagacgtgcattcgcttgctcgagaggaaaatcagcgaaggaagagacgagttctcgaaggaagtgatggaaactgcttttcgacaaatcgcgaccatcagcatcgtcaacgtgattctctggggaacgatgcagtccaacgtcgcagaagtcctcgacgaactcgtctttggagatgtcatgccgccccttcgggacagcgacaccgtgctggagaatgtttctccgatgctcgaggtccttttcgaagagcttttcttcgtctcggtcattcttctcgtctggtatgttgtctttgtcattctcttccagtgcatgatccgacaaatcatcgagtggatgcggaaaatcgacgaagaagaagacattcctttgatcgctcgagatgcagagacacagagccaccgctggtgcggggccgtcctgggacgctctgccctcgacaaagcaaatttcattgcgcacagatacgaattcactgacaacgttcagtccatgagtatcccaggcgtcgacccttccggctactacttcatggagtatttgcgtgcaagtcttctcaagatggccatcgagatgattcgtctgccgaattcgacgctgttcttcctcatgattatggacatatgccttcgaccgacgtttagttttcggttaggccaagaagttggcctcatcagtgggttgtccgctacatgcctggtggggatgctgctcgtctgggcgtacaccgccaggatcgaaaagcagctcttgcctcgtcacgttccacactacctggttatgcgctaccatatggaagtcggaggagacaccagctctgagtatctgaaggagttcgcgccgccgtacaagctgcagaagcaaaagaatgcatggccgggcgtctgttcgacgttcttgcgcgggacgacgctgccgaacaaacatcagcagctgttctgtttctgggcgaacggcccgaacattgttttgcgagcggtggaggcttcgttcttttgccagctcctcgtcctcgcctggtgggtgcagctcttcagaagccacccggcaacttggctcaacttctgttggtggggcaacgtcgtcgtcgtcctctgtgccggttcgcagttcgcactgttgaagagcgtcgtttacacggttcttcttgccctcaactcaggcatgcttgtcgatcctgaactccttgagaaggtatgggatctgcagcgggcggagaatgtcaggcgaacggcagagcttatcgacgccctccgcgttcagtccacgctcttcgctatcagcgagggaggggacatgttctggcggcagttgctcatacggtccaagggagcttccaggcaggcccaggaacagcgactgagtttgtgggcagcgctagacgaagagcatcagggcgagatcagtcgcgcaaaaattttcaagttcctcacgtctcagggattaccgatcaaatcggaatctggcgttaatgactttctgcatgtctttgatcgaaaccataaaggcggtgtgaacgaagatgagtttttcgtcatggtcatggtcgtgaagcaaatgctcatggagcctcttgaccgcgacgctgttcgggaactgttcgaaggccgctacggcattccctggacgtctcctgtcggaattgatttggcaaacttaagcaagattcttgcagagcttcggctcaccttgtcggaaggaaagaagaggtatttgctcgacttcattggtggaaagcgaggcacgactgccgtctctccagatcacttcgtttcccagctccaagccatggaagaacaggctttgaatccgatccaaagcgaaagtctgcgaggcccaccaattcctggagagcgagtgtaa

SEQ ID NO: 220 - DNA, 3774 bp, Toxoplasma gondii
  source 1..3774: mol_type = genomic DNA
atggtgtctctttgccttccttccccacttctggggttacaggggccgtgcccctccagaaaaaagccgactcgttcaaacgggaaactacagtcacaaccttgtgctcgctggaagccagtggacttaaccaccccacagtcacggcttctttgtcactcgttgccgactgttcccagttccatctctccatctcagtcttcagcttcttccaggctctccgttaatccttcttgccttgctttttctcctgccgtttgttttctcgatgcgaaccgccgggcttcgtggtccccctgtttcagtctcaaatgttcctttagaaactccagacgacccttcctctgtatggcgctttgtatcgtgcatctctggctcttttccgccctctccttcagagaaatcgtttatgtctcggactccgctcaccacaacaaagcaaatcctacctgtcttagcagctggtcactcgctgctccagtagacgctcgccaaccagtgaatgcagctctgacaaaggaggcgcaaattgacttgtacgaaccacgaaacaccctcggaggattgggaaaaagtggcagaggcagcggcttttcactgaagacgggagatgccttcaaggacgtcgctcctgatgacagtggtgtggcactcctatcgcacgagtctcagcagtccagtgctgctcacgagctgaatatgcaccacgacattcagcctgatccctcgtctactgaattctcgaacggcaggtctgccccagtctcatttcttctatcacgggccttccatttatcaaggcagccaggccacctgtcgctgcacgactctttgagccgcctctctctttttccttcaaaaggttcttccatctcgttttcttctatgtcgtctccgtctttgtctgctctgccctcatcttcggctgactctcctctgtcgtccggactgactccacctctcagtttgtcgactgaatctgtccctgccgctgaggaatctccttcctcgggtgcctcttcttcttcgtcgccttgcgaattctctccttcccgggatttcgccttcctggaggcagggcaggcgacttctggaaagaactcccttccacgagcgtgtgcctatgcgggctgtaaggcgggcttcttcacgccgcggccagcgaacgatccgaacacatgttacactctttccgagtgttctcagtgccgcgttcatccggaaagccacgccgatctctgcagccaagtagaagagagaaatggcctgctgctgctgatgaaatcgtcgctaggtctgatgccaaacccaacaatgcctttccgctacaagcctctcagtgctaaagacatagctcgccttcgcgattccaagggcaaagggtcagcgggaggaggcggggacggtgctgagggggagtacgatgacgcaggcggcgaagagtatggagaggacggcgcgtcaggcgaaggagagggagcggatgactgggaaggatccgatgaaggctttctccaactgcacagcctggaaacccgcacgaagggggagtctgaaccgacgggaaacgctcgaggctcgagtcaacctctcaggagacaaggacgattgccgtcatcagtgagtggcactgaggagatattccatccttctgattttcgacttgccagcttcctcgaacaggctcaagaggtgcggcatggtcagagaactgctggcgagacagctaccggtttcgccgcctccttgtctccattgcccttttcatcggcttctggtgcctccttcgatctttctgtgtcctccgctccatctcactcgcagtctcccttttcgtttctcggcgagaaggtgtcttcctgggacaacgagtacggagatcaaggagacgactacgggtttggcgaccaagcgtcgatgttgggagagtacgacgacaatgaggggtcagacgaagactacgacgaaggcggggagcagccacggggcgcgacaggcgccaaatcaggaaaggctgttttcttgaagtttgatgagacacgcgtttaccgtattgttcccaactccctcttgggtgacgtcggccgctgcgcaaccgactcgaagaactacatgcgtctgcaaatcactgtggctctccagccgcggcgattccgcatgagtgtggcgaaagccaagaagctcatgggcttgagggcccggaagcccatcccaaggagctttcacgaaggagacgagggggaagacggcggttatgacgatgcagacggcggttatgacgacgaacagggcttccttgagctagagaatgaaagacgagaagggcgccctgtccaaggggatggaaccggagagctaggtaccgagagccgcgaacaggaaggcaactggcacgaactatctggccttacagagggacgggacacttcggaagacgcaagagaacgtcaacgaggcaaagatcgaggcgaaaacggacggcacacgggcgtcgtctctctcagcgacactgccgcagaacttggctacgaagggaaaagtgaacccgatctacaggacggtcgagagcaggacctgaaatttcgtttctcctcgactcgagtggcagatctcgaaggggaggcgaatcaaccgttgtctttcgtgcaggttgaagacgacgactatggcgatgatgaagacgatgatggcgaaggcagaggtcttggaaagaaaatgaagggcttctttgggggcgtgaagagggtgttttcgcgcaagaaacacggtgaagatgacgacgaagaagggggatacgacgacgacaacccgcctgacgatgagggggaggcatcgccttcaaagaagggtaaaagacgaggtagtttcatgaacaaagtgcgtggacttgtcagcagcaagagtccccaggagaagagattcaaaaaagaaacgaagaaagcgaggcgagggatcaaacgcgtttcgcgtgtggcggtagatatagcgttccactctcccgccgtcaaaaagtgtaggaagtctctctcttggtcagcaacttttccagccgccaaaattcttcaaaccagcttcttcattcttgcgagacagggagaggttggaggccaactttctgccttcatcaattcaggattcagcgtcactctgaaatgcaagatgaaaggcggctgcatgatgaacgaagtccccgtttcttgcgcgctggtctcgtgcgtgaaggcgaagcatgtctcgacggaggcgcttgaggagggcaagaagcgggcggctgctctggcagagcacaacctcaaattggcgcagacatcgctggtgatgagtccagcggaccgagctgctcgtgcggccgagtacgagcgcaagatccaagagaaacaacaggaaatcgaggcgggcaacctaacacagcagcaaatgctgactgcacaacagcagcagtttcttttgcagcaacagctcgcggcaatctcttcgtctcagagccccctcgatccgatgcaggcgaagctgcttgccgcggttcagggcggcgaagacgcttcgtcttcaacctcaggcgtgacaatgcaggaagcaagttctggtgtgacagacagccacacccagcgactgatacagcacatgatcgccttcgattcacggaggggcggaagagggtcgcgaatgagtggaggcgcgattgctgccttggtgattctaggcctgctcggaatcctggtggggggcatagcggttttcaagtaccgcggcggaaggcgccggcgacgatga

SEQ ID NO: 221 - DNA, 4473 bp, Toxoplasma gondii
  source 1..4473: mol_type = genomic DNA
atgaggatatttcatctcctcttacttggctgggccgtgtgcttggcgctcggtcttcgggtggacctcgccgccgccgagactgagacagacgggtttggcaggcgacgccgaaaaaaagaacaagagcactacggagataatatcgaaatgacgactcttcccacaaagaagggcggcacagctccagcggttccttcctcccctgcggaagcggcgaaatggcccttcaacagctcttgcatgtacagcgaggttgaaatttaccgcccggggataaaagagtatctgcatgcaagaacgtacgatcccctcgctcccatcgcgggcaaccagcaagaaaacctcaaggcccttcaggagctgctcactgctgatttcatgacgcaaggcgttgcaagtgttcttcttgccgtggaacaagtagctggatttgtagacttccagcaaccgcctttgtctgagggacgtctcttctgttcagaggccaaagacgagctctgccacagaatccgcgacgcactccggagtggacagccttgcaaggtcattgctcccgtactgaactgttcgcaattgaacaagaaggacatggaggcgtttctggaggccttcgaggctgaagctgcaattttgccgtcttctcctgacaacgagtgcgggaaggcctacgcagaggcggtctcgctctaccacttggtgattgtggacaccccactttcattctccgagacgcccatggaatctgaagaaatgaaagaaaaactcaatttgctctttgcggagaacacccggggaggacctacacccgcgaaggagggtgtcgtgtacgagacagttgatcttcaggctcctaacgattcaggcgatgcgccaggaaaaccggagcaggtcccaaaaccgtctcttttgtcgatcaactcttccatttggcctgctgatatctacgcgaactccgaggctgatagagaagcaagcatggtggaactcaagaaactgaaaaacagattcctcggaaagccactcggacctccagagacgacaaccctggaagcctttccttatgagcctgaagcgaccagaacgcttcactacagcgcagcgcgtcgactcttcttcattggagctcgaagtccacttgtggctctgctttacaacctccttttccaggcatggtatcgctgggatgagttgtttactggcgagggtgctgcgcgtccgttcccgaggatttccacgcttcttcgtgcagggtcccaggagagatactccagactcgatgccctctgcggagtggctctgaagaaggtgaagccccggccgaagacgccttcgactttgcccatccttccgcgagaaaaaatgttcagaaaaacgcgcgtcgtaggcgaagcaaagttctcctgtgacattctttaccgcgccgccaccgctctggacctcggtgaatctgcggccgtcgtggacttcaacgaacgcatggagtctctgaacgacgagaagaagaggcgcagtgtgcttcttgaacacaacgcgagcggttctgcaaacttcaggcgtgtttgcctctcctttcgcaagagcgtggacggcgtaacggagctaaccgacctcctctcgtgctccttctccgacactgttctcccttccgctctgagcgcctccacgtcctctgcgttgccgccgaaccttcgagaagtttcagagttcgactccgtcgttctcctcgaaacaaaggctgcggcggccccggcggtcgatgagtctgaggacgaagactctccccaggagcaagaagacagggcacgacggaacttcaattggctcaggctccgagccgcgccgcatctggaggcgggtctcttaggcgacgtcctgagcctcgactacggcacttggtggatttctctcttgttcgtggatgagcggagcttgggcgaggtggaggcgaagaggaagaagctgaaagcgacttgcgcgaaggcggccaagagcaagaagtcgaccgctgacgacggcgtctgcactgccacttggaacaaaagatggtgggataagaactgctcgaagaacctgacccgcttcctatgcactcctgtcctcgacgttctcgctctcgacggccaactcacctttgtgacctctcgagctctaaaggctcttgcggcaaacgacttgcaagtgaagaaacctggacaaagtgctaagggtcgtccattcgcctctctggctggcagccgggccacacagaagatgctctttgcgaggaacgcgtatgcccccgcgattttcggcgctcttcagttcttctccacgtccaccatggccaacgcagagctgcttggaggcctcgatcatccgggcatctgggacatcaacttcgcctcttctctcttcactggaaaaggaaagagaggctggctcttcagtcgcttaacaggttctctcttgaggagactcggaactcgactcgcggaaaaggcgtaccaaccgtacatgatgcagctcctgcatcagaaactgcgcccggagacacgcaagaagatgtttcaggcgatccaggtcatcgtccaccctctcgccttgaagcacctcaaccagatggcacctctctacagcgacagcaaaggaaacctcaacaaagaaggcggctttgccgaagaaatcgacaacactttgagggaatggtccgaatacggcatgaacgaaaaactcatcgatcgcctggagaagggtcagaatctgagtgcatcggactttgcgggagtaaacattttaaccatgcccattccgagccgcgagcggatggactcgctggtcgcggagcgtctcaacggagcgttgaaacgccttcaggagaatccggagaacgtcgaaacttcgcgcgcagcttgcgacttcctcagtcacgcgtcgaactccatttacgttaccaacgactctcgctacttgctgaacaagttcggccctgagaacctcctctttttggggaagatcgtgaagcgcagtgagacgcttgagaagccgcaaggctttttcgccagatcctgggctggagtagagaaaacgctcaaggggatcttgcgcctgccgccctacatggtcagacattttgtctttgcagctgtgaaagtccgagaggacttggtcagcgaagtcgtgagggaaatggcggccatctacaatcgattctcaaacttcttcaaggacgaaatcgcttttcggaaagccgtctcggaactcagcatcgcctacgaggatttgctccgccaacgtattcgagagccattcgctgtccccacgcactcgctcctggacaacattcatccggactacgcacaaatggacggtcagagtcggaaccaagagttccaggcctcggcgttgtcgcacattttctcgcaggcttggtcgctctttttctcggtttcgatgaacaactacatcaacccggagccgcttgccaagatcgaggccgagtactcaaccgacgcgtggaagaaatccgtcgacgaccacctcgcagtcaactcgttccgcatgattttcatgggcagcgacatgccgctgaaactctacgaccaactgattccaaacgaacagaagcgcatgctgaagcgtgccaagttcggtgtttccaccatgtttgcctaccagactctcttaacggggcgactctacgaggcgcagaacctcccgaacctcggcatgttcctccaagctcaagggccgtacttcggacctatgattgtccggtggcaacaacgaaggcgcacagacagactcatcgaaatcgtctcctggctcaccctgggagccttctgcttcgcggcggtcggagcagctatgcagcagacaacgcaagtcgttgagcagatcgtccagaatcagagcagcttggcgcccgagttgagtggctgcccgcccatgggcatttgcatggacgggacgatcggagatcccatcgcctcccctccggcgaccgccgccagtgctgttttccagtctattgcgctcgtgggtgtcggtatgatgttagggcctgcggtggcaatctggaaaatcgctgtttctcacttcaaggttcttgcacggtttgaaatggcaataggcaacgcgttccggcgtatggggcagtggttccgcaagaagtggagaggtcgttggttcgcgaacaagcagaatgcagaaattgaaaaggaaatgcagagacacacgaaaaagatgaaggaagagcaaaagaagatgatcgaccgcaaagctcccaacctcattgaccaggcggtgcccgctactgcccccgagctcgatttggttcctgatgggcctgaacccgtgcttggagcttcgacctctggatcgggaggaggcttctttgagattgcctccgcttacagacggaggccgcgcttcgacagactggcaagcatcaggagacacgatgcgctgcttgctcgtttcgataaactgtag

SEQ ID NO: 222 - DNA, 474 bp, Toxoplasma gondii
  source 1..474: mol_type = genomic DNA
atggacttggaggcactctcgagtgtcagtccgcctagaggcatcgtggaggaccattcccagatttctgttgagcgagtcaactgcgtcgctgaactcgtgatagatgcgaagcgtgggggtcgtgagcgtgaagcagtcgagcaagtgccacccccagcggagagacaggccggaggttgcgatggagggcaagttcagatggtccaacagaagcacccaggaggccttaagttcctctacatatcagacttgctatgcacttacggcgagtggcaagatttttctgacacgacatcccagcggacggtgcccgattgctcgggtgctttcgaacagaacggccacgaccgtcacgaagaacccatggaccttcgaatgagtcctttgtattacagcgacggggatcctggaaaggccatgagctggcaagtattgactcggaaaccgggtactgaaaacgatgtcaattag

SEQ ID NO: 223 - DNA, 585 bp, Toxoplasma gondii
  source 1..585: mol_type = genomic DNA
atgaacttttttatgtcgactgacgggagtgtatccttgggtgcatttggggccgtgaagaaggacggattcaggggggtgttggctacccacgaggaatttgcaccaccagatgtttttgtagtcctttcagaggtcatgttaacgtgtgcacctgatgcttggggtctgggagcgactgctttttggacatggtggaacaaggcgccggagaccggcgacactgtcggacatagtatacttcccctttttaaaacaagcgaggatgggccacaaccggttcagttcctcgttcaccagtttcttaaacgtttcgccagggaccgcccgctcgcactgcaagccttaggactacttagtaacaagcgatggcagaagagctgtccactgctttgccgctctaccgtgatggtggaacgtcaacaagaagagacggtgttgccaccacggggaacttctcaaggtgtcgaaggcataggcggcaaagggtgtgacggtttagtatccagaggagccaccggcatgccacttgaattctatgatgtcttcgatgccgaagcaaacgcgtcttgggagatgaattga

SEQ ID NO: 224 - DNA, 1896 bp, Toxoplasma gondii
  source 1..1896: mol_type = genomic DNA
atgcatgatcccgacttcaaagtacccttgaacgtcgttgtgtccatctacagacgtggctcgatcaaatgcgttcctgtttctagtctcctgccaataacccttccaggctgtacgagtgaaaaacacgcatacctcgcagcttacttcctccccaaattccttaatatcacatcagccgagcagccacccgccgccgctcgaatgcaactaccagcggggagctatatcctgtttggatggagcgtcaggcaacgtggttgtacgaagatgaaaaatactctgttgtcacctgttggtttctttaccgctctcgctgtacttatagaatgccacctgtgtgaccggtgtgttgctcatcatggcagcagcactgatggatcaggcctacggccccctcaagaggtcgactcggcaccacgaacgccgtcgatcgctgttaaagagcttgccacgtttcctggagatgacattcagacgtcatctcaagaattgcccggctatgaactttggaccagggaacaatcaggggcatctgtgcgtgttgggtttccgcagaacgccgaaagttttctgacacaaagagaagcgagagacgaaatcgcgaatgctcacgagctcgtcgctgtaactccagaaggcgatgcgtggaatcacagtggtgttgtccccgaggagcagactgtcacgcctgcttcaggtagcttcattcagaggcaagccgcgcatgcaccgccttcgactcgattgacgcccgtggaccgccgtggcaggtcacacacagtgtcagctgtcagacggcgggtgaccgtggaagacgttatgcgaccggaccaatcggcagccatgcatgcagtgttgtcagcatttggaggaggcctggttctgaaggctaagaacaaatggggtagaacacgttacacgctacagggacccgcaacattcttaggaatgggagccgagggcattgttgtacgtctaaatcaggtgaaaagcgaccgggaaagatcggtgacaccggtggcagtcaagctgtgcctcattcgtgcagcagtgttctcggggctgacatggtggagaaaacgaaggaccagaacagaactaatgaaactgtttctgtcgaacgagaattctgtgaagcgtgctctaccagatttggacccggccgaaatgctagagcacggtctcgtcgttccacatcatgctgagcttgtttccggtatgcccacgtggtttgccgcgggcgactcattttttgtattacccgttgtttctgtgtctcctctttttacttgcgacctcgaaacggtcgtgcaaaacccgttgacctttttgggcgaagatgtacattacccgccagttgctaaagagtattgcgtggatgcatcaaaaggcatttctcataatgacttgaagcttgagaatgtcctgctcagtgcagacggaagggttgccatcggcgattttgtttttcaagcccccttcggggcttcgttgcccatcaggggcactcatctatacatggaccccgacagctcagaagcattttttgaacaacgagagaacgaaatcactccccacagagatgcatgggcgactggagtccttcttttctatctgtggtgtggcgtgtttccattcgggttacagaatgtcgctaacgcgagtccgccacaggtgatgagggtcacagtcatgcatgcaaggactaccaggccgccgcccaacttccggctgtgtcggcgcatcccgcgtgaggttcggaacctcgttaccggatttctgcagtggaacgaggaagctcggcgtcttcccagcgatgttgccgacgcgttccttgccgctacggacgacggtggtagagaggcgcgtcggataagaacgcatcaattttga

SEQ ID NO: 225 - DNA, 396 bp, Toxoplasma gondii
  source 1..396: mol_type = genomic DNA
atgacgctcaagatccgtatgatttgtctcgccgccgtcggggtgctgattgggggagtcgcaataacaacagttttcaagccagtaagcccggagtgtaccgtgcattctttcagcataggccttatatctgccgacgcacttcggataagggcttcacactcaagttccaaaggtgaagaaggtgacggggaaaagcacaaagacaagagctctgaagaaggcgcaggcgaccgtgacagggaggaggaaagagatggagaaggagaaggaagtgaaaaaggacctcagccttccccgtcagggaagccgctgcagcggcgggacgctggttattggaaaaaaaactcggatagtggcaagcatgaacgtgtgaaaggtcgaaaaagaaagtag

SEQ ID NO: 226 - DNA, 1092 bp, Toxoplasma gondii
  source 1..1092: mol_type = genomic DNA
atgtgttgcatgctggtgggcctcaaacactgggagtactgcttatccttgggcagcgctgctgtctggtatgctattgtctcgttttgttgcgcagtgtggcaactcgccgcagttttcgtacacgtagatttttctggagacattacggagcccatagttcgtgatgatgatggaacaagacaggtcgttttggggttgatgtccatcagccacgccggagctgccgctctgaacttcgccgtcgttctgcttaccggtttagctgtcggcctgcgatctccaaagttgtgtcgtctgtcatctactgtaatcttgactcaaggaatctacaattctctatttctcgtcggcgtctggagcattttcgattgttcccaacacggagcgaagacacacagtgcgggtctgcatcctgacgcttggttcggagcgttactggcatggcctgctgctgttattctcgcatctttggctactgttcaaagtgccggcaactcgggctttgaaggccgacaaaggattgcgtctcccagattgcataagccagatgacggacacgtttctgacgcgtgggcgagggtcggcacgtggaccgtgggcttgactctaggtcaaggcgtgcttctgttaagcggtgtgtgttttctgatggctgctaaaactcttcgcagcttctggaacctacacttcgttgagagctacgaggcacaacaaattggatgggcgttcatgctggaaggcttgattctctgttgtttggccgctacggcgttcgtcggcacagtgctgacatctaccttctcgctacttgtcgctcttttctgctgtattgggcttggaccaattgcgacaatagtggcagtttggtggaacgtgcttctgtacaggtggaaagtggaaccgggcgttttcgttggcatgcaattcagtatcattgagcaatacgtctgcgttttctgctgctgggctgcatgtcggacgctgaccgggttcattgccgcaaaaacaaagggtcgatttggcattgatatcccaaaggatgacagtccggaatctgaagcccttgtgccttctgcaagtccggcttaa

SEQ ID NO: 227 - DNA, 345 bp, Toxoplasma gondii
  source 1..345: mol_type = genomic DNA
atgtgggtggatgggattcatctttcattattggcggttggaatgcctacacccgtgcgctttcgatcaatgtgttcttccccacacagttgctgtttcgtcgaaaattccgagcaaagggagattcagagtttgttctcaggtcaccagctactcctcctgggttcgtgtttctgtgacgctgccgagagtaccgtcgctggccggcggtcgtaccaaagacatactacgcgacctggatgggtgaccggcgctgttcagcagacctcaaacggatggagactggatgtgtctcggcagcagatgccacagtggaagcgtggacacatccgaggacgtccctaa

SEQ ID NO: 228 - DNA, 702 bp, Toxoplasma gondii
  source 1..702: mol_type = genomic DNA
atggcggtgcaaacggcggtggacgacccggaggctccggctgaggatcagccgctgctcggaggttctctgaaaaagccttccacgtatcgtcagtgttgttgctgtgctcttggcacagctgtgactctctgggcagtgtttttgattgctttttctgtgtttctcgtgctggatttcaacatccggggagcggccttcacctcaggagctgtcctggggctagtcacagcgacgctgctgctctgtgcagcgggacaacaaaacgcatttatcgcgttcgtttctttctaccttcagattatggtctaccttctgtgggcacttcagatggctcttgcggcggtttctctatggaaggtcacgcacagttctgcctctgtagcggggagagaagacttccctcgtgtaacgctgagtcagtacgcggtcatgacggatacggtatctgaccaaagtggaaccagacccgtacaggtttatcggcaagtggaagtttcgtttgctttgtacgaggcaacgttatgtgcattctacgcagtgcagttgcttcttgcccacttcgtcttgagtatgctctggagtttctaccgggttctgcaagctggaggcacgggtttcgagaagcgaacggcagaagaaatcgaagaagatgccctctcagcccagttcccgtcttttgcagaagatactccgcggtga

SEQ ID NO: 229 - DNA, 1440 bp, Toxoplasma gondii
  source 1..1440: mol_type = genomic DNA
atggcaacggtaccaatggtctcgctgtcggctgcccgtttcacgctttctttcttgttttttcagctgtgtctttcgcggctgttccggcccgaaggaagaaatgagttggaaggaccgaaagatgtagacgcagacgtgatcagagcgcttgacctggcaagcgtttttgcgtttgcagaggcggtcaacaacccaccgccactcgagggagcctctgtgtcgcctgaaaatgccaccgacccaccagaaacgggcggttctcgtcgttggcggacagcccgttacgtcttgcgacgtcctttcacgcacatacgccgcgtgtcctctgcagttcgccgctatatcagccgcggcacgagctcattggcgtcgagttttgcgtggaaaaggcgtttgaggaaacttatccgcgggatggcaaaggacctcaagcaaaacagggtgcgcgacgcacaacaaaagccaggaagcgacgcggtagcctcgttcgtcaagactcctcacgctcttctgacgtctctggggactcccccagcagaactggccaacgccgtaggtttgttgttgccggttcagcatcctgtgccaatgaaatcgaaagtgacggggaaaagcctgcttgtgagtcatgcggcaactgtgggcgtctcgtcgtacggaagcgttctgctgaggtgcgagggttccggcgaatcggcgagctacttcctggaagctttcccggttttgagaggatccagggaagcgagcgtgagcgtcagaaaacagtacttggctgcaataaaggaactcagagctgcgtcgggagtcgcgcaagtcggtgttgtggtagacctgttgttgctgaagcgcgttcgcaacacctggtgcccgcggcctcacgaatctcactttgcgtttccgaatgtctttctcaagcgggctgtcgagggagaaactctcagagaggttttgttgcacattgcaagtaccgctgcgacggacacaccggggacgggacccgcccacgacgcgcgagtctcgctgacggaacaagtgcacaaattagcgaggagtgccgcagagctcggctccagaggcggaaaaatcaacatcgacactttttttgtcactcttgacgggatcgttcacctccagcctgtctctcttgtagaatcgccgccggtgcatcggggatcagctggcctagaatctcctatcgcggcagaactcgaggaaggcgaagagaaaccatcgccagaaaagcgcatgactgacgacttggctcttgccatcgttctggcacagatctggtgtccgcaacggagattcgacgacgtcgcctacgaactgttgctgcttcaccgattcgagagggaagtcacagaagagttctttgaacgctgcgccgacccgccagaggctgtccaggtcctggtcacaatgctggctttctga

SEQ ID NO: 230 - DNA, 681 bp, Toxoplasma gondii
  source 1..681: mol_type = genomic DNA
atggacttgtggggaagagacatcagcagagtggaggctttgaaagacgagattttcagtctccttcagcagcgagagaaacagagaggtcccggaggaagcgccagcagctccggccgctcctctgccttgctcagaggcaaattttatcaattctgtcaggatgtggagcacctggagagagttatgaaggcttccgaagccgagcggtcgagcgatatgtcttctgcagactggcgtcgcaggcgcgaacaaatgtctcgcctcctcgccgaaaaatctgagcttcaactctccttttctcgcgcgttctcttcgaccgaagacgacctctgcggcttgccggagtccggcgcggtttgggtggacgtttcgggaggcgctcgcgcactgaaaacgcgcgaggaaaacattatcgcggagcaggacgaacaactctgtttcctcgctgggaccgtgagcaatctgaagagcattggacatgcagtcggcgacgaagtggatgtacaccggaagctgttggacgatttggacgtggacgtcgtccgagcgcagacgcgtctcgagaagaacaaagaactgctcaagaaaatcgtcgacagacagtccactgcatgcctcctcttcactgcgctcgcgcttctggtcgtcctcatcttcctcgtcgtggcgaccgcgtaa

SEQ ID NO: 231 - DNA, 2472 bp, Toxoplasma gondii
  source 1..2472: mol_type = genomic DNA
atgtcggcacatactgaaaccatgactctaggaattccattgtcccctacgggggaactcgtcgacgcagtgccgcacgcaactgcggctaccgagcacctgcacgagcatgcgattgtgatgatcattgccagcatttccttcatctatctcctctcggcagttcttgctggtcttgttggccttcttccgaaattcagacccccgatcacggttgttctgtttctggctggcatgtctttgcagccgctcttggaatggatgcaaaaccgtgtgcttcttcaaggcatacgactcatcggcaacgtcgatccatacctcatcttcttcgcgctccttcccatgtgcctttacgaaagttccgctttcgtcaattaccatatgttcaagcaggttctgccctcaagtctccttcttgcaatcccaggggttgcagtgaacatcgggctcgtcggagttttccttcgatacggagtttcgcgcgtctacgattggccggcagccctgatgactgcatctattgtctcagccacagatcctgtcgcagtcattgcgtgtctccgtgccctcggcgcccctgaaaagctttcttccctcatagacggggagtcgcttttgaatgatggatcggctgtcgtcttcttcgaggtcttccgctctatcgtgattgggacatacacaggagtcggctcttccgtcgttctcttcagtcaactctcgttcggggccttggggtacggtctagcagtagccatcgttctttacctctggctcttgacagtccgcgaattcgagattgttcaagtgactggaacaattgcggccgtcttcacggtcttcttcacagcggaccacttcctccacgtcagcggtgtcctggcggttgtcactctcgggatttttatggcggccaagggctcgacagctctccagaggtccattcagaaactccaccatgagtctgtcgagcttctttccacgctttcggtccaagccattttcgtctgtggtggagtcattgcatctcggcttctaattcagtacgcggacacctggcaagagtgggtcgagctactcctgctcttcgccgtgctgcaaactgcacgcttcgctgtcgtcttcggttcatggcccttcatcacatggatggggctgcccctcagctggaaggagtgtttcatcatctcgtacggtggccttcgcggcgtcatctgtctcgccttaggcctggttgtcgaggcagatcctctcatctccccaacgctgcgggagcacgtcggaatctgcgtggcaggcactgtgatctttacgcttctcataaatggaacgacagcagagctggcgtacacgcgtctgcggctgtaccccatctccaagtatcgccgagagtatctggattcggtgttggcctccattgatgtctcgttcaaccgcaagaaaaacgaactgaaggactactggctgttcagaggaacagacgtggttcaagcggcgaacgaggcgcttccgcagttttccaagggtcacctggatgtgaatggaaacctacatattcctaccaagtcgttcagagaagttcttcgaaaccctccgtcgtgcgagaactggaatgtccaagctcaagtgacgggattggcaaagctggaatcgagagattttggtgtgccatcacaactcggcgactggactcatggacttgtctcgacgatcaagaacgtgaagcagctgaccagccgccagcagcgtagcccagagtctagggatgaccagcacaaccctgaggaagtcacgttggtggataaggaggcagggcagctcgagaaggaagtccacgtcctccacatcatgttcagtgcgatgagagaattttactcaggcatgtacaagcggtcaaacattggcggaacagcatgcttgcttctcacgtcgactgttgacaaatgccactctcatctcgacgctcagcttcacgatatgactacgaataaaaagtcccggaagaacgcgaataacacaaatgtcttttccttcgaatgggaagttctcctggcttcccttagaacgcgttacggcttgtggaagtgtctcaacgcgatgccttgcgacgcattcgacctcctcaagtcctacctgatctccattatcgagacgctttacgctgtggtcgaggcccacgagttcgtgaatcagtctaaccggaaagaaatggaagagctcatcagtcaggcgacgctgatgccttcggacgacgttgtcacatccgcgaaagaactgctggagaaattgaggaacactttcccagtcgccttctcacagtgtcttgttattatcgccgcacatatgcttctcaacgcgaagcaaaaggtgctcgacgaagaaattgaacgaggcttggtcttcccggaagatgccgacaaactaaatgaggcccttattgaacaacgcatgatgcttgagcgaatcatccgatga

SEQ ID NO: 232 - DNA, 3903 bp, Toxoplasma gondii
  source 1..3903: mol_type = genomic DNA
atggctagacgcagaccatctgcgattgccacctgttttcgtatgattcttgcctttttcctttcgttcactttttcctctggtgcggactccctcctcgctccgagcactactcaggctcgtcggcttcaagcccgatcgggtgacaacgccctctcaaatggaggccgcttgccaaatggtgaacataatcaatttcgagctctccgtcggggagaccagaaggtggaaaaagacgcttttggggctgtaaatgccgaacagcgtacggctgtttcggggagcaagtttgaacgggaaaagtggaccccgattagttttacagagaaaggtctcttcgacgtgatcaatccgaccatcgctggtgatgaaaaagatgagctgaactggagcacgcatcaaaggatagaaggtagagggacagagccaaccaggtcagattcacagcagcgggatcaggcaaaacccagagctttggagagaagggaagaggcaggacagcctccaagggacgaacatcaggacactgatgttgaacaggccccgttgatcaaggaagatgaaagtgacagtccatcggtcgaagagccccgggcacaacccccagaaaataaggaggatgccatcacgaaaccatgggatgcagactggaatccatggaagttcctggatgaaaatccgctgcccatatatcgagacgactgggatgaagaagaagacaacagagatgacgcagaccacgaccctgggtttgcagagccaccgaacagccctcctgcaggcggtgtgccgaaaagggaagatgacaatgcacccgattatccgggagatgatactgcatcctctccaccgtatgatatgcgaccaaatccggaagatcatagtcgaactcagccaggagagtatggcggaggagtggatgatgagggtgaactgccagatgaagatactgcgaaaggcatgccaaggtcttcgacgccacctcctaatgaagagtcgatccctgctgttcccaccgagtcggagtggtccgggtcaggcgtttacgaaggcatcgcgatcactgtgaatgcgcgttggattgacacgcgcacaatcggagagggcggaattcaacttcagcatcagccgacagtttttcctgcgcctccagttcttcggaaggtgggtttaaaaagcaagtggaaacacaccatcaagattttcgtgcgtacaacgggggcaaagttcgttccggcacgtcgacaggttttcgtccctctggatgagacgccgacttcgagttcgactcttctcccctggtgggccaactggagtatctcagcggtcaaggcagcctcggcgaccaccagttcagtggcagcctttctctttggaaccggtagagctgtggacggcggagaagggatatccgaagggaaaggtcccaccataacctctatcaaaaacatgctgaaacagtacaaacggttcaaacgaaaacatcctggaaagcctggtgaacttgttatcgacttgtgcaaagatgaggaagacgcaagctctgccgctcgtacaccttcaccttcctccgcctcagagtcttcctccgacggtggcgtatgggagtcccttgaatctcccgcacctgctcctatgccttctttgacttcttcgtctccgtctgggtcgtctccatttgttgtgaagcagagcccagagggcgatttaaagacagaatctgaagggcctgctcgattgacgacgccttcagagaagcgacctgcaaaagcaaagcctcagaacacgaaaaagaagaccaagagaagaaaaaggacggttgccaacgcgtacaatattcttcaaactcaagaggggcttgcgttggtcaacaaaatccgcgacacaatggccgaaatttttagtagcccctccacgtctgttcaggtcctcacaagcacgggacacttggtgataactcttccatcagagggcgtggaccgatacaaactgaagggtttcctacaaactgtccaggagacgtttggagacaacatccaacaatggtcattctccgaaatagttcaactccggagtgaagttcccgaaccccacatcccgccgcgtgcccagatggctgccaagatggaatcgctgagtgggaaaagcaccaaaacgtcgaaaaaactaaatggtcggagtttgcccgcctccatgagtgagacgaccagcaagaaaaccccgtttgaggcaagtatgccgactgattctgctctggaatcaaagctttatgggatgcacatgatcacggcaacacatgcttggatccatggagaagccggtgacggcacggtggtcgccgtcgttgattccggtatcagccgccaccatgatttggattgcaatttgtggcaaaatccacacgaacaacaggatggtcgagacgatgacggcaatggtctgatagacgacaaccatggctatgacttccaagaaaacaagtctgaacctgaagatgagaatggccatggtacccatgttgcaggaattattggcgcgtgtgtaaatggaggaggcgttgttggcggggcaccaaagacacaactcatggctcttcgattcatcgacaaaggcggtcagggatctatggcaaacagtattcgcgccctgaactatgctattgatcacgaagttcaagttatcaacaatagctggggaggtccccagtcgacgactgtgttgcggagactagttcatatgagtgcggtcgcccgcaacggaaaaggcatccttcttatcaatgctgcaggcaacgaatcttccaacaatgatgttaacccgtcgtatcctgccaactgggatcaagataataccatcagtgtggcagcaattgacatcaatggcgatttagcagacttcagcaactacggcaaatcgtccgtggacatggcagcccctggtgtcaaaatatactcgaccaaaccgggtggtgactaccagcatatgtctggaacgtccatggcgacaccgcacgtctcagccgtcgctgctctagtattcggtgcctttctccgtaatggatacgatgcacccgctgcagaagtgaaagacatcattcggatcaccgcttctccggtcgagcagctccagggtgtgacgagatggggttcaatacctcatgctcgagatgctgttcttatggccagaatgggagggatgtttttacaagcaaagtgcgaagatatggttttcgagctggacgctggctctgctcacgtcgtcgacctccacttgatgccatatcgacagggcaactacacggcggacttaacattcgatgtcttcaccgaagatggctaccgtttggaccaaattaaagttcctgtgaaacttgctatctccgcggagccacgccaaggcaattcggactcacttgcggcggcggcattctcgagtgttgtgtcgacattcgcggctcaccccactgaagggtttgaagagctgtgtcgtttacaggcgaaaatccacgttgttcaggaaatgtccacggccatgattgtaatcatctgcctcggagtgatcgccgccatctcggttctcgttcttgtctactgctgttctagaaacgggcaacggaggtctgatgcggcaaagagaaggcgcgagtctgtccgagattcggccggagaagaaaggagaaaccaacttacagaaacgcatcgggcgcggaaacatgcagatacaagcgcagaggcaaataaagaatttctgaactgttcatcgagagcggaggatgacgcaaacgaccggagcgagacgcacacaaatcccaccgaccctttgtgccggaaagaacatgtatttctaccggcaacaaccctcgaacagttcgcgttatcgacgcccaacgagaatgagtcgtag

SEQ ID NO: 233 - DNA, 732 bp, Toxoplasma gondii
  source 1..732: mol_type = genomic DNA
atggcgcaatacaagtcacgccctttggcagctgttctgctgctcattaccgtcggatcgctgctgaccgcttccgaatcggtccagctttctgaaggcatgaagaggctcagcatgagaggaagaagtcccagcccgaaaacgggaagatttgagagtggagacgaagggacatctacaatgtcgccctccgtcgcagcacgccaacaggaactagggctgctccgtccggaagagaggctcattgcgggtcaagccaaagcagcggcgctacagactgtccatcaattaggagcagttgttcttaccccagagcaagctaaagccgcattgctagacgaaattctcagagccacgcaaaatttggacctcaagaagtacgagaatctcaacacggagcaacaaaaggcctatgaacaagtccagaaggatctttcgctactgagtccggaaacgaaggctttgctcattgaaaatcataggaaggagaaatccctacttgaacaggcgaaaaggctgttccgaaaacgccactaccacgttaccaggcaggcggctttggctggacaaatcctcaacgagcagagggatgcgagtggagcattacaatcaggtgctgtgaaggctgcgatccgaaaagccaacgagcagtacaacgtcgctgaagaagacaagaactttaacgaggaacagcatgcagcacaactgaaaaaggtaggcgctatgccctag

SEQ ID NO: 234 - protein, 733 aa, Toxoplasma gondii
MEGMGSLRRRCAALPLVAGFLVFLGSIGVKADLPIHATVHDIKGDWTFYLSPAVPGDVSNCGSPSPNTNTSNLREELKDYKSFLSTQGGIKKELRVSLTDIPVSFATTRTAAALENPHRRTWKTLGVFDGQDKRKLVGSWTTVYDEGFEVDVGGRMRLMGFMKYNPQNNCSIVDGDLENSQGITDCYATDPTRTQIGWYIQQAEDGSRLSGCFYAEKPKAASSTPAAFVAIKETTRVEPASGALIGTDLKDSTSYISQSFVDTHNASPASSWRAGVNSVFANMNRRDLSRFVKDFGFKKMRPAGDSADGLSFMQSSTDISTADGDAASTQVYACPCKKGERSLDTRKLDESEQTLEVLSPVSALEVGHTNFLAAINPHVHESTATNGLDAQGTQAVAKAALSGAGATNTQEPLLLPKDFSWSDPFSNQAFDETVTNQGSCGSCYAVAATYALQKRFEIAASRMLGQEIRLFSAVQDEADGALSFLDLGSTSQLGELSAQSILSCSFYNQGCDGGFPYLVGKHARDIGVPQARCMEYQADHTQGCPFQKTASASESQSMLQADANAGACSEHARWYAKDYGYIGGCYECNHCSGEKQIMLEIYNNGPVPVAFDAPPSLFSYRSGVYDANSNHARVCDNDLPHHTGILTGWEYTNHAVTIVGWGETDGENGKPQKYWIVRNTWGPNWGVDGYVKIARGKNLGGIESQATFIDPDFSRGQGLKVAKAIEALKSKTM

SEQ ID NO: 235 - protein, 753 aa, Toxoplasma gondii
MSAAVEPRGRLSDGCCRRRLTPAAVLFLCRVLVLFWVNEAEPANGDLPAHCLVKHVLGEWEIQEGLWLPCQEEGNLTTDAARLHDPYCGYGIPDRVDAHGPMTPPNVSASFHALRTSRFTLFPDFRIEFEDGSSGLWTLVYDEGLHFEVSTPQNRRFFAFFKYQLAPDGQNRAWSYCHTTLVGWWERPAAPNLSLQDVEKAPPVYDIPEPIAPDTAADALLKSVKRGCWWGRKVGEDLSVPTNEVPKERRTPLEVPLWPTSRPPDVRTVAAVVRKNLAADAPWEPLDEEYVEIRGRKLRTMEEVWAHAGHQPLLISRQNIESTHLTLSVRPPLHLLAGIKPFGSPAGSDPPWRTVRDFDWANEDHVALRIGRRQSVIPDAPNQGGCGSCYAIATGTVLTSRLWIRYAANDDVFGKVNVSAFQGTSCNVYNQGCGGGYVFLALKFGQEHGFRTEDCVSEYHAMADKHKGSLSPNLQTCFDLGGQLGTSAFGCQAPPARASLPDSCNLSVKVTSWHYVGGVYGGCSEDDMLRTLWEHGPMAASIEPTIAFTVYKKGVFRAAYNSLVEQGDNWVWEKVDHAVVISGWGWAKHGDSWLPYWKVRNSWGTKWGEGGYARVLRGVNEMAIERVAVVGEVSLFRGGEHIPPLLARSLDSQGSSNASKDSERGETLVESVSPVFRGSASGSESGNPRDAATNESADMSESADADAESSSGSDDDEDGDMEKGDVESTTKQTTLFRPIQRHGEVLEEKRTGE

SEQ ID NO: 236 - protein, 894 aa, Toxoplasma gondii
MMLLYYRLSSEHAGSYRQCPLSCSALSLAEVKQLLAARCGLANEYGRKIDFRIFLAGSQVPGGAAEAEELTEIVDENQMIHAYSKVVLQRVAITYGGSGQSVLHKARSELSQEEWKTAEERKLSSRLKRLPPEWLCGLCHRVMTNPVLVRCATNCAQSACHACLEAHLGPNRICPFCNSPFRQAIRNKRLQEIIALANLSEFESAPGAACAVPQLQVQAYQAGDPASSAVAPGEGSRSTDLIRSACREGPSDASRLGSGESHSATGAGVADRVSGGNVCEDRETDDDVGADGSRGDSAGASDSFRSEADWVHFVYLVPQENLKLMRQYDMMVVESSSNLAVALVRKATQRGGSGNPDAAAELGEPAEGALRDGTGNSGPTTATGETEQQEQVRTTGSKNTDHEVFVVPLCSAGGGTSFSIAGFARINSARQVDPEADSAAATVVQQWQSSSGRASNLPGHGAGLAFGVYRISWDNKFNPMPMLPSRKQPLCSLLGAHRRQFHSNASGVPAVPGLLKREVFGGAGAGMIEAAVEAAKYEEVLACIKDYAQFGSRPAEPWQHPASQTSSAAAATPGLPKKGVPVGGIGQEGSRVPPPPPPPPGSVGESGFSLSSGNGVSVVEKRDVSSEGRGPSDGVSISFNARGASLPGSLGDERKALETGVFGIPVSLGPPSLGLRGDPGEPSNPYLGYCALLPLLTEEQFRHIRRLQKRAMVLCGYTQSPPESRKKRRRSGKKKRGKHSVSSHSTGSGTLPSDEPVDGCDRVREEAEKEGTGCMSADAPAVDTNTEALSIQNAATSVTRQPLSDPDSANATGSRVRAGRRALPRVPPVLKISRIGDKNDTDTTQNKDTGSMQSQRANSVIETCSVVEENTMAKIPGAEAKPEGVPDNGPCELP

SEQ ID NO: 237 - protein, 219 aa, Toxoplasma gondii
MAARAGSSGVSRRFLFVLFTVLAGSSFVSADDAFIDNVKKGVGEHIGGTPVDLVLNDLYPLIVKQGLGGVLGKIMYKVKGIMYYRLADGVADVVMSELEFYLFGEKGANQSSFKELRKLYEAYMRKFFAESPEDPVDALTTGVWKGLLQLFTEKLQDAFRGSPKGQKMADLLFDSNLTLVKSWTDAAHLQIMQLSSSSARANALRLLRAKQKKPLARKN

SEQ ID NO: 238 - protein, 190 aa, Toxoplasma gondii
MVRVSAIVGAAASVFVCLSAGAYAAEGGDNQSSAVSDRASLLGLLSGGTGQGLGIGESVELEMMGNTYRVERPTGNPDLLKIAIKTSDGSYSEVGNVNMEEVIDTMKSMQRDEEIFFRALNKGETVEEAIEDVAQAEGLNSEQTLQLEDAVSAVASVVQDEMNVIDDVQQLEKDKQQLKDDIGFLTGERE

SEQ ID NO: 239 - protein, 752 aa, Toxoplasma gondii
MSRRMASRSRLLFAAFCAGGVLLGAGPPAARQSAFTVASTVAGGETGYTSSLEVESPENVGVHEGDENSQHAHDEIPVEAAEGEEVGSSRLSSSNRSRTTHATSATRRGSRSRLLLPAALISALALSGLIGSSMMKETAEETGEPRAATPEKQADAKGAPPEEAKVVEQEGAQVAHPEGAQVAEEDSRSRQRRMQAAVLAAVLVAAVIYGVYDKASLTSPTTTSSESGTSFRHPELALEDSEADLGGQLEMALIDASHETPGGAPSEGMAGAVSSLIARVVDGVVQFLQDPASQRKSLGMAASAVALAFLAAGALRARQAAKALTHRPAPPPASKEQGESAQEALEELEPAPETQTEQVDQASMPLPPAPEDFDLPPMPLPEAPEDFDQAPMPLPEAAEVFDQAPMPLPEAPEVFDQAPMPLPEAPEVFDQPPMPLPEAAEVFDQAPMPLPEAPEDFDQAPEPLPEAAEEFDQAPKPVPEAAEEFDQPPEPLREAAEEFDQAPMPVPEAPEDFDQIPKPVPEAPEEFDQAPMPLPEAPEEFDQIPKPVPEAPEEFDQAPMPLPEAPEESEQAPEPLPEAPEESEQAPEPLPEAPEESEQAPEPLPEAPEESEQAPEPLPEAPEESEQAPEPLPEAPEELDQPPMPLPEAPEEFDQPPMPLPEAPEEFDQAPMPLPPAPEDFDQPAMPLPPAPEDFDQAPMPLPQAPEELEQAPASHPEEAEQEVPERKTDAGSEPEKDPETNLLEEEDELKP

SEQ ID NO: 240 - protein, 471 aa, Toxoplasma gondii
MSHRMASRSRLLFAAFCAGGVLLGAGPPAARQSAFTVASTVAGGETGYTSSSEVESPENVGGHEGGDSFQSAPNGVPVDGVEEDGRSTLISANRSRSTHAVSAARKGSRSRLLLPAALLSALALSGLIGSSMMKKTAEETDETKVASPATGTQQIQKKVAQPEDAKVAQPDDDQVARDALRARRRRQQAAVLMAALVAAAAYGMYSSLSGYEDAGSLSSPESASPELDTLIMQQGTQFAEQLEALHEMPVGAASEGSAEQSSLSHLLAEVVDALQQPSLQNILLGGASAAGLGLLGAAAARRRRRQAQPDTPAPPPASEEQVESAEEAPEKLDEALETHPEDTQKAAPFALLGAPEERESSPETHPAASEESEQAPMPLPPAPEELDQPPMPLPPAPEDFDQAPMPVPEAPEEFDQAPMPLPQAPEELEQAPASHPEEAEQEVPERKTDAGSEPEKDPETNLLEEEDELKP

SEQ ID NO: 241 - protein, 419 aa, Toxoplasma gondii
METGLKERGGSRHAPRLWRGPTRHLLSIRLAAFAGLTFLLAASRVSAEVGAFEGGIGDHVTMHLIGRSWEMHGGACFVGRPKNLVVDPVFGTYGRQPQVLETHKTGPRLCKWLDELFEQHQARRSEWERAHEAAKSQVSMFNAVRRFKNAVTVFPEFQVEIESNYLSLFHDDWYGNQLPWMAATVKYVEPKDGYGVFQHLNRVFAVPGVPQAQLVFFLLYPAPTFNQPVKLEKPGKGSIVSGFIGGTGLGASVSHMRRGDIGDLVDLGRVIYAAVKKNFTIQASLSDFWLNGGNCYMGSRFKVKGTIQGVTLCQFLAGEASKSVYGAYKAAKLKSVHLTVTGVDLFNRAQPELRCLVTEGLLLHDVHDFTVSLAVDTNPQLIQHFQRTTRLASMFRWVKLIGRFLVKIGSTFMKPSQKK

SEQ ID NO: 242 - protein, 436 aa, Toxoplasma gondii
MRAIVASTQQFLRPVGSRPLAGISIVVVVALAIALGTAADVGRHVGGFSGPFPMTLRSGQWRLDHGACFVGKAKNLVVDPLPRVSPQGPQPLDVTTTGSALCWWLDSMYAAHMSLKAAWERRHQEAKNRTSWLNLWRRFANWWASFPEFQIDVSVLYLDLWNDDFYGHPLPWFSAEFSYTPPSGRYAYNLFDKLQSHFASAPGTAVQEVFLLLAPAPTFNQPVEKRSSIVARAATVAAGNELFKEALGHQRVDEVLSMVPADPFRLMLSTSAFSFQAKIGDFWERGLDCMLGSRLNLRWDQVGTSVCRYMTAKASETGSGLAASFLNTVEVRVTGMDFFNHAAPVFKTEFIEGIITKRATYIPVSMYLSTDPTLTHEYEAAKTVKRAVQAGRVGAALARGLVNFARATNQKADESHEGQTKTPTSGVRGSAGSKHN

SEQ ID NO: 243 - protein, 408 aa, Toxoplasma gondii
MQAIARGDRSSGWSSCSWLFYFSFLLLTSEAVAAAASLEQTISYSVQHQPQQEGILGTQKPQTAPTPQQLIVPVSYLGDGLSYFSGVLRRLPLDVALERLTSAREIPTVAGFVQKYVLAAQLSRSLQSTANGVKKILMRLDAAKNEEGFITDLLKSAPEVQEVLSRFLGSVASALALLDINGLHEAVDASLPVTKAVVMLYLHLVSVVPPKQRDPFSPFLLYLQDAVGEFKIMEDHVASVVAGEAQEENVINSQPQGTETSHRAVVRGGIRMLQSGTSETTKLRRTWWRLFKVAALAVLTMALLKYGTPRVRAFLERRRMRRGGGGDSGDFGEEGRSKGDVSTSDDMPREPPPPYVPPMYPFAEPEHRWAGTYGTSHGGYRVQPTAPPAPASMLYPSLHRLGYQRPSE

SEQ ID NO: 244 - protein, 550 aa, Toxoplasma gondii
MVTTTTPTPPGAPAVVPIFDVVYQLNPHVFRSRFSRRNRARRVASSKSRSIIRWLGYLTVLAAVILLGAYAVRRVSRDLSDSVRETRRGRRITGSVPPGTTRPRSESCTGTQVDGGCGADTSTDGKSESEQTENGEDSRFSTRTPIHVTASTSPFATRKAAEERSSSPRDRKVPEGAQLPTSSTPHAQRKDSGSDSRNPSTLIPSPGTNTFNMNFYIIGAGSSALDFIFPHTPDAQATVVSPPRSAAAAPTVETVPRVRTYSTPTTLTLPTAPATATSNHMHASATPSPPERPQNFRGGLMRQNGMVEGTSLTTTEAGMPAPLQSPQHIETEARLTYSNHLKSPHTPETPTVHSIDPVVGTSGHSVAVGSQSPAGGPPTDSRTPAALTPTSSSFSHADSLETSEHPQSGPSLHPLISGIQDAVQSQLPLSQQETLPVVENATFFGPQQTPPWMDETAAAAIPLAPSQPGSRTQPISSPHTLLSRSGGVSAVPGPPRTENPRQPQVPGENSYYSVPTERTISDPGPQRAGAAQADGIGAGGPRDTQSAVTP

SEQ ID NO: 245 - protein, 185 aa, Toxoplasma gondii
MFAVKHCLLVVAVGALVNVSVRAAEFSGVVNQGPVDVPFSGKPLDERAVGGKGEHTPPLPDERQQEPEEPVSQRASRVAEQLFRKFLKFAENVGQHSEKAFKKAKVVAEKGFTAAKTHTVRGFKVAKEAAGRGMVTVGKKLANVESDRSTTTTQAPDSPNGLAETQAPVEPQQRAAHVPVPDFSQ

SEQ ID NO: 246 - protein, 220 aa, Toxoplasma gondii
MDRTICPFFIQSFTMSTALKRLIPFLVPFVVFLVAAALGGLAADQPGNHQALAEPVTGVGEAGVSPVNEAGESYSSATSGVQEATAPGAVLLEAIDAESDKVDNQAEGGERMKKVEEELSLLRRELYDRTDRPGLKRAVILSLGTSALIAGRMFSSTLRAAVPWYAVAFNAIVAAYYIRKVLTYRRRVMTKRQPFMSSVKNFFRRRPKDGGAGVDKASKK

SEQ ID NO: 247 - protein, 345 aa, Toxoplasma gondii
MQGTWFSLFVVVMVSHLAFGGECSFGSYLADMAGLTGREDKEHHAAKKRYYHSMYGNKTPYPYADGQQGSPPPQGQLLIIQNPDGSFMIVDQQGVPQAPQAAGGPGSPMNGGYYMPAGVYTAQVVPGTPGHPVQAIPQQPLRTQATATYYHPAAAPPPGPSVFVFTPSSVQPGAEVTPGYSGLQLRQQSQYDYSYPGTTSTPTPPRPASYGYPAFPAFPRLPAFSDSVSVSTEDSGLTVVRDSSSSESTVTPADEAASESEEGDKTSRKSKVKKGVLTGLGVAATLAAAAAAAKAVKGFGGTRTSTAPAEAGKTELDDGYRPPPFNPRPSPYAELLKDLERMRKE

SEQ ID NO: 248 - protein, 120 aa, Toxoplasma gondii
MASVKRVVVAVMIVNVLALIFVGVAGSTRDTGSGGDDSEGAWGGEQQQVQQHGQSEDRSLFERGRAAVTGHPVRTAVGLAAAVVAVVSLLRLLRRRRRRAIQEESKESATAEEEEVAEEE

SEQ ID NO: 249 - protein, 224 aa, Toxoplasma gondii
MAHGGIYLRQKRNFCPLTVSTVAVVFVVFMGVLVNSLGGVAVAADSGGVRQTPSETGSSGGQQEAVGTTEDYVNSSAMGGGQGDSLAEDDTTSDAAEGDVDPFPALANEGKSEARGPSLEERIEEQGTRRRYSSVQEPQAKVPSKRTQKRHRLIGAVVLAVSVAMLTAFFLRRTGRRSPQEPSGGGGGNDAGNNAGNGGNEGRGEGGEDDRRPLHPGSVNEFDF

SEQ ID NO: 250 - protein, 236 aa, Toxoplasma gondii
MARHAIFFALCVLGLVAAALPQFATAATASDDELMSRIRNSDFFDGQAPVDSLRPTNAGVDSKGTDDHLTTSMDKASVESQLPRREPLETEPDEQEEVHFRKRGVRSDAEVTDDNIYEEHTDRKVVPRKSEGKRSFKDLLKKLALPAVGMGASYFAADRILPELTEQQQTGEEPLTTGQNVSTVLGFAALAAAAAFLGMGLTRTYRHFSPRKNRSRQPALEQEVPESGKDGEDARQ

SEQ ID NO: 251 - protein, 269 aa, Toxoplasma gondii
MALPLRVSATVFVVFAVFGVARAMNGPLSYHPSSYGASYPNPSNPLHGMPKPENPVRPPPPGFHPSVIPNPPYPLGTPAGMPQPEVPPLQHPPPTGSPPAAAPQPPYPVGTPGMPQPEIPPVHRPPPPGFRPEVAPVPPYPVGTPTGMPQPEIPAVHHPFPYVTTTTTAAPRVLVYKIPYGGAAPPRAPPVPPRMGPSDISTHVRGAIRRQPATATTTTTTRNVLLRTAILAAAAATLIALFRQRPLFTEGVRMFPDFQYRFTVQTTQN

SEQ ID NO: 252 - protein, 318 aa, Toxoplasma gondii
MRSLKSIVVPLSAALVAAAELDLFLGESGVYLFGKASESDVALKVPEDPVPEEPRREPEKHVDLFGEDWKQFGGSGFGDFSKVEFENLFSQVHEMMRRLMGRGVDGFGPSLLGDSPGFHFPRLRALQPKTKLEKTGTCQYVVTWAPEVTAENVRVILHLQRRQVEVQYRAATRRDEKTEGGESHSMSKEQSSQLMSVDPQCIMTREVVAQKLAGWTDNTHTATAGTPKKLLISFPSPDHIKEMVKEGYLPDNALERVLAGDFEGFSRTQMCLVSGRNRTECAFAEGQEVELEEKPLPSDSSPVTSVELPRLSQEDRGL

SEQ ID NO: 253 - protein, 300 aa, Toxoplasma gondii
MKSGSCPFTFSPTLSHPLEIAWRARPLQWPEIERQPEPAAPCGALYPASRVLSFSPTMRAIRSVVGLPVMGAAVFLGLLSGELPNSSVLPVPEVASTPFLLSVAADGDGGKNYAEVAKVEALTNMISTPIELFVKDVWQQLFHKSGKPVWENMLFKFGSMIRHRAAHKATLVIMWELRHFLYGTAKVNPSAWKKLETKFETYLREWWMTVPEDPWAALHAGAWKSLLKLYNEDLEPLLRGSPKLKDLESILFDSKLATIRRWTDEAHIEVMKGRTSNMVPRLEALSAKMAVKQKAMQGKQ

SEQ ID NO: 254 - protein, 505 aa, Toxoplasma gondii
MYRNHSGIRLACRLFEVGALVLALENVSGIHRFVAGIEWNEGKEDFQYTTSPWVIPPDGLVSRRLAEEPPRKRLRKTNKSDRDSDSAQGSRTTSPGSLGGFGATGGRVAAPRIRSGVVASEAIRGTIWRRPGEVEGTLKLRRTRPQYSQTDGDGLQGNRLSSTGERSGISHGAQSLAMRPRTMGQTMKSLESSWDSDPLEGTSRDWLYVTTSETTASPGLTGFGGIGKKLAPLYVRDRKFDLLQFVNLTRSKKQKLLMSSKSPSLRKLLMNDMAQEWALGILQIVLQGRQRALQASHTTRTTEPASGTDGTSKSSEDEATRASEGNASVNQTSPAASYPRRPSSDEGQDSGRRKCSKRSPSRLVQNAPLFLKDDSHSLKDTLDLVKNKNRELTEKGRVHATPLRVVLLNSIMMKKLEKVLPVVESMDRALMARQTSSEAATVDDSSTSISHGMQGSTSSGAAAVQGPSTSVPGASGGLGPSGGKRKPDDEDDFDCSRAKRKNDQM

SEQ ID NO: 255 - protein, 413 aa, Toxoplasma gondii
MHSRNCVGGSFYDGAVCCSPPSRAFGNMHNLVLVLLAFLSSWEDNETRRGDVVEQQNPFRLAIHGKTERDRDGNCTQHGVRSNDFRFVDEGDMSAEVGRGLALQKHVRVPLQASIARRLSDRESEKRSQGSDNGNGTTPPLPPRRTPSPRPSGASGVVQQGAAGVGTPTMLGTGGQHLSDQGATGSVAPSVQSSSSSAVSVEGALPLIQFFGSRSSSPEVPLCHACHTVEAAVGVLQSIRHRRRAGAREAAERIAALESQHALLVSSSTQGEHSQGARPSDILVSHRALQRARREATRQEETLRGEEASLEAFIRVASEKREREGQRSLEVLRQRVENQTAELAVLRVEAALERQREMVELERRRGDLLALALVAEDDEEYLRLSAEEEAVQRQIEQLAEETRRPRRGRRKPA

SEQ ID NO: 256 - protein, 501 aa, Toxoplasma gondii
MERIVVLVSATFLYAVVGRASMASAEMASRTKRLYILISFHCVLSEILSGHAAAEATSKPARQPEGAGRSASPSPSLSHASGVVVGARRRRLAEGSPGEEPDPVRELLDLEEELENLHALRFKERLAFRQCVRHWGTFDAYCREHSRWKSKMAADPERMRDAFERKQARKQTACNVWAALLDAAREKIEAMDRERKQMQSRLTKEQTSLYLAAKAARGRAQIGGDSSHTAVGEAAVGASTRPPATGESPTPGDSGSLDALDNELARLRQVISLALGKWHRSRRALKDHLERRVPSTPPGVPSPERDRAGEARAVWEAQHLQLEQDAKQAREAVDKFRERLRELNAQKAAHEKAHGVSPGRRGCENAPVRFSRLGITVDAREAAIPWFQRPNFLTLSHRWSGAPPDPAARPPPRYRYTVFTAEVQHVSRPTLKPRSKHSRLRVADPTRETGAETKASTSTSGLAGPSEFQNERVHCALYGTDESVLDSSESLAKPCFVKWHG

SEQ ID NO: 257 - protein, 542 aa, Toxoplasma gondii [sequence omitted]

SEQ ID NO: 258 - protein, 315 aa, Toxoplasma gondii
MKRFWLCALLSLLEFSWGCNSLGPSLPSFQVAEGAFFGRLRNWFGKNAEQKPEVPVAPVADDDAGSEEESSSHYGVKTLTASTTTTTTTTTTTTVTSTKPEGVWEEEYDSMEVPYTPLPPLRGIGLLGGAIFVSLAFNLGKLPLLMGGIGVVQYINSVVQRMHARRAADAALRRFEDRRELVRARRRRRWIQTFYSHNALQQDRATRKGETQNEESNATLANSSTGKGDGGTAGSEAPPRGIHADAASERTWNTGGKKGSLHDSGLHAEGSDKRTNPSETREVPKTRLRKPTERNTKAQVKKKTPRENLPEFDRN

SEQ ID NO: 259 - protein, 1904 aa, Toxoplasma gondii
MKVRSVLSVGFWAAACVAFQTNPDLDNLCHDNSRNYEFRLLDSVFLTREGLWTSLRIVGTEAAAHSPTSTKEEQDPGSSNSPGEDTSGTQLPQGSTQCDWRKCGTREQVEKTIKEIEEEWGDESAFVTRKLQRRMSTPCRLKKHPCPKQRLTWEREIREEFRRVAPRHLERAATLRKALEQRPPSMSGSLGTQSTGGTLPQATPEDTSVSRMSATPGNAVEVELIGFAVGNDDTDIPVFRTPGPPGTTSAPSEPQAGIPATLGGKPAILILPTTSDASTGGRSISQSGTNLTQQASFQQPGGTASGPSTSSSVSTSQTALPPGNVRGAAGLGTSTPSTTNLHQASSKNSTVDPGASSSSGVSGVAQAFPGVLPGSVMHQALQRSGLLSQPPPSERPAASKRRRKRRGGEGDLASQGVGRTGVNQPVAVDPYDNTPSPKLRFSPLRTAEGAAGATKPPHLLASLPSSDPGMFSSTGSSPTGSSRLPSPQGSSSSTSLSLGTAHRNSQTTFPLKREPLPPGTLVEPVVPLVPFAANKNGRLETVLIPSAAVVATGGSSFPQSGTDATQQVGSQQPRRTASGPPTSSFVSASQTALPPGNVRGAAGPGAPPPPATHPHLAYSKRSTVDPEPSLSRSSRGVPQAFPNLQQQPQGNVVHQPLQQQPQGNVVHQPLQQQPQGSLVHQPLQQQPQGTVVHQPLQLQPQGSVVHQPLQQQTQGSLVHQPLQQQPQGNVAHQPLQQQPQGSVVHQPLQQQPQGSLVHQPLQMQPQGNVVHQPLQQQQQGSLVHHRPQHQPQGNVVHQPLQQQPQGSVVHQPLQQQPQGSLVHHRPQHQPQGNVVYQPLQQQPQGNVVHQPLQQQPQGSLVHQPLQHQAQGSVVYQPLQQQPQGNVVHQPLQQQPQGSVVYQPLQHQPQGALVHHRPQHQPQGNVVHQPLQQQPQGNFVHQPLQQQQQGSLVHHLHRRPQHQPQGNVVYQPLQQQPQGSVVHQPLQQQPQGSLVHQPLQQQPQGNVVYQPLQLQPQGSVVHQPLQQHPQGSLVHQPLQQHLQGSRVHQPLQQQPQGSVVHQPLQHQAQGSVVHQPLQQQPQGSLVHQPLQQQELLPPGVQPETSVSWKPALASADKGQQRSSGKMLMTLDIPGSSRRASERAYYAPSRDGALLFDQLFPEFPFEGTSMNHPQHYAGHDTANVGDSSQPKTAYSTGEVAGPASSFDFLSPTGWKRTIRSIETPHPGHGSQQPGGGGTVLPSYPQLKDFDLTLLSTPMPAPQWDTSTNAPSENVAAKTQAVPTRGDESGSVTSPYDQLFREAAAFNESMRSDEAPKSYLTSTSMHFQSAAPSSQNRPGSLQNKPSESGRTSGVSAVGHKAAAPHVKPSDREQNPFQLFVEPLPSAPKPTSAFAWPEAGTSFEPVTSAESMTVSGGSGKKQAKRSTSPVTASLEQSPFETVSVSSATELQAPSISEYGSPRTHLSSTPAVKGPSAGPVSSTSNEFGSLLAAALRDAGWSDGMTEDEATDFVLDSIKNLEELQVANEWDAASTETRPAAEGGTQHASFNLVSTLLGPDATPTPPGSRSTPPGGPTKKPSAMGRQKPSSRSTSDSKVEGRSSTRDSSLVAPSTSIGAAVRERSKTSSPGSSSPQSKQLTEESFSLGTKEDDSASMVEGDESQVQSSKATASATRRRAWQGQRLNIFGIQPETPGTQPVLQFMRESNRGSVSTAKSPDTPVTSAPGGSQGDSGNDGVGLVAGSSVLPSAVQGKSYASISGIPSHRESLSSSIQDVQPGGVRGAGRRTPNVRTPVSASPTTVFPFASEGLLKKTSKRQTPGLEGYTPSAKTRRETGTVLPSSLGEWQGLTLRTPMKSTSPGASEMQPLSSLVASTSRGALQPALPGSMSPSSSARPQSLRAPSRGSSSYSE

SEQ ID NO: 260 - protein, 865 aa, Toxoplasma gondii
MRPLRVAVALFWAMVAVVGFWASPDSRLTVRGPQFADAATRGVVKSLKRAMNQGWRNGAHSICAILGCDYEHVKAHLTHKPTFFHSFKAVCAQLDEFEEEVTHAKMREEDLTPSQREYRWLLLSKGAALINDALGTQFEVPASYVPHNAKNRHYIPGQRGEGDEKEKLKTRMRGLQVVVPLPTLEEIQKDGMDRLAAVREKHMAQIKELEDARHRKFLLLQEEHDRQTDQLVSELRLKHTEEMDTIRRELAEERRLFEQSVKVWDAVNRLLTDAHVGIETLTDRVHTMSQHVFKLNVFYEKLHSFQQTAKENPTGAAPYSALSYAFQSEAAVDQAMHQIVAIYQEASAGVARVQEILNQADGVMATAPTRDDAAWFQQRQRGYKDRLESFVNLLSDLSVRLEDYMQTAEERKLVTLFLGDEVRTQILALLQERTTEWSTRLATLRERTQGIETAANKFFESSTQLDRTTGEVVSAVLQNPEAFLVQVSTYATESGTLRSAAGVIEEDLKAVVKALQDLGREMTGLTEGVASAQLPPAVLDFLGLPGLFNALQVDMQVKAKGQQLLQLIKGRLSQTGEITRKLEMLKSEVKNIRSPAVREQAEWALTEASTKLQDVLRTKAEVELEIQQINLQLQQVQGTVTQLDQRIAHERVVAQRAAAGGSAAAGLRGGSLALGGSATGSMVGLGGSVSGLGTDSRAAIADLEQKRQNEKEKIQELRHNLSSKQRESVSLDNEARRLEVEVANKQRELAEEQQRVLRVATLAQALTTGASPSIGMSMASMRGGLGLTGGLAGSSAALMTQGIMGSRAAGLLGGSTAGLAGASMGGLAGGSMGGLGGAGMGGYGGGSMGGLGGRSTDGQLGRGTR

SEQ ID NO: 261 - protein, 637 aa, Toxoplasma gondii
MRHIFPDDSATSMRALVWGLGARVLWFFLAGVLAATVDIAGADGIGQGMPDSGFNHVDAEAQPTVFIREEHDDSASSELVEDDGTYSVARRFRLMVMADHKKDGRACERDMVLQAADITRLRVGGSRTSFSAGLVPLVGLPLLAAAGLKDYILGVNAPVDELRLPGARALTPHDVVDGVVSVGPGPPPRPDGETPRIVPFGGTQDKPFWKSKTFIGSGVALVAAIIAGLASSYRASKQERSRRGLLGGEQTAVWDLSDCILLVDVGQAQSRKSIFGTFVPGSARLIVDYRRQRARLLYEERPPLVGNLLFRLRRKSLNRFEDFQLNTPHCYFRPDFQPLAQKERTEVSTKKEDRHAPLPLTSGNLFFRELLDSKGKKTEGIAIHFVKNPGWVAPKEALPLAAAARSAASDLDFTLLMRRAAARNLVCSESVKGGSGGISMCWKSSPPTGSLLLWHEEVLQHSCRVVAAFRGSVNHSVWANFATQQLSIGSDAPSTRSDNVRSVLSKCLLLERNPPTYGVALKRATISCPDPATVPCGSILFRQKTDVGVLEGHSGASTSSRKPTEVASTVLQGKEEPGLVGAGAATQMDYRGNKETSKVIQSSVEFFTVFIVDFQRKPSDWPVLLEMRKKDAARTRT

SEQ ID NO: 262 - protein, 526 aa, Toxoplasma gondii
MEVRHRSVQLFWVVGLLGFLIYVVSLHGSPVNAAVVAESESEAGDTALVLHDTEVMSSGGTSRPQKLVKRVQGFLRRYSAPIRVTVSAIIIFLLGYYAFQYGLRRRPQDGSRRGRQPPDEDRQRGSSPETAPERGTGESDSSGSRSPERFPLGSPPASPDQADDGDGSKKYRVDASSLLGTRSDLTRPSGSSDEASQVHGRQGLDVSASRSPPSPASGGKPVEGPLHSTPATGSPSETVLVPADTQSPCCGAKGSLPKETSPTRDIGTHVPGKRSPPSPSPLQGPRLASFFVGSESGPEGDVVIIHSGGPSSSSGSSGLGDSSVSPSDGDSPTPSAPARGMQQEGPVGGSSSPEQGGRQAQAPISTTTASSPQTGVPPGKAAPTSRSDGKPPPGRTGVDKVGGPSRGRGSPSRSPGTRLSLSKTPRGPVASPTGGLRGRGGSHAASAGRGPLPGPPGKPEQRPGVLGPRTKPFTPKPSWVPPYGTPSSRRVGSRTREPPQSQEQHPQAPSGEGTRDLDGRDQDDSR

SEQ ID NO: 263 - protein, 683 aa, Toxoplasma gondii
MSAQGQQGVRSTVAAGKNRFWQPAPITVLLVLSSSFLFAFAANTPQNSSTTGQSTPSDDHGVSTEHIHDAVTVDAAEHAGEDEMTACSPEAARVIEARVATLKAETEAAVAEVRRTEAMQRELFGRLNAKVRAMNDRLDELSDAQKSLAKRLETTGQLLIADREEQAKRFTTDVETYIIESGLKKAVFQQREIAAKLQTLAESNQKSKQALDALLQHVDDEKEQTKQWISTVVRDLEKYVEARTQTTLESLQRDAQEHANFMQQQLNDMKLDHLLLLQAVSSAETQLNERGIAGVDISQLDESASFERMMTTFEKVLKEQLKGKFVLPIFVVTQCPDSMERVAFMNTYLVPSKRNFRAVFQALGHTPQASAVVIRIESVMVEAWMEVNGKVTGMQYLTPPAHEALTVTTKDRFGFEFLRRVRELETGDFKADPHGRSVVIAFVGNRKGRIGGLPLTDVTEFNKFQALRTLATMHSSPIKETNNLWQIMKTEVDIVATFAAMPRVEVGGSSLRIYQGIAPEPRLPASPFCRNAFTLIRIEVAKSPRGKQEYVYPKASLLKKVFDILVSTNTSQDSGGDGSFAVIRANVSNAGWLQSKLYATADRMAVEIHRPVPGTAPPSFSSEDVAGEHRANSMAAVVDQIRKQMTDVVLPNIDPEDSTSRRQVLVHICEIGVTCNSDRHPEA

SEQ ID NO: 264 - protein, 378 aa, Toxoplasma gondii
MRHQERFDLRTGVLLCIGLVGWSGFVVQHCACSDGVFSVQSPSAPQHDILWDARKTQDELRAFNGESSGELAKGAGIRATEGEVFAGGRAAAGVISAEIPAEEGGEAAANPTSEREIEAPAAEDEAEAEISDASGGVAVTSPAAEEERLSARSASRPSGRRTGPDGVPSTRGLVFTAGGSILAAAVMMLLSRLSRQRSIQVWTVWREERQSLGLSVASDALVVASALVALLGGKRVVKGVMRKREATRRRRRDEIPGVEMPAKRKRRRSEAEGARATEGVKVSELVEDETPSHVSAPTEPGRTAIAATAVTGAAALAGSVALVLGSRRWFRYYHQVEEESRRLVAAGALFTGALFAAYKLFKQVRAKLAARRKKSTKA

SEQ ID NO: 265 - protein, 378 aa, Toxoplasma gondii
MYPLTVYSILAVVGLSLVCRGIATEQVVAAAAKSNSEETVSTGIGESAEASPVNRPRPKPPSGDAKRANSVAVANTIIPRYGEASVDDTQRRGLARVTPRPRLRKSQRRSSSLSRRQRLLYKVGAVIIAVVGAAIAFKTWYSKRQYELRERAFCYTRGRADVAQALVDGLLTERHKVNILINRARQEESEAKGTAEHRELVKVREALEDFDVLLEKQRQNAEAQWSELSAAAAEIGNKIDVRTLVRTDPDKAQASEEGRLYQAKHFWQQLQPEEEALRGQLLPDVVRLEGEVREARDRDLPSLSMLYQQLEQANRRRVVSTVDDQLERLNRQLPHMVGMDPDYAEEHILYTQLPLRGPAYVRMSEDVLRQVQAEPKQT

SEQ ID NO: 266 - protein, 452 aa, Toxoplasma gondii
MHSIVYVVVSVLAVLGRVDGQPLGSRKAKPGAGSAPGPSVLPSSLPHIIMQSPTKNPRKQRKHSMASGDAGAKTATVAEEAAKAVGVRGDTPGDQASARGPDEKEKRETAARTKQNKSTATANKPGETKDPSTPLAGAEGRKPEFSNGQENVVDESDTRGWRDGSRSLIGTENPGKAKTRRLTRPACRRLRYAIGLAIGTVLALLSFYGYRRYRDAEIRAERNRNASAYFYLTGRRNAAVSLAQQLRHEMDRVSEAIRFHEHEQERYERARFDEDAKAAMETTAALEDVLEYFTEKRKEVETLSVRLAAAADMVGADITRQDMRRLTPEQQLQIVRQGRFDEARSLLESTSREANLLRELYVPGIVEAEEEVERAEPGSEELFRRRRDLREKKETRLGSAVDHHLARVVREIPFSVGIPEEQAAQLRAPPGIEPVPEHVLVAMQAIERAQRT

SEQ ID NO: 267 - protein, 218 aa, Toxoplasma gondii
MYTERSSLSAAVVMEKEGVTPSQCYAIPPEREDAMTLVTQMFWRWTIAFLALIYVVATQANASRPATVRKQSNDADGEGEVDTGVAGRQTSMPTTHIGGLAGRGHRGKQTRKQYIHLDALNEDVEPEIKEPSLRPLSQKATRRAKWSRLLLELLPAAVFVSLLITMMSRARPVTRVHETVTNFLYRQGVDVSRQLQELRDERQREIEAEFVDIPPDLE

SEQ ID NO: 268 - protein, 1086 aa, Toxoplasma gondii
MAILRLSFVFSLSLLIALYSVWQHMLHARASKPAVLRKLPGASELLRSLSGSSISAWRRVRAVFHETLVLTDVDDTLWSSGAWRLGGKTLGGVDEDLSRGQTYPGIGALYFLLSAGPHVTAAPVNKFLPTCPVPLVSPLFETCQVGDARRSLAGATGRVTDTWVFGGGERAKELQDSRRKPAEKRPLLPPRVGLLTARASSAAMRSFTRSPSFYAAVTAALIHGARQIYGPGVDDWGRVRFENNMELLRDVIGGQHSRGRGKVSGFKEALERFPKQTPVFVGDSGERDVEAAAGMALFAQEKLAAVFVHVVFSNWENENPDEIEQAIAAPRATPFNLRFNNRRIPALQLAYDVQANLHPSDPKPESFAALSDTHLYSAGMRVASVMKPLMIAYGHQSRRQRAKPTERHDRRTNKDEEGIGDIVALPIFFLKFRDLTVKRSMSVRRQTTSNPFRKLYSHLSTGLKNSVSKVVDLWAEEEQLRSYTDLRTVPADELGVSSDPGVPFIPYRTALGAGISAFILEMITFQDLINLAVSSIRDFRSLGPPQSCAQQQGLEDLYFDLRYMLEVTGEALQSVHVENRAIFEDGVAAMRTFHTKAVDACIPSGPAEPWTVGEEIGACLALFRTPRAAASPPRDPTDSLPEAAGLGDIPHAVLPLARVVCTFVDQLKHWRSAGADETEVLSLEFSVALNEAVDMSNRPFGIGGQPVTSLANLSGDSTSREVPRPSGTLRMESLPMSPLRDADVASVFPRSLRSRPTSGTVNLSLPIPPGSPGNSSFPQVSLTGQPGDEADARPSGRGNESNFVSSSGFSPLSATSPASDPAPMSPDRAHLYWTKEAERQNVERRSSGAIATSTQAPAASRDLPDSLQIEGTVDSPSSFQSRGASADRQRPQGRIEDGAFASPFLPGLSTTAGPSGQGRTSVDLVRSGALSSRLNAASGAALGDVISAAPSDCPFGGLRKLLATMRPICEHQKKLLGDASPCALMSHLLYEEGLMHIFATVTAWYEDGAREPLYITKMHLTLDPAEAKLETLRKRESDNFAHLGMGVLKRGRGHSTYDIDRLQANHREFARSYPGFKNLSCNPFEA

SEQ ID NO: 269 - protein, 921 aa, Toxoplasma gondii
MESNRRRAPCPPASGVSPGSILCLFLLSLLPCALGASQKNSAELLDSLACVGSPPETAENATASLGSWEQVPCLDAASVSVFTSRKEVQAGNILLFLDIDDTVIASGGWNEVMGNSLGGVDDRYPRGSEYPGFSAVLFLLALGPHARNLKSGQLTEFAPPSKAMVVTARPNLPVFRPPNLMRHLTSILTRGARQIMGDNAPEWGVGSQNVMKPASVLRGTYGRGENKLSFMTKVLTEGRPVNESRIDENTKVMFVGDSAERDLEVAIGLSAMVPDKVAAHLLHVVYRHNSGDPTQMHASHTVQTGEKFDEDGVLSKAAVTLQEIISGAARTVAAATRALTEKDEREKHRQTPRAFTESQPTNKKISFQEALGNTTRFGIRVGHALVDAIALVYDVYVTSDDEEGPRSCAELSASQAFEVGVLTARKIRLILDLYRHRWLHTYSTFRTREEQEAAGASVSSRMLPIFFVKCGTVKLRVAHEAPRQAPLDVLLSEMTGARDRVTVRFRSVDTLHAGSELDAETVRSNMLDTLGIPVVPYVTSISAVAQAYVLGIVDLTDVLVVVRKTYEMLRAQGPLAQPARLLSLLDHFHDLEALRAMLFPGGKGALPASAPVRVRATVDYLDELGKVQKAFIKRAAYLRAVPTRTEMCIREMERNAESHYDRSLKRQRGAAGKSAPFTRSQFSAFVSAFAELVCKFDVELSSVQFAGGAEVHGLSVYLSRLVRQAVAATETTPFSSAQKKKAPPESPVSKAVAELAATNAGTEKEKKDPKNMGRGKTACTLSDDVRVTFATMYKAFCADVARDVCHLLETRLVTSGVLSDFIFLAQERGRKYQGPLRLPHLGRVVFIDEHGLDDFEVSHQKPLTDVIGSMGAKLDEAIMEQASAGFRFAKWPGLDSWNQWTQVAASLQLIVDCGLLNRGTQ

SEQ ID NO: 270 - protein, 966 aa, Toxoplasma gondii
MRFPPASCHSASRKEEKPSRDAEMQPRLIRTVLATPGSAPNSAPLRPRIRRPSFSFFPRFSNSFASARCLLFFSLLLFVALPPAFAAVRSNTGTSREAGEVDNAQPAADPEVSRAPPALAQPKVSFRGWKHGLSNRITPIVQVEDVLVSSGGIRRHGDAVYGEDARLRLGEPYPGTAALVNLLSRGPFPAGKTPRSSMTRPMVTAPLFVTLPFLLSAFVPACRPGECRRNHAQRRRVEGEGAEAAEAEDKTEDQAREAEVARTREVELELVQLIVKKDLNDAVNKTTREASSTWQAGAWWSDLPPSVDPSKTTPQQAATHVVQLLQGAAHALGPSNSFVYFFSTSTPRGLLDACASTFLDRNIGVFLHVPSLSAEDTVSLPHEAFVFPLATLGRSRPTPIPAVVLTYDVTARQTVTVDRPTPSLGDVSPELLGKLATQLQPRLLRVLKFFGQEPRAHGPLPVIFVRFRNVEIQQIVDPWHGHPSRYLQLQREGKAPASNNFARLTPVPPEEASGKGHAFDPEKHLQHAVPIMTYRTTVSAAAQAHVMNLISSADFAELAILTVKDLRGRGPLFQPATHEYVSALKSDWKVYVTLAKTPNLIEDKQLAETHELILRANEDFSAERMHCIKKYVLTMSQEDPLFDFTKTFCYNFPEVRYPSSAGGSEFVANAVTAGLALRELFNFTVWPSRSRQENEDEAQASGLSAASQHVRGVRLPSPHPPMRKEDRPASRAEEARRAVLERPLSGSLLQASQLEGQTSGDADENAESRLAKNQEVVEEGARSVDSEKEGQGLEAGSHGQSEHAEVGGREETHSEEGKGAAKAVREEENLNKHQHAGTVATFHGTIPEAFAQKMQENFGPRWISLLQLLGSVSLTNDYLRVLSWLASEADSDAMTLPARRLLVRRDAEVSLSLSAALRHHVAVFYENQVEGNLSHPVVHKHERQYKVAEEGLRRFLRDLVSYSSKK

SEQ ID NO: 271 - protein, 186 aa, Toxoplasma gondii
MMLIALVCMLVHRLDLGAAVSQDGRDLFVGLPKGAPLGPTFIGLTTPRPPLSSLSALQTFGADQRLDRPGDSPGYYVEAKQFYRVPPTRSSATRNKGTSALKVAAALALLAVLGTEVADYVDRQHEGEVTDLEYDRRMQTTRTALGVTRLASLVLATFGGVRFMLDKASKWMKARKVEDSEKSERR

SEQ ID NO: 272 - protein, 330 aa, Toxoplasma gondii
MNTGCLFLPATRHAAIQTICVVALARQVADPDALVFERDFLEFIRILSSTQTVFSSFGCPRSHVALLAQSVERVREANAVGLFSEFARRLGFPTSGDDAGCSCAFFVFTGRAMVWRVSIGCAVLATVLVAGHEPVASAPYKAYGIPAESTDTTSGDDVEEAFRKRSRGNVLKDAAKEEKKLPLFFIDVEDNKGQGRNSEKGATDDDVAVDKTKRSSPSAPCTRLAGKEKKYPCDRYVVKGKMSFLEAIGAFFLASVIHAAVSEQLRARSTGGDIWRPRLAGSVMQAALAATTLWMALRRRLPTFYLLQRRESSEEKKKAKENSTRAASAV

SEQ ID NO: 273 - protein, 219 aa, Toxoplasma gondii
MTRGFAFCLLFLALFGLFSVAPHSIEAGETPEETEAVVAATEQGAAEVDEATDEHEEDDDDDHRADFESLLQMMSKDMHMDLANNNMAGVAKVLKELTDHIDAAHKHDPEAHEHKHPLLKKILTKRTHDKMVTTLQKIYSNVPREEINDQLQAVMSLLEHVKQDPNMSPKQLLEKTAHQLGMPLTPDMYEDMQKHMGWAAKLFQYIAPGGLDEEKAEEL

SEQ ID NO: 274 - protein, 203 aa, Toxoplasma gondii
MWLPVYVPLLLVFGVSLSLPQGSLGTDSSSLRGVDADTEKRINVGKKHLQTLRNLETRCHDSLQALVVIDAGSSSTRTNVFLAKTRSCPNKGRSIDPDSIQLIGAGKRFAGLRVVLEEWLDTYAGKDWESRPVDARLLFQYVPQMHEGAKKLMQLLEEDTVAILDSQLNEKQKVQVKALGIPSMLCSTAGVRDFHEWYRDALF

SEQ ID NO: 275 - protein, 333 aa, Toxoplasma gondii
MWLPVHVPLLLVFGVSLSLPHGSLGTDSSSLRGVDADTEKRINVGKTHLQTLRNLETRCHDSLQALVVIDAGSSSTRTNVFLAKTRSCPNRGRSIDPDSIRLIREGKRFTGLRVVLEEWLDTYAGKDWESRPVDARLLFQYVPQMHEGAKKLMQLLEEDTVAILDSQLNEEQKVQVKALGIPVMLCSTAGVRDFHEWYRDALFVLLRHLINNPSPAHGYKFFTNPFWTRPITGAEEGLFAFITLNHLSRRLGEDPARCMIDEYGVKHCRNDLAGVVEVGGASAQIVFPLQEGTVLPSSVRAVNLQRERLLPERYPSADVVSVSFMQLGRPVRR

SEQ ID NO: 276 - protein, 439 aa, Toxoplasma gondii
MTATPAGTLVRLYSSLVSGQHKSADGDCNFAFSPYAVSAVLAGLYFGARGTSREQLENHYFDGRSAADAAACLNEAIPAVSQKEEGVDPDIQSSVVLQAANRLYASKELMEAFLPQFREFRETLEKALHTEALLANFKTNSNGEREKINEWVCSVTKRKIVDLLPPAAVTPETTLLLVGTLYFKGPWLKPFVPCECSSLSKFYRQGPSGATISQEGIRFMESTQVCSGALRYGFKHTDRPGFGLTLLEVPYIDIQSSMVFFMPDKPTDLAELEMMWREQPDLLNDLVQGMADSSGTELQDVELTIRLPYLKVSGDTISLTSALESLGVTDVFGSSADLSGINGGRNLFVSDVFHRCLVEIDEEGTDAAAGAAAGVACVSLPFVREHKVINIDRSFLFQTRKLKCVQGLRAGNSPAMRKDDDILFVGRVVDVGVLQSGGE

SEQ ID NO: 277 - protein, 318 aa, Toxoplasma gondii
MGKNPLLFLAGVLVCSFSVAVFASPETKVCSCPRNLELNCGGDHVTYANHCIRECHGVGLLHDGPCADQEDQGSSVNEPSEVADTTEQPSITPSGEEDRPPKDAPKERKRLRGCACTRELRLNCGVDGVTYSNHCVRKCERVKLLHEGPCRGGPGRTLFSQQDDESENDALEEEEQRLQRTQSSHQHDDAENGARAEHEQRLKGCPCPLNLMLNCGVDGVTYDNHCLRRCRRVELKHEGPCEADEQKQLPVQHGDNEIDVPERRIEDLKDCACPLILTPNCGTDRKTYPNNCVRECAGVKLLHEGPCEGDTEEIWDDQ

SEQ ID NO: 278 - protein, 87 aa, Toxoplasma gondii
MPLPQAPEELEQAPASHPEEAEQEVPERKTDAGSEPEKDPETNLQASETQPQEQVRSQPGRSDGKCTDKRDEVDLDVLEAEMLEKAP

SEQ ID NO: 279 - protein, 383 aa, Toxoplasma gondii
MDVRYQTRGAVAAVYVLFRTVVGAVLGLHCLKIVSAEVGLTHGIMSTEFEVELRGHNWVIDSGACLLGQPRNLVVDPVLDSEFMTPQKLLTDRTGPELCSWLEKIHRQHMEQKPAWLAAYQKFEKRFFLLRLLGMVGKPITFFPEFTVRIIVKHFSLWGDDRWGNAQPWIAATFEYAHPEGAGGELFLHIEKVFSMEFSGRVAKLVHILLNPSATFNQYVELHRRKSSGVPGDSGVSGIRRTLYERDLNISHFPTADTSQISHSLAPDILTLRFAKQDFWMEDGSCYILSRFVATSSIRGKTLCKIVSDYGHRESWMPFVGSRKKTVALAVTAADFFNTRRPSLVAHIKEGVKLEALDKTPVVLELVTDPVILRSYVEAARKA

SEQ ID NO: 280 - protein, 224 aa, Toxoplasma gondii
MATTHLNKSVIAGGSIKTIKALKKYWNSPVSDIDDNSSEAKYTMLQMAILLNKKNVVEYLISQKDVDLTTRATDGTTALMTAVGKNVPVDWIRAMLERGAADNINVEDNEGHTALDRCEKDSEVYKLLVQHGAQPRPSPPPTPPPEPDVAGGAGSTDTNAAGQNGASKPVDGITGVGGMSPGLDEHPGIWATMCGCGGRQGKNGTEVVEVVDAGKAELNPAQAS

SEQ ID NO: 281 - protein, 553 aa, Toxoplasma gondii
MTTQTTTKGSSRISRCTVALVFALSACATDALNIGNHAHQTRLASGKTSAKGDANPWAKILERYNVPLVHGSGVYVDLGNTKILSKKKYREPGGKCPNYGKYIKTYQPTTNPEIWPNDFLKPVPYANTPQDTMPLGGGFAMPMHQISPVSLKDLKDEAEGLKTATGVSSYAVEHAKNIRDDLGHCIWWARMTSAHDTSSSATNSKEDYYRYAFVWDPKKEMCHIMYLNMQEMTGAGTYCKRGDSGPNLTWYCFHPEKSIEKNLVWGSAYARLDHASACPEHGLKNVHWGQWNGRSCQKMAVRKRISVGSATECAMELFNNSPSDNPTQYVGDEGRGWDKILDDVVGVLIPAGSTKKDQPHTRGVGINWANFYKKPSGSYCEMYDGVPNCLTSAPEQYAFVSLGDPNPDNAQLPPCSSATEGVVIPSHCSCPEGETSGSSSGVKCEDGKWVEGHVSCTCSLDEDTSVNIWLIAGPCIAAGVLLLGGLIYWMAQRNKREPAVEKPQIVDETREHAVRTRQNQADLLQEAEPSFWGEADNYGTSVILDSANIDKDF

SEQ ID NO: 282 - protein, 569 aa, Toxoplasma gondii
MICSIMGGLRSLRAARPYSHQSNTETKHMGLVGVASLLVLVADCTIFASGLSSSTRSRESQTLSASTSGNPFQANVEMKTFMERFNLTHHHQSGIYVDLGQDKEVDGTLYREPAGLCPIWGKHIELQQPDRPPYRNNFLEDVPTEKEYKQSGNPLPGGFNLNFVTPSGQRISPFPMELLEKNSNIKASTDLGRCAEFAFKTVAMDKNNKATKYRYPFVYDSKKRLCHILYVSMQLMEGKKYCSVKGEPPDLTWYCFKPRKSVTENHHLIYGSAYVGENPDAFISKCPNQALRGYRFGVWKKGRCLDYTELTDTVIERVESKAQCWVKTFENDGVASDQPHTYPLTSQASWNDWWPLHQSDQPHSGGVGRNYGFYYVDTTGEGKCALSDQVPDCLVSDSAAVSYTAAGSLSEETPNFIIPSNPSVTPPTPETALQCTADKFPDSFGACDVQACKRQKTSCVGGQIQSTSVDCTADEQNECGSNTALIAGLAVGGVLLLALLGGGCYFAKRLDRNKGVQAAHHEHEFQSDRGARKKRPSDLMQEAEPSFWDEAEENIEQDGETHVMVEGDY

SEQ ID NO: 283 - protein, 714 aa, Toxoplasma gondii
MCPRVSVDAVTVLGTALLLCLEGTRLSSIVPPSSVPFALPAQCLNANQRLQQGVMARAWSATQSDDDESPAPIFPESDCTYPADNNFEKIITTAHLTTFLENASQGFSYKGMTHSSEAAAQIHKDLSCAIQADSRFASFCNSSDKYSYEENAFVNVSECAAFLAHVFVHTNSFTQFEETSNNRECRESEKYPCGPSTASYHGRGPLMIRGNDDYGRLGEYLFDDAEKLLLHPRLIEPQGISGWVAALWKWMEQRPYGLNCPETFVGSGKASCHDAILNQDVSPEVTMEALTDNDREKLTKGVSGFGLTINILAGEAVACCPSALKDALAAVPKPVLLPSAAVPGVIGVAESEAATRARADLLLKLAERGGLGAGALTPEELKKILAPNGARQGGAAQTLEPSEELESPDSGDADEESRPGEQKPNPHAALGAEQRQQQLFDQIMSAPPPPADGIPVQPRGDGFLQTQALALPSTLTRFVVPSKGIFPSGSSASQNPLSSAAATSAFLSFLAHLLYPHPTPSGTENTVPLPSGTVPPTPFPLPGDANRLCTTRGVLSARAAESNAANTDAAGAATAADTFCLSVVRGCPVMFPPSAVEINADQGDEDTVNLVKAAASGNAAAVIGPDGEKCNFVCVDASNNSAQSATNGAVSTDAHAAEDDALAAKSHAEAVANLKTEEFELKSFEYLPKSGVVCGYTCVSHHDETEGGTVFEGA

SEQ ID NO: 284 - protein, 877 aa, Toxoplasma gondii
MKPSSLRILLVAWTIISDAELNHFSSQAPLSWPRCVVVSAADDAQRDRGDTTAASSSRDEELEAAGPADEAKKAAGENARECAGTCNEPPDGSVHVRSSDGSEYLDEQPGDGAGQIVEQPRSDEAEGSESQASVGGRYYEQEASDGKRHDEEEPPDRRGYVEKAAVSDDGDAVRPTVVEGEDQELLLKPIGKGKACERVIVSRIRDGGVKRGKKMGFNAVGINMPMWSCYGMSVSEAGSGFPRDWMASLSRRNILNVVNEEALLRKAKNRIGIELAWESGEGGEKPYMKCEEGGLYVPVIVTNVEDQEPYRVELSPTKFWSAASSRTGRLYVIPEQEASVTEGDKEDEKSVYIIPMEALEGHVFLPHGYLKGHYSEMPNELNHAREFEVNKLSVDDFLTRGQRVTLVCTAPGEPARIVPTVDAAPRTLQVSRRKDKREGEIRGQTPPKENAAADAAIQEADGNKLSRDRVTPQGLTEQESRTVGKTEETDTAASRSAELTGATRGLVLMFLTEEDGLGFELPLPVLVDRVLFMVKQTQEAAPLHLLAYLTVRPCKRPIHDPIFGQSYEPVQETTVKNRMGGGGEGSGKESGGFFGFFKQQTQKPKDFEAQESREDMSKRCRPKRVLPVELIGTEALQSPTLLNAMLEQIESRLKSDTQCIVAAAPATPKSDSPNRPRLRARLVCPSLEHLFILLREKDASDREYNAFKRTKNRQMIKGAVVGLFGLFLAYRGLVGLTRNPMMARELFAHVIGREHVGNQPYHFFPSERQLYRFVGLRSLGRALQFRRYNEAMGNAGVRAQVGISLWTVSLLALTALLAIRLGRGTRHFVRNRKRVSNIKGELQRRPIIHEEQAPVPELEEAEDECSTVDVTYLSFLY

SEQ ID NO: 285 - protein, 290 aa, Toxoplasma gondii
MSSHDLRLCRPRRQSKGSRQSPAFSAGRLCSSWGSLCVCRRVPRTKLGGSPAPRTAGIHRDSKCCATAMMPFPKRSLSLVCLLFCVVTAAGTLPRQPVADAFRLENQGVQDSHANSDAMQPSLGSATNHKATGTTSFVSVNENEEGMSQKAIIVFVVAISAMVICIGVVLVMWWMSSEREKKRRHVARDAERAPGLFFSEDEGPMSSDEKSAPKKPAGGNSPNTRDAGESISRERQIIEEDLGKVLVVDPVSGVMRSRQKWQRNGNSVPDKRMLAGTERTCRTGQQKFKK

SEQ ID NO: 286 - protein, 698 aa, Toxoplasma gondii
MSFTHAPLLDTDACLEFLNALEYGKAHPVHELQDCATAEYVWGALHEIYPAWFDESLHPSKFPNAQEALSQILYYLDEFHENKYSGDFSVITGHLDAFLKGDPSLILKTHEFILLAAVNGDSQQIIAKIMAMSQPTQEIIQAIIQQYADADNGSSNDTPTNFSRMASEAAAARREPSIADDLGLGRSSSAVGGHLAPVLQKVQDELSQIKAELRKTKNALTESESQRETLSDKLQLAEKEREEEKTKRMVLEQQLSAKKDVLVKDFTEQIEDSDKQRAKLKEELENEKKERKKADEKNRAVVAELKEEMDLLKQEARRVSTLEVQVQNYKTKLTEMAALKEKMTQLELQNKAYMDRIVEGEADSVGALGLRKQIDSYKERVADVEERLSSMTAEKEALSNLKEEVEKQLSAAEKKLEVKELEVAQLEAKIEAKDFEISSLNDKIKELDKNKGRDIAEELANMAKKNKADGVDTAARIAELSNEVDDLKRVKQRLEKNAAAYVAQIAFLQKELTVGCASAADAQKLQDLVEKTAKQEEEIKQLRESKDDMAKQMMEALSKHEKGSGGDETSAAKVAMLETQLEFEKKQASMREDIVRAKVEKEMENVHSTLKNQLQLRERESNFYRKAVEENAESSKKEMKLLSSVLYDLGLRFHRLQAYCDQLKNENEAIQLRVRLHQQSNASMADSIATDSVTPREA

SEQ ID NO: 287 - protein, 351 aa, Toxoplasma gondii
MFGELCVELAFPFLRQAVSVMFSRASLGRPGVPRLPGRPVCLLLFASLCSCLVQKCTFLPVSAFRRSEGNLSRGLSAEQHIRNKSGRRQLSEIDGGNHFDVEPASFLGLLGESPEDADSSSTKAEDSDSEGGTSPAATEDQNGNESDSQQSESSGAVEKRTAAKEAPEAQPEKQEEPSKNEAQEAKGTAAAASRQDDTVIGEGKNPEELTDDDFKQMSTSQGLSILFSQGKGMMQEVQHTLDGVNAVVSITELMGKVREDIRKDVEALNHTVTEEYQNIEQLRQLQDAQTAVLRSQLNYLIPLNRQEAAALPEMPGEVLQSGSSSLSFYSLFGSVCAAVVSVLLSAAHVSS

SEQ ID NO: 288 - protein, 330 aa, Toxoplasma gondii
MKLAAVSSAAFAAAFFPAVVNARKVGNPAAQPSVLVNEPVALAQLSTFLELVEVPCNSVHVQGVMTPNQMVKVTGAGWDNGVLEFYVTRPTKTGGDTSRSHLASIMCYSKDIDGVPSDKAGKCFLKNFSGEDSSEIDEKEVSLPIKSHNDAFMFVCSSNDGSALQCDVFALDNTNSSDGWKVNTVDLGVSVSPDLAFGLTADGVKVKKLYASSGLTAINDDPSLGCKAPPHSPPAGEEPSLPSPENSGSATPAEESPSESESVPSLPLSQIPSEVPLSQESPVPPQDGENPDSPQNEDNSMQEVENSASQSDIEAQRQAENGRLPSDDEA

SEQ ID NO: 289 - protein, 376 aa, Toxoplasma gondii
MHTKMTDGAKLYRRSMTTATTTGFFLLACWFLPSSCIQGSEALSTTATTQPISNVTRYPEQHTVARSAADVAKALAEKVAREAMKNAYNDVFRNWTGIAHPDFHNGDAETCKIVLSFDVAKKKNAMGSVTKILSVTVNNARGQLTVKYLERPNVRNATNVRRASSWVRRKLALETADEVVSVTETIDVPQACIADNHSRYFVVTRRKNVIDTRVFAVVIELELHPGPYLVPRDISRIAELDRILKEHERETFTEGKWVTLPGCMMLIRVRETLKRAPRLTIDAYRGSVQFREDELKSLGSQALPQGCTWDGPSAVGVVTRHDRSADANLWDVLLFMADAPSHVQFEYTLPKEADVERNSDLSSGFASGPGEQDDNI

SEQ ID NO: 290 - protein, 456 aa, Toxoplasma gondii
MGQALFLTVLLPVLFGVGPEAYGEASHSHSPASGRYIQQMLDQRCQEIAAELCQGGLRKMCVPSSRIVARNAVGITHQNTLEWRCFDTASLLESNQENNGVNCVDDCGHTIPCPGGVHRQNSNHATRHEILSKLVEEGVQRFCSPYQASANKYCNDKFPGTIARRSKGFGNNVEVAWRCYEKASLLYSVYAECASNCGTTWYCPGGRRGTSTELDKRHYTEEEGIRQAIGSVDSPCSEVEVCLPKDENPPVCLDESGQISRTGGGPPSQPPEMQQPADRSDERGGGKEQSPGGEAQPDHPTKGGNIDLPEKSTSPEKTPKTEIHGDSTKATLEEGQQLTLTFISTKLDVAVGSCHSLVANFLDGFLKFQTGSNSAFDVVEVEEPAGPAVLTIGLGHKGRLAVVLDYTRLNAALGSAAYVVEDSGCSSSEEVSFQGVGSGATLVVTTLGESPTAVSA

SEQ ID NO: 291 - protein, 198 aa, Toxoplasma gondii
MALSSLNNIRPFSGLLGCGLLFGALVVVVACVFSVPVEAGVLRKVAGAGSLQASIGEHDFFNDYDQDEEYRKRQQELQNQSPEEVEEAKRKYHEELRRKAEEDAETKRKQEAVIQELKEVAKKRGLREAAEREEKRIDEQQANYEQRQQELRDMDSAMEERLMQQRKKDQEERELARKNSDKVMEELKEKLARRRKSM

SEQ ID NO: 292 - protein, 204 aa, Toxoplasma gondii
MQLKKLSVVSITLLGLFKFVNGVSEGVVVPVRFGSETARADLLNQVSETVFSLVETTEDDKSAASIVRGAFRSALKEILVAVKGEVQQTCEELADLAARKIHEAEERGEGRLDKEEAVDDESDFSFLDSPKTSEASIRPHGFLQERKFVDTLKTLAKGALKTFVEPMKAALVDGIRPMLPKIKEVAIDVFRQACEHAEEKLQDA

SEQ ID NO: 293 - protein, 2182 aa, Toxoplasma gondii
MAILRSGIAVATLCVALGFTSQRGVVAETCPARFTAWTYCGGQNAMQERHNVACANIVESRECEKPQSCGDFTEWVPSVANCREGQMQQRHREGCENHVERRMCTSPECVGKWTEWTYCNSKGIQQRHNASCHVVEIRGCGDVPEGCGEFGPWSPPLDDFNNCKHGVVYRRKREGCDLEEVRMCPKFDCSACSPNADCNKADSVCTCREGYEGDGLTCEPVNPCKNHNCSEHAVCFADGLQAKCRCEKGYDGKEGAGTQDDPCIDRDECATNTHQCPAHSTCRNTEGSYDCDCKTGYAMSETGSCEDVNECATENSCPENSSCVNTAGSFECVCNEGFRMNAETQQCEDIDECAEEGGCSANATCTNSVGSYSCSCPEGYKGEGTRDSPCNKIDYCGEGLHDCGEHATCRNEAVGFTCICDAGYTGLGKVSSPCVDIDECDREHPTHDCDSNATCTNTEGSFTCACNTGYTGEGRGADTCTEIDECADGTANCAAEATCTNTPGSFKCTCLEGYSGDGFTCSDNDECQQEPAPCHQSATCQNTPGSFTCACNAGFRGDGHTCGDIDECAEDPNACGAHAVCRNTVGSFSCNCEEGYGNLDEHRACHDINECEAEPERIPPNATCVNTDGSFEWSCNAGYEHVGSQCQKINFCARGFCSPHASCQEVSNGTSYECTCQPGYVGDGVGPEGCADRDECQTENHCSTDENGGICTNTEGSYTCSCKEGYRQLADGTCEDIDECASGHECHESATCHNTAGSYTCSCNPGFSGDGHECADINECETNAHDCGSHTTCENTVGSFVCNCKEGFVHSDEKTCRDVDECAENKHDCSVHATCNNTEGSFECSCKAGFEGNGKECSDIQFCSAGRSDCAANADCAENEAGTDYACSCHAGYRGSGHTSKGAADGCVDIDECTEGVDTCPRQGGRCVNTPGSYRCECEEGYTYTTKEDGTVECVDINECGVSEMNTCASKANGGVCTNTMGSYTCSCLPGYTPSDDGRVCTDIDECATENGGCSEHSQCRNLPGSYECVCDAGYEKVEGSEHLCQDIDECAAGTATIPNNSNCVNTAGSYEFACKPGFEHKDNACSKIDYCGRGGCNSLATCEETADGTDYVCTCPKGFVTQNEGRGADGCTDVDECAENGCAAYGSEGVICENTPGSFNCSCANGYLLNNGVCEEIDECAGSSSNTCADEGGICTNTPGSYTCSCKPGYDQQGHDCVDINECTTQEPCGDNADCENTSGSYICKCKAGFEMRDNQCVDIDECATNTNECHNHRGRCINTHGSYTCECIAGFIGDGKICINKNECQSGDFECGPNSHCVDTEGSYKCDCNSGYKQDPENPDSCIDRDECEIEGACDENADCTNLPGSFSCTCRAGYRQEGELCVKMNLCADDENGGCSPHADCEHLDKIVCTCRPGYEGDGITCTDIDECALNTDNCDSHATCENTDGSYHCACGSGFTGDGFTCEDINECETGEHECDSNATCENIVGSYSCHCPTGFAGDGRSCSPVEVVPGQESCNHWSAFTRCDPETHLSSRYCVDLPDKVESITCEVGSLPQPPTVAPGEGGEEDGNACGPWGPWSPCPGEGNNMSTRRREDTESEACVNQVETMECPTQAGQACGNYGAFSDCGVPLRGFAMAFPENCPELVAFAACDAPAPPQEDRCHSFSAWSKCTHIPGTTLYEQTRSCDGMDLTESRFCTPDDEVGSDVSTDVASECGSLGEFGECVNGLQERSYSDCPDHKEVRQCSDESCSAFGEWSPCGEPQQGLRIRKRRACDNVHCACVEAEVCGDATPEIEEEEGEHFPPEEGEVLPPYEEGPGEGELLPPEEEIPEGEHVPEEEIPEGEHVPEEEIPEGEHIPEELPEGEHVPEEEIPEGEHVPEEEIPEGEHIPEELPEGEHVPEEEIPEGEHVPEEEIPEGEHIPEELPEGEHVPEEFPEGEHIPEELPEGEHIPEEFPEGEHIPEELPEGEHVPEEEIPEGEHIPEEFPEGEHVPEEEIPEGEHIPEEEFPEGEHVPEEEIPEGEHVPEEELPGGELIPEEEIPEGEHIPEELPEGEHVPEEEIPEGEHVPEEEIPEGEHVPEEEIPEGEHAPEEETPAPEETEKEEEEGVPVAAIAGGVVGGVLLIAGGAGAAVYASQGGVEAAEDEVMFESEEDGTQAGENRESETVIEIEDDAWADMD

SEQ ID NO: 294 - protein, 468 aa, Toxoplasma gondii
MVGVFQLCLLTCLLCLLKGSDAIQLRQHRNGLGVEQSFVSEETDIVGGRISSLQAELDSYCHNRYKQLCDGGNKKFCDKTGVARYGTGIQSQQTAEWRCYFAEVLKPSGRKVQCVDDCGNYFPCLGVVDPNDTFHATAHNQILNFIKDGVEKHCSPFQMAGNNYCQGVLADTVARKDTGTASQKAKAWRCYKKDSLTYEARSICVDNCGGEIECPGGRSETSGELLSQHYTREKELQKVIESQSAPCHDACVATPINPPICADTESLLQSTKRSRAQRFIDDACQKLFNCHCKKDKKFCTTVVARKDRGRAGSQNDAEWRCYSLEELDFQKTNPSCIDECGNELPCQGAVPEESTHHITWTKLPSKIDEATQKFCTERQRAANDYCASEFADSLARYGPGAGDQTSQFRCIKKAAMRADAEGQCADSCKGTETCGGGRSRLDGPLSVDDVLNAHEGISEAMKSASTEC

SEQ ID NO: 295 - protein, 968 aa, Toxoplasma gondii
MSEAAYSAERGWDPETMTCKCPNDAPACSAEQATYNLINHSSVALGQGAICAAATGTVSGIARHFKRSTLDLCGDLSKLSPLSWEQLPLPPYMADDVILDDEVIRSGHYLCTKSYHHVFCRSSLITTSTTTPEPKWDWPARQDCVPGEWTSWSKCSMDCYVGSGALPVKSRSRSVLIDRRGTGNVCVLEDHTLCKVGSEVPYCEDLCWITDWGDWSGCEQKVLQIGQAAVRARTKLRHIFMGTGGVCSSDHIQYDYSGCKSGMDSSGGREDDSAHSMVEQKSRVTDAGCKKSSGWSACSLPCQQPGANAVTQQFQLGLPETVTASTTSYCASRSRACVEKKPPCVLDVAPDCSLVKPRYDSPEEALYCHELCNNALTRCREQAALQFQTQWECIMAFINSSGVTGRCQIQKGAVSKTTLRPPVCFLSRTRQVDASKSLSFLTTDKTSGRGSCMCAVTNSVPCSPEEVALSFDDWAKQLGSTVCPFGQLGAFFNSPNSKGSADSFVYFGASDLGRVHCPISKSSDLGSRFPTFTEFESPESMNNFCENGLPFWQEKREPLVDCRQVIPKNASTTDCPGRCHKAVVNCMVSNDSLDNCINEALSAGDFAENCELQSSVKLGKGLMFCKRIRTDCEYSEWSEWSECSRTCRSGDDEESVRVRGRKLLVAAEHGGSCDADIEDSHGGSLSDVQLCDWLPPCDALADTETYVIMPKPEPKLADWSATRTTTTTVIPGLQNENKILCTIVDMADFSKSHRGYDTETESCKCPYNARVCSRTEAVNSRDNWDELMQTVCESNGQGQILAQGMETFSCSDRVFRSFRGTLGQTPEAHCKSEDATYIFCEDGAIDNDLIFTEVMMSIITGVVMGIAVVYWAIQYSGDVQKVLGLAGRYVELTNLLHEVSQEPQAHEEEKAEEGEGPDEDAEPEAAVEGNNEFDCNPRAKEENGEESEQDASDSESGSDDDDDIVSEE

SEQ ID NO: 296 - protein, 2924 aa, Toxoplasma gondii
MGVLRVRSFPLQQRTMVFRATREPFRLPLVPAFIALFLLKGVTCQLQLGTSTLQKNMWTTVKFDEPMIDPVVFVSPPEVPTNSFALVLIGGVTASGFRARVYFPSCEYSPSGGTLYAVRWLAVEATSAGYYDSSNRQTIDWTAHAVTLASSGTIPAGYVWSQSFSAWEDRPGTPGVLIGVQNHREMISAMYSSSEYLNPLVINSNSGGTLTFSFLRQISHRIGFTLKVGIFQYDARRGAVINGVNLVAQRYDLKVNEVLPVADVVAGGTTPATFAVQWVTPTEAPLALVVKPKLLPDGSYSESLVAVEDCRKGATYEPHAFDVTHAFTGNPASTAHRINGGPNCFRPSASVPTWLTEPCKLACESLWTANSDDYWNCDDVNACFETDFRSAETLMALPQIDESIAEVLVTSCNFATRTADLIKQYEYAVNLKVDDIAIGTMWSTSSHCGGDKMEVEIVGAFYEKLGVSILTGSTCEVQDVSREVEALCKAEGGIGCSISGAQIYELIMNYPGVCFALEDAELQIFFNCTFASTSPFDCELYESKGFDQENGDCMCPNALAACTREEATFKSGWLQNLNKSYQYMLHGQIRYVAKSSVFQAFYEAPETSSAGDNTLCARMNTIVVCKNPTPVSAVVGNRGPNCYVIEHGSQYCHLPCLTAWDAFLAAKDLPQQSDYQAEFERFWLSFDFPAIPPHTSQSLLEQLQRCRFATRPATAPLQQYEDEIDVQLPDYGAVIIPLGCDKLHHREVVQALVGSASSIMLGVHEPGCRYEDATETVQRECKAAVSARKTTCEIDSSLFTSKDILCNTSTIKLIIRGTCIPGPYLPTDYTCALYPTTGVVSRDGRSCTCPNSAYPCTYEEGQLTASRWKNEVNTGATVSLANSVVWTAPPGTSEYTYTHTDAYDYVCSTDEHHFVLCKDLTPSALPLTEREPHCLNSFSVKPDASTVDDRDCQDQCASLFATRCRQSFYKWLCVAQGLPECYIPNTDSFTCQIDTNPSAYNYSYGSCGCSGAYPPCSRNEANATRLDWITAFRALSHKKGVVVARGKQALWTENPDRWRYENGMLQGGGCLNNSWFVGVFCGAHLSVTPPARGDVLPICSSAAKVENPDTPHPACRVLCAQVLNECKKVFSTTEGASAYASVFDCFKARGKGTTLDNCTYELGPENRATGVAELHTGWTVASASWSRVLFDVEFADPPVVFLGIPRDTQPFYTPSVRLVTKTSFEVKLYRNNCGLDDTRSSSAPVSWMAIPEGAYLTDFVENPVRVMKLPMTTRTPTVLTFSLPGLKEPEEMVALAQVQDLTPTSVSTDRVAVVISNLKTNSLELSLVVDESVNFSTVAVGILISGKQNPDLAAGLSPLLNRYHLQTFRIPAAAYSATSILGEGLYLSGGIMPHVFAAAIQTRSRTKELDESDRVVISRRATTTPSTWSALLWKKTCDAKDMFEAVENPSDLIIAGIYVEARKDEPSAILGNRHDLCLSFIGQSFESGVVATCMGACRSALPASVQLHCQDECALNIFAPSVHTKCMSDCESLLVAQYEECAGQCTATGTASCQRKCKQFLGNKCDSTASSDVAACLEFVTPPSVFEQCTLLVEYSVSEGGASDGLEIEEETTPSQTYENCIIVDMRDGRFTAFTGWDSRVASCKCPNDFRACTSETVNTQNHWRTELLASAGLCKEQPDGRFNAVTQQLWSTTGDLCALAADEQQPPISWTSNMLPAYVDQDVVLDNSTIRSGDYQCREIWHYVVCPAAATSTTTQEPPVPPFTATLKTAIVGEWGEWSACTGTCFSQWWTPKRTRTRLVLAELSHSQIPSVSETATCLDLPPCGTVCWEREWTEWSECKLFTIVMGQGLEYFRQQIKPIFDFVEEACGLDEHERYERCGEEQNNGETPATSTLQTDSLLETRSLTVSRGTAARALSRVSMDPALEPPSFASLHGTRSHVPASIDAKIIERRKGIMSRRRSVPPSGYLEETAEQVARGGESEQSEKASQNGSRRHRASRKQKRGLESIYSDASVRGSGESTLHGTGTNAYRDQIEWTSKSSSRSAILDSGARGAEAGTSLLQKARRARRGAGRFRKSRSQARNQTPDKSCSVVSEWSGCDSPCLPHKGSTPRRYRLAVPGQNEANYCTVPLSGKEHLCTDLPQCAHPNFDCAKVTASRLTDEDIAACKAVCVEVVKTCETMMSAVFSLYTSLEQCALVQFQEYEQFPGQCHIPEEYTSTRRPTKCFPSRTRRRVASGELPFIFQVSTASGTSPSATSDAASSVAESFVSTGTASAPSSRVMNALAFEASASQTSIDSCECYDPADEPCTAQEARDSLFDSLYLFLTHPLCAESPAAEGALFTMSEPNQTADAASYFALRGLGRMHCPVPMYKSSTEVKGVLTPKRVTFSEFKTKEDLNEFCHKGLSNWRQNVPPEIIGSASFPNCMLVTPREGAEPQDCALLCSETMSSCSAASLSFVELSQCVQDKLTESDFYSKCSAPEVLAPGEGIILCKKKVSTCDYTEWSEWSTCTATCFNWDEGVIPLRVRSRDFASSSAESRVLCRLESQNDAIQTEKCDWMPVCPEAESEEEDDATGGVEPRGEPIVPPWSPERPTDENNQAMGSEDIVPGTVECYVTNMGTIMTSYYRGYNQEYHGCNCPGGRRPCTRAEAVASLDLWAKDSGGLCDQDMATMISAAEGEAFFCATGSFGKIDTSLSESSCASSEYQYVLCEGHPYEGIANLTTWVICLLLGVGGGICFVLSCVQYSSDIQKLLGLAGSYPVLVQNVTELQERESHKLRRQGNISATSEHSDAHAPSLSDSGWDMDGNQSAGSAFPEEEPWQFEDHDEEPLLSTRKYSRNSGSAEIPEPSEIGQTSPTQQRVPRASLAAQRSTCQLSSRLGQANSPEQSLERRSLKLRDSHADVELQRTLRKEMKGNQVWDKTV

SEQ ID NO: 297 - protein, 668 aa, Toxoplasma gondii
MVVSCLCTAMSSALSQRNCILISCRLGRQRSRPPDAMKVYAPVFTCRRQFLYEKYTRRRCTTLGGLVALCVIFTAEAISRSQHPYGTSRSDLSPPATVDSTSYGMSILEAGGPSDEVAIPSDRLQTFRNASLDFDRAIRFPNQASVAESRQLRLMQMGECQNVYWGKKELISRITGKWKSALHPSCHESWFTYTSWSRTKTWRECAQALDNSYLYFSWVRRHNEADGACIWVKPSRRDVSKSDVEDCLVDVNPQKEVAVTGIVGSHHGCTTCEVGEWSETTCDSWCNDGVKGRFRELTGHTNSAHCSTSADANCDVCPNLWEVQRCSTAVECAQGIKPRVRFCPNEGREYTAEGWRACAERCQRKFNATNGDTANRDTFYKAECFRYSFNNDTSACILNPLHACPDAESASDVLWISGDVLSMPSADYTTVTWQEWQSWSSCSEVDPATGWKKRTRRPKTWGYRPDNVLSPLQWISVTPCASNVTLTRSELDLAMNPSAMCWVYSDFADWSTVSCEPRCGADRKKTRARAVRQMPVVQPDGRISESCASTEVSLEARQQTKDCPGFVSCGTGCVFGEWTAWSDCRCTAEGSTARTIRARELVSGSKESCTGLEEERKCEKVCEESIFSNGVTYAVAGGIGLVVVIGLGFIGRKFYRALPAERTRDNYL

SEQ ID NO: 298 - protein, 351 aa, Toxoplasma gondii
MDALKTVFNRRIALPVVVAAALLHNSAEALQSPGLRRQLVNSHSFAEVETTGYSCFEKGKEYVGFSLTEFAKVGDAALCQQRCNQHPQCGFFTFYSNENRCVLQSRKPSQENNNANAVSGPKRCPLCLVDNYDFRGETNMHKSGAPGLNTLLACQQGCAAEPKCKAFLFEKRPRTCHFKTSDNYLKSFHPDTSYIAGPKTCTDEHWCIMKDIGYKGTDSKATKANSAAECQQMCLNDERCDFFTWQQAGKHCWFKAGASTASTKYNRAGDYSAPKHCGLPTTCVKERTKYAGETVATFPKSEVGTFESCQMKCWKTSKCVFMHFNNDGCTLSGINATAQTDANSKAGDITC

SEQ ID NO: 299 - protein, 351 aa, Toxoplasma gondii
METVTTLFNRKIALSFVVAAALLHNSAEALQSPGLRRQLVNVHSFAEVETTGYSCLEKDKEYVGFSLTEFTEVGDAGLCQQRCNQHPHCSFFTFYSNGNRCVLQSRKPSQEKNNADAVSGPKRCPLCLVDSFDFRGEANLHHKGAPGLNTLLACQQGCAAEPRCKGFLFEKRPRTCHFKTNDNYLKALDPDTSYIAGPKTCTDEHWCIMKDIGYRGTDSKETRANSAAECQQMCLNDERCDFFTWQQAGKYCWFKAGASTASTKYNRAGDYSAPKHCGLPTTCVKERTKYAGETVATFPKSEVGTFESCQMKCWKTSKCVFMHFNNDGCTLSGINATAQTDANSKAGDITC

SEQ ID NO: 300 - protein, 603 aa, Toxoplasma gondii
  VARIANT 317..560: note = Xaa can be any naturally occurring amino acid
MDALKTLLNKGITLAVVVAAVLLQIRAVALQYPGLRNQVVNAHSFAEVETTGYSCLEKDKEYVGFSLTEFTEVGDAGLCQQRCNQHPHCSFFTFYSNGNRCVLQSRKPSQEKNNADAVSGPKRCPLCLVDSFDFRGEANLHHKGAPGLNTLLACQQGCAAEPRCKGFLFEKRPRTCHFKTNDNYLKALDPDTSYIAGPKTCTDEHWCIMKDIGYRGTDSKETRANSAAECQQMCLNDERCDFFTWQQAGKYCWFKAGASTASTKYNRAGDYSAPKHCGLPTTCVKERTKYAGETVATFPKSEVGTFESCQMKCWKTXXXXXXXXXXXXXXXXXXXXXXXXXXXXXXXXXXXXXXXXXXXXXXXXXXXXXXXXXXXXXXXXXXXXXXXXXXXXXXXXXXXXXXXXXXXXXXXXXXXXXXXXXXXXXXXXXXXXXXXXXXXXXXXXXXXXXXXXXXXXXXXXXXXXXXXXXXXXXXXXXXXXXXXXXXXXXXXXXXXXXXXXXXXXXXXXXXXXXXXXXXXXXXXXXXXXXXXXXXXXXXXXXXXXXXXXXXXXXXXXXXXXFRKPVASICHSPRTKKGDQTVSHEIVRPVNTCRRVTPERGDSE

SEQ ID NO: 301 - protein, 769 aa, Toxoplasma gondii
MRLQREAVFGLMFACGMWMWPSEVAGGGWSIVDALRKRYDTSRGGDANGVDTSGVEDVIQSESAIGAAEGCTNQLDICFLIDSSGSIGIQNFRLVKQFLHTFLMVLPIGPEEVNNAVVTYSTDVHLQWDLQSPNAVDKQLAAHAVLDMPYKKGSTNTSDGLKACKQILFTGSRPGREHVPKLVIGMTDGESDSDFRTVRAAKEIRELGGIVTVLAVGHYVKHSECRSMCGCSGTSDDDSPCPLYLRADWGQLATAIKPMLKEVCKTLPQDAICSDWSAWSPCSVSCGDGSQIRTRTEVSAPQPGTPTCPDCPAPMGRTCVEQGGLEEIRECSAGVCAVDAGCGVWGEWSAWSASCGNATRKRERTRYNDPPPQGAGRRCENQDPPVLQEQTEEATLAPCITIPPTPPEWAAWSDCTVTCGGGNRHRVRNALPPGLGSQNGESDESLVSKLWPGTDLRQEEACNTSPCPINATCGQFEEWSTCSVSCGGGLKTRSRNPWNEDQQHGGLSCEQQHPGGRTETITCNPQACPVDERPGEWAEWGECSVTCGDGVRERRRGKSLVEAKFGGRTIDQQNEALPEDLKIKNVEYEPCSYPACGASCTYVWSDWNKCVCPMGYQARHAAVKFDYRNKPCDLPTFETKACSCGETNPVPSEGTTPGAPGATGPEQPNQRPLPEGSDENETPTNEEGEQSKKESGSGIAGAIAGGVIGGLILLGAAGGASYHYYLSSSVGSPSAEIEYEADDGATKVVMEEEKETLVPVDDDSDMWME

SEQ ID NO: 302 - protein, 383 aa, Toxoplasma gondii
MRGGTSALLHALTFSGAVWMCTPAEALPIQKSVQLGSFDKVVPSREVVSESLAPSFAVTETHSSVQSPSKQETQLCAISSEGKPCRNRQLHTDNGYFIGASCPKSACCSKTMCGPGGCGEFCSSNWIFCSSSLIYHPDKSYGGDCSCEKQGHRCDKNAECVENLDAGGGVHCKCKDGFVGTGLTCSEDPCSKRGNAKCGPNGTCIVVDSVSYTCTCGDGETLVNLPEGGQGCKRTGCHAFRENCSPGRCIDDASHENGYTCECPTGYSREVTSKAEESCVEGVEVTLAEKCEKEFGISASSCKCDNGYSGSASATSHHGKGESGSEGSLSEKMNIVFKCPSGYHPRYHAHTVTCEKIKHFALDGAGNHDTTTYVARRRYPASL

SEQ ID NO: 303 - protein, 580 aa, Toxoplasma gondii
MRASLPVHLVVCTQLSAVWFGVAKAHGGHRLEPHVPGFLQGFTDITPAGDDVSANVTSSEPAKLDLSCVHSDNKGSRAPTIGEPVPDVSLEQCAAQCKAVDGCTHFTYNDDSKMCHVKEGKPDLYDLTGGKTASRSCDRSCFEQHVSYEGAPDVMTAMVTSQSADCQAACAADPSCEIFTYNEHDQKCTFKGRGFSAFKERGVLGVTSGPKQFCDEGGKLTQEEMEDQISGCIQLSDVGSMTADLEEPMEADSVGACMERCRCDGRCTHFTFNDNTRMCYLKGDKMQLYSSPGDRTGPKSCDSSCFSNGVSYVDDPATDVETVFEISHPIYCQVICAANPLCTVFQWYASEAKCVVKRKGFYKHRKTGVTGVTVGPREFCDFGGSIRDREEADAVGSDDGLNAEATMANSPDFHDEVECVHTGNIGSKAQTIGEVKRASSLSECRARCQAEKECSHYTYNVKSGLCYPKRGKPQFYKYLGDMTGSRTCDTSCLRRGVDYSQGPEVGKPWYSTLPTDCQVACDAEDACLVFTWDSATSRCYLIGSGFSAHRRNDVDGVVSGPYTFCDNGENLQVLEAKDTE

SEQ ID NO: 304 - protein, 181 aa, Toxoplasma gondii
MLRPTVRSSLLSLGLTVILYLALTGSADALASHLRSRHMEAGRRTMDTQNDVESAGRQSEPMEAADRQAEHPGAPTQSEMKEFQEEIKEGVEETKHEGDPEMTRLMVTEKQESKNFSKMAKSQSFSTRIEELGGSISFLTETGVTMIELPKTVSEHDMDQLLHDILAAGGVVGLDSEVKLA

SEQ ID NO: 305 - protein, 349 aa, Toxoplasma gondii
MRLFRCCAAAVVAAESLLWLKNGSPFFAFLPGNGEIADNCSGNPCGGTAAGTCINTPSGYDCRCEPGYVLGVENDQVTCMMPSGVPMANFVQLSEKPAACSSNPCGPEAAGTCNETNSGYICRCNQGYRISLDGTGNVTCIVRQESGCEENGCGPPDAVQSCRRLTGTAGRLCVCKENFIATIDASAHITCKRVPPHYRKPPFEFGKGGHPVDSEPSKRQREDEGESREPESDSTEPGRDQERRTPLEESQEPEGSTPDSQQSRGGSGSDSTESEEQGKEREEGSGHAGAIAGGVIGGLLLLSAAGAGVAYMRKSGSGGGEEIEYERGIEAAEASEVEVLVDLDSKTWD

SEQ ID NO: 306 - protein, 340 aa, Toxoplasma gondii
MGGWESKDACESGGTAFCGTVANSAGCIALSKEFYCTCLPGFQPEGRRMNSSCVDIDECARGIGLCFSKIENSECVNTPGSFECRCNEYRTLKNNVCEDINECLDNRGGCAEHTDCINNDGAAVTCRCLPGYTGNDGKPGRACKDINECEEPDHCPENSVCVNTPGSYRCECKTGFAKDAEGMCTGKDFCVTGENGCDPNFATCTPVVGSYACACKDGFQGSGRKGECKPLPGSEYKACELLGLHCGRYQGCASDNAGSYRCAALTKVQQVKVLLSEGPGTETPLWLWCCVALAAVIFVGAVVYGVRYFLKKWKKTNESEDDALLSGYGYDYGAAHSFRG

SEQ ID NO: 307 - protein, 684 aa, Toxoplasma gondii
MKANRIWCFFAWRMVVRASFLKEMDSIFVSAIRQNVQHTHSALLAKLKEPPDPDDENSWLCRISKKYDACGSREYSDKGLKWTFCPEDFCCSKTACFYGSCGSWCHDNWALCSSSIIYHDEYSYGKCNCKRFQENCDVNAICVHANREDGGAYCQCKEGYWGDGKSCKIDFCQLQPCGAGTCTRTDEGYKCDCPETHKLIVVEDKETCKAKPDFCAEEPCGPPSMVENCVNTDDSYECVCKQGYEVRNGRCEEIDLCADKPCGPDEGVHECVTERQPKLRYRCTCKAGFDLTTLPDGVSQKCLKNFCYEEPCGTRDLVESCKSKAYGYSCLCAAGAMVQVINGKEKCIKADLCRNDPCGPETAVIQCYSHGTSYRCLCKAGYTEVFVNGKSSCQKGDPCTLNMCGGNEAVQECTTDGTAYGCTCKPGYSIAIKHGQKFCNPEEECASHCGSAAAVKSCEILDSGGYQCTCNPGYVMRYSDYVKGCVEGNQCSLNPCGEQEAVQRCIPEGDTYDCECNPGFVKRVLPDGNFICADPASCVGNPCGSSDAVDACIAGTSTYTCRCKDGYTPQSIGSKLQCLPESTDQTDFDSKHKPEDNKGRYSKGTIALVVVGCVALLGIIAGGISYARNRGGERDDEDLAPPPRSTRERRLSSMGEGFENASWASSVSMIPSAPAPPPSGGIWS

SEQ ID NO: 308 - protein, 300 aa, Toxoplasma gondii
MRVSFNVPLHRTGFVLVCVIGSLCWCIAPAPECVFPATGLGPAAWNHPGSLAQMRAESKGVLSVTGICDRNPCGPHGNCIPNLSTYTYTCSCEGGYVEAAVSGKPTCQRKDPCDTSPCGTKEAVKECRPNGQYYACICQAGYQVVSTNTGSRCQRIKSTTTPCSSQPCGGPEAVEACLVTGPTTYSCTCASGYETITTEQGERCEKTDPCLSNPCGASKYVQSCTATNTGYTCECVKGAKKTGSDSAPMCVAGESDMTQWYVAGGIGGCLCLFAVVYLTSSRQSPNSNDALYAHDFEGMY

SEQ ID NO: 309 - protein, 999 aa, Toxoplasma gondii
MVPLSRMAMVSVAYFILGALVYGSANVFGEMQPRQLAKSSTDDPTIHDEGHGAAAPSTPRAGTELMTPHPLASRAKAVTSAIIQESKSTLFNTGHVTTTEHAPKNPGLLGKPVKQTEALQLASPEKGVTTMEPKAASQHADRSGNPAVKKSTSGAQQAAAQSGKVLTKLTPIEKNPAPLHRQPMTRATPVGPKPADPAGKAVKKAATGIPKPAAPGGKAVKVTPVARKPVAPKAAAPDGKAVKKATVVVPKPAAPSGKAVKKPVVSVPKPATLGGKAVKKPAAGVPKPAAPDGKAVRKPVVGVPKPAAPDGKAAKKPASGVPKPADPAGKAVKKAATGIPKPAAPGGKAVKVTPVARKPVAPKAAAPDGKAVKKATVVVPKPAAPSGKAVKKPVVSVPKPATLDGKAVRKPVVGVPKPAAPDGKAVKKPVVGVPKPAAPDDTGINKATLVTRKPEAPDVKVVKKATVVVPKPEAPDIKVMTDQTPTTPPSPPVRARAASATTIVTAPAPVPTRPVLTTTSTAATVTTIKTETPRAASRLQQDLNAFCTTQFQKLCSETIDGGRYCGVSGAVARFGPGGHDSDSQWRCYEESIMNTTTKGVQCMDDCGNQMQCVGAVSVKTVATPPLRALSAFISQRRWIYCSSFQRSADALCNFKRTGNVARYDPGRTRWMCFNPVDISLEGQSYCANNCGGFTPCAGGLSPGEIPTRTVYIIQQSDTAEAFAALHPCRHDEICIPSTVYPPACVKAHKIIAIQQLSKQQEAMDNYCQTEMDQMCRVGKWTTYCYQLWLSRMVSTEEDEEPKWRCYPFALLNFSDLSTCIDGCSNRVPCHGAPSPTSTLTTEFSKLKTIAENIAFCSPFQKAANDHCNKRYGEGWVARQDVTTDDWACFQTTKLPTYRWTGCVDNCGNTSLCAAGVPEQLHSAAAEAFVHPDPALERVVESVPSPCLTGESCTPTAMNPPYCSETRPNPQPAPLRDHTIRNALDCSKGAPLARRNPTSK

SEQ ID NO: 310 - protein, 608 aa, Toxoplasma gondii
MYPIAPSFAMVGSVGSIRRTSRCPSKTASCFRLYVFPLVPPTNMAKAKTVGVRLIGVTTCVAFAASLQVAVTGALGAGPAYRVAQRPGSLHFARMHDRFVNKDREAEEHKVAALERNTTPENISSQMDSNKTTAPSPEPGTSKRAQLKTTSAASATRPLVSQLQKDVDYYCAKRFEQQCAKGVLGKTYCTDGLVVGRYVSQGSKLEAGWHCFKGAEIAHSQRQVKCVDNCGNLMKCFGDVNSSQTAKVAMPGMDEWIDKRKWTYCSPYQQAADALCNLKHHGDVARYDHVRQRWMCLDLNDVALDGISYCADNCGGPTSCVGGLLPGELPQRSVRIVRHRDMESAFEAIQPCPNAGDICVASTVNPPACLPQVQTLVLQRLPAQQRALDTMCQDAMDEECRKGKQTEDCFGLWLARYELESSPGGAGAWRCYPESRLDFTQLSSCIDGCGNPISCRGQPAEVSPAFIDLPALDKVAGDMSYCSAYQRAGNAYCAQKHGPRWVARQNCNTYKWACFNLDNLPPNGWVGCAGHCGEFIWCPSAGTGDAVSDSVQDEDLESVILAVPDPCLAGEKCEPTAQEPAYCSVSRPNPHAKVKKLSVFEDRRLRGY

SEQ ID NO: 311 - protein, 654 aa, Toxoplasma gondii
MKLECFGLAALSAALFAGKAEAVAANCFKADTDYFGYDVDKIFVGAATESAEKCQEACRNREDCFYFTYIPERKQCYLKDNQAPNGTVTNPLAISGPKFCYPTGTCFEYMTDYVGYDVQKIEDQSVSQADDCQRLCASNDQCFFWTFIPSKHNCYLKHNGATVGRTPHSEAISGPKSCTGGSPNDQGVPCYEPDTDYFGYDIKIFDNNLVGTAAECYGLCLSFAECKFWTWVPALRNCYLKSEYAPLGRVHAPGTISGPRDCNGSNLPPFVPPPPIYPPTHPHPPPSPYPPYPGHTSTTTPATPPAESCYKAHVDFPTGTLKQIVTDDAYACQKLCQAEAACFFFTYKADILECALKGSFAANAPIPRRHALSGSKYCADKMPPEFQPLHNHVPTPPLPPHHAIPPAYPGPNPMPVPPTPGFEPSCAELNVEYVSDILSVLGADSPKECQTLCKLTASCNFFTYRSDLYRCYLSKSKGTPSSRLNAVAGPKECPGEGSAVPPTASTCFLQNKMFVGTPLSSIEAKSAEQCQAKCAGDPQCYYFSFQVMSSNCHLFRQVNGAKEEGTCVSGPKTCADKPTDPCFKEGFYFGQVLKRHNAVASAKECQTLCATFPHSCVGFTYESASQKCFLMSQTDGLELSDGFVSGLRQCPATP

SEQ ID NO: 312 - protein, 470 aa, Toxoplasma gondii
MSHENAFHPSRMQSFSLRCRPSSLYHAAGSDEEPAAVSTPAAGRTSGVVQAVQRREGKAFAAGQPVRCRALLTRRSSRLLLAGRLHLRSHHALTSIAAVFLMFAAYCPSHIDDLGKSGMFSAKWADAFKLHSSNTESALLQTHSHLMKTDPILPSGSEWICREAYNDEGCGTGHNASLGTTEAYCQEEDCCLASTEKCTRIPGLCAVDSFLLSQYSWGKCNSSQCARCGPNATCGYIASTTTVRGGVYCTCKSPFVGTGASCVVEACKVRNPCGQGTCVPTSEAGKSYKCDCKPGYTEVSTGTSFSTCVDICKQYGCGSEGVQTCIGGIDSHKCVCKQGYRLSEDTARQRCVKNDPCTINPCGPSSAVEKCESQENGIEYKCTCKVGHVVRYVNGTQVCLEEGKPCSPPACSVDPPATTATSTSKPTNQSSGNDGEGVNAGAIAGGVIGGVVGIGICGAGAFFFMKKSQH

SEQ ID NO: 313 - protein, 717 aa, Toxoplasma gondii
MCLLSSLFSPSSVSASLVSVSPFLRSLLPQSFVCLLSYPALDLIHSVSASELDTALVSVPTSKAVSFTEFDIQQPPSDNSWLCRFSFWDGPCVDRQHNGIGPWRFCPSGSCCSKVKCAYGSCGGSWCAAWNSGLCVFHNGDYESDRCTCEKYGGQCSKNGSCKRLDTPEGGAFCYCNPGYVGDGRTCESDPCYGSPCAPGTCSRMGNSYVCGCPPGYTQDTSRGHARCVEKADSCRAQPCGSDTVAYDCVSFDSGAYECICKDGYASNGTKCEKQDWCKDNPCGDANAVYDCISHETGYTCQCQKGYIQVVTDEGQQKCAKNPCSYDPCGTSDLVKECINKSDGTYGCVCADIAEITTHEESNQITCARKDPCLGNPCGAAEAVQQCFVDGPTYGCVCASGYTVVPDATGAKKCVFGDPCQLGSCGPDEAVDSCSTNGQAYTCQCTPEAILSTSANGIQSCVMRDECEENCGATEGVTRCEKISENKWDCLCKAGYMLKYVKGKKMCHKADACSVNPCGTAQAVADCQVDVGGDGYTCVCNSGYELRTQSDNTQLCAPPNSCIGDPCGKAEAVSMCLPTKDGYTCKCNANYTLQTMYGKPRCVPGPSSYDSDEEETSSSSSTTSEEEGTSTVMIAGCVVGGVVLLGAVAYMGRRGNDEEEDEQPRPPAGGPQGPYMGQQGYGQGQNLMPPGMDPAMGRNSMMARQQYAMDTRNSFWG

SEQ ID NO: 314 - protein, 759 aa, Toxoplasma gondii
MAGPYRYSGLDRFSLPCLSPASALRVVGSSETKAHLVKMRGARDALLSLSRISLLAALAGLACCRAMVVLSSAFATTVVEKHPGSLHPESGEAPATASSLVQIEAAQHTSLVSSAAARTVFQPPSEESWLCRLSTNNGPCSKNSSDPEIGQWRFCPPGRCCSMSKCGPAGCSIGWCEGWGNPLCWIKDDTYSDGKCTCEKYRDRCSPNADCLEYNVERGGAYCVCKDGYYGDGKVCEFDPCSGNPCNPGSCRRHGTSYSCACPDTYAVTSTSSGERCEVKRNFCLGEPCGSSEVAADCVSFDSGEYECICKSSYVSDGKGCVKFDPCEYNPCGTSEAVKSCTHVNGDEYKCECHEGYNLTNDSDGNMVCAKDPCYGNPCGLPHLVASCARRTPDSTSSATYTCLCTAAGHLQVDPVTGAQSCTQGDPCASNPCGSDAVVDFCISEDDTYRCVCKTGYASVEINGRKQCKRGDPCELKVCGEDHLVESCSTNNKLYSCDCTSLAIKGLNDEKKPVCISREECESVCGPLKGVKQCNQKMGVLECVCDMGYILSTQNGKKQCVQGDACLNQPCGTPESTLACTANGSHYSCSCNEGYELRMRPDGTQVCASAGDCTGSPCGASTSIGVCTPGVDSYTCTCVSPFELQQTADGKPTCGEAFTTTTTQAVKDDSGSDNSSYTGLATGAVIMVLALGAALWFSNSQEEQTMGSGGMGGMDDPMQGPMGPMGMGGPMGPGGPMGPMGPPGPRQSYAAYPSGSMWS

SEQ ID NO: 315 - protein, 351 aa, Toxoplasma gondii
MDALKTVFNRRIALPVVVAAALLHNSAEALQSPGLRRQLVNAHSFAEVESTGYSCLEKGKEYVGFSLTEFTEVGDAALCQQRCNQHPQCGFFTFYSNGNRCVLQSRKPSQEKNNANAVSGPKRCPLCLVDSFDFRGEKNMHDNGVPGIKTVVECQMGCAAEPKCKGFLFQHKTKQCHFKTSDNYLKSLHPDNEYVAGPKTCTGEHWCIMKDIGYEAMYTRRSQTNSAEECQNKCLNDEQCQYFTWQVSNKHCWLKHGPTIANSKYNRQGDHSAPKHCGLPTTCVKERTKYAGETVATFPKSEVGTFESCQMKCWKTSKCVFMHFNNDGCTLSGINATAQTDANSKAGDITC

SEQ ID NO: 316 - protein, 407 aa, Toxoplasma gondii
MKTRSFNQAELKRERVDVRKCEKNDTVSCAGVSFCSEGLELRRQDMDMTPFVEDNAEAHVCYEPDVEYVDHTNLAIEGGHVHSPSSCQDLCQRYQDCYFWTWNSVKKDCYLKNSTALFSRQKNYDTRNKISGPKWCMMPHPLRCYEVDVSYEGYDIIKNPLTNIRSVLDCHRACVELEDCRYWTWTADSMECQLKSANALRAWRRSFDTIGKISGMKNCGVCTELGTDYYGHDVRRVETKSIVSSEQCRDLCIKDANCFFWTWASDWKNCYLKGPDALEAWRRDNSTRSLVSGSKFCPMDRDLRLASLSQSPFMYPAFYIHNPPPCYEIGVDYAGHDLETVDDEKVLSVQDCQQQCQTREGCVYFTFDTVSKVCYLKGGGALHDWTKNETTEKLISGPKDCSCSGLH

SEQ ID NO: 317 - protein, 1161 aa, Toxoplasma gondii
MFVVDLSLSGNMRSLTHGKSIHRSSIVVVTHCSHRLSLSPLNRPALFPSHSDRYTVPWRCRPSSWRLWITFVCLSTLHMFGLSSAVKRDGEVPTANLRASLSPDSSKENAMLLSAIGGIGPTESRLQHIPFSTTRYLPIRSHVLQSTVERIESPEALNEVPTKVERNEFTEKGDKTEQVLTAQADHKSLLEGRSESTSTAPDDDFDFLFEDDTPKKPKSRVNKGTSSDETSPGDRSSGEGSSDSDSLLSVVHRTKGNATQANKNQTRITHPKSKAQHQKKVTKKQGIPGSDSLGTSSADFDFDIDSSSNTQADDSQRQSLGDSSALDLFGSDTGDTGDIFGFSNSSSDGGNAAANDGGLFSSSGMGPTGASDETSANPLGSILGGVLNPFAQQQSITPMTDKADEWSKENMKAFEEKMPKKMRDDGSPDSWYKQAVPQESVADLNRMRENRRIAEENRAAAPLSAVYTKATKTVPAINYLGAGYDHVRGNPVGDPSSMGDPGIRPPVLRFTYAQNEDGVSNDLTVLQPLGGYVRQYVACRQSETISELSNLSDYQNELSVDASLQGGDPIGLNSFSASTGYRDFAKEVSKKDTRTYMLKNYCMRYEAGVAQSNHFKWNVTIAFAAGVSQLPDVFDAHNPECACSAEQWRQDQNAEACTKTNVPIWISFIEQFGTHFLVRLFAGGKMTYQVTAKRSEVEKMRNMGIDVKTQLKMQLGGVSGGAGQGTSSKKNQSSSEYQMNVQKETLVIGGRPPGNVSDPAALAAWADTVEELPMPVKFEVQPLYHLLPVEKQEAFKQAVTFYSKSVGLTPQDLSALTGVTRNLPKQLTQATQVAWSGPPPGFAKCPEGQVVILGFAMHLNFKEPGTDNFRIISCPPGREKCDGVGTASSETDEGRIYILCGEEPINEIQQVVAESPAHAGASVLEASCPDETVVVGGFGISVRGGSDGLDSFSIESCTTGQTICTKAPTRGSEKNFLWMMCVDKQYPGLRELVNVAELGSHGNANKRAVNSDGNVDVKCPANSSIVLGYVMEAHTNLQFVRDKFLQCPENASECKMTGKGVDHGMLWLFDRHALFGWIICKTVNEPAMHVATDVGKAKGNGKKRKGKKGKNKTNAPNEVEEGQQLGADSPSQVSVPADADSGPTSKTMSSLKLAPVKLLDL

SEQ ID NO: 318 - protein, 351 aa, Toxoplasma gondii
MDALKTLLNKGITLAVVVAAVLLQIRAVALQSPGLRNQVVNAHSFAEVETTGYSCLEKDKEYVGFSLTEFTEVGDAGLCQQRCNQHPHCSFFTFYSNGNRCVLQSRKPSQEKNNADAVSGPKRCPLCLVDNYDFRGEANVHHKGAPGLNTLLECQQGCAAEPRCKGFLFEKRPRTCHFKTNDNYLKALDPDTSYIAGPKTCTDEHWCIMKDIGYRGTDSKETRANSAAECQQMCLNDERCDFFTWQQAGKYCWFKAGASTASTKYNRAGDYSAPKHCGLPTTCVKERTKYAGETVATFPKSEVGTFESCQMKCWKTSKCVFMHFNNDGCTLSGINATAQTDANSKAGDITC

SEQ ID NO: 319 - protein, 293 aa, Toxoplasma gondii
MARVRTLADLRTEDEADEHTPLYNAETGSRDSDSTSSGGAAPRSMPIRFLELLFPHFSLRSVVLAISIVDWIFYIVTVCLDTELPLIPAANILVHFGANYPPLIKQGQVWRLLLPVFLHANFFHVFFNVFFQLRMGFTIERRYGLLKFTGLYFASAIYGNLLSATAFFCNSLKVGASTAGFGLIGIQICEMALTWHRMRHRDRMLTNMVSFVLLMVLLMFTLNGGSIDQMGHLGGLLCGFSIGMLYNKELNDKPVWYPWASAAAIGILLALPAACFPILYAVDRHCHRDLSYI

SEQ ID NO: 320 - protein, 534 aa, Toxoplasma gondii
MEVSRSHRWPLGSSPHSSSPALCWSCVSRFSRSICRRGGRFPPLYFSRSSFLLRVLPLVLYSLVSGPSPVSLSFSPSAFSCFSPPFPLTVAAESPSDAAGDASSSLPDGEPLDSTSETAASESEKRSEDKTQLTEEQMKEKARKAAEAAAAATAKALELGVSVPPLVTASAGGSDILSTHSAASDAADAADRTASGFAADPDKSAVVRADDMRYQSNPENSTDGEHASSEEEEKPIPVDGGDCIIFAAEEGDRDSCSCPEGFVLCNWQDVQMIQRRLARIERAARAAAVRVLLLHLDKLPAEELETAPASRSPSAKESNSASEADAKVGGELRGSSSASGDQATDDSRKEEGATDEAETRLEAMLPTDLAEFVKQTAKAAMSLHAPGWVKTLCDDDARTGFKSYGVQIDYEVEAICKDEGTKDAPAVDFIYELNTYVPLSRLRKLQEKDSSWTPRHCLVADFYLCKRLPHKRKKVNCEMSGWSEWSPECVNGTQMRKNRITRSGQHGGRACVWDGKQPVHAEVTELRSCNQPSS

SEQ ID NO: 321 - protein, 761 aa, Toxoplasma gondii
MGSSHAIVACAALIVLLSTNARGLRVRKDKDVLLATSFLSHHGEYQNPTGTYNLIKEIRRVEAEIEDEVETLNRDRRLHRGHNKYADDDIRQGLKGEQDMGASENIPVAELEPQDLDREAKYPVRMLIVDKRSDDDDEETKTSFVETALHSDLAQRVVKELNGHVDVLRESGVVLVDLPAQTTDKQLQELIETARAQGTIVEPDHLVQSVNTSSKGSNDPLLDRLWGMDALNVKEAWDIITTGEPNMGGRRPLVCVLDTGIDYNHPDLRDNMEVNQAERDGTLGVDDDNNGEVDDIYGANMLSKENDPADDHSHGTHVAGTIGAHGNNGIGVAGVAWAPRLLPCKFLAYTGRGYSSDAVRCIDYCVKRGADIVNHSWGGSWPSEALREAVVRTANNGLIHIFAAGNDGVDIDQTAFYPAAFSTEADGLITVANVKGDPDHGGKRIIELDRSSNYGIQRVQVACPGMWILSTVPTSGSSQEPYAEKSGTSMAAPALSGIVALMLAVNPGLSTRQVREGLRQCSVQQPLLQGKVEWGSMPDAKRCVEYALTTHAEGRHKSFIREPSTETSTPPPPPPAQPTPQPQPHPPPQPETPPCAPSPPPPTPPCAPSPSPPTPPPGSPHKPEPQTPVYPEVPRSTRSPPPSPPPTESAPEAPPSDTPSCRVPPCSSSPRSGSQPKPPQDNTTTPKMPSLSSPPTEHSTAQPPKHENDAREQEPPTDEDDFSSVKGKKLGAYESDGSPRASSCAGAGVLGVFFMVVGLTV

SEQ ID NO: 322 - protein, 2340 aa, Toxoplasma gondii
MVSARKFLTSFNREQGGENSLCFSPFFSPLFRSSVAEAETRPDSSSDPVNDGDSTSGGETPDPLPTLAEVRAALASTVAQSRTFPRRLAAKNGEQVEDGDEELAERKRVRKPPRDTSAYSVFSVPALKLEGVAIADQEEAVGSFAVSVGCGFFHDPPAIPGVAHQLEHLIFLGAEGEEAATSWDEFVSQRGGTHNAHTTAELTTFFVAAPTDTLPELLDRLLLHLFHPLLAAEQFASEVMAVQFEHEKNQPDVARVLLELAMAVTPSLASPASSATQDEVPTSFYRPEVARKFGTGDFDTLCKTPLEQGLDVLKALREFHGKCYKPENMTIAVRMGRRSVPIIVEGAVDASGQSLRIPAEVEAAAEREAEKRSVYTPKEIGEMVVRILSKYVQANSPETEAHADKTKTPHNKGNSFSASSSSDLTPQRTPSDASSSASPSVSSAPASSQAKRRNEVLKTVRLHAGERQKEASQVASLLEAAVGEDAYRSRPNATAEDSSPTDGESDASGKLYRVFRQHGWGKRLLVVWERRTNWTVRGYDEVFQPTALLEYLLEYPGEAALLNRLKAQGLIADAEYVDYTTSQKAFVALLFELTDEGEEKFEDVVSATLAYAEQLRTSVTETYILDFFDEFARVANRSWTYKDPEDAVSAVIAAAEKLAVLPQRPDMVIAGGEFVSLPGDRTLLVDVLKEELESFGRARASAIVVLPEDTARGSAEVVHAFRPYGVQFSVSALPSLAQAEKVGERISRTDAAEKMELLHAELASEDLISHSMIESSAFPLPPVLACNVAATVALTPRRVPEICQSLSPVQFPIKGGRSDSELRESSELPLGPRSESLEDAEVEEERKKLEASGPPCVLVTEESFSVFWKNAEPFNKPIVRGYFKLRVSAEDATAQNTLYGKIFATLAGERARTALASFQGCGVDLLMSFTNGALVLEIQAFSELFAPVLARLIEVLKESQDNVKQSDFNKIFNTLKVQLSDFSTVTPFELALDVALSVVRRNRFSQLDLRSAVTDASSQFEDFKVFLEKVLTKNALDVFIMGDIDYEEARKLAEDFRAALSKQPLPFSESAGSEILNLADDIEIRFSNPIPEDATNAYVSLYVTHPPPDMMEMVVYSLIGEVISSPFFDTIRTHWMDGYVAAAAVREVPPAMTLATIVQGSQRKPDELERHVCAFLAEMEENIGSSMTTEAFLERLRWLSSSKFHRSATSFSDYFGEVTSQIASRNFCFIREQLARLATEKFLSCPAILKSYMNSLVDRANRKRITVKIEGNSSSSETASHQREIRAPSSTLPNRCGLPGLSPSASPSAEVRQAPSLSTQTSALRPRPLSEKRETTQSSEPEAPETSSQDGQRSVKANSPKPLNAAGSVGTAGKVEGKSRKVASRVDTPGNERRTYASLFGTQNVLRSSRIQSDFSSPIFSLGDDADALSLIQVEARVSTSNSKPKAVLGARRGDGQSPTVASPSGAAPKRPAPPAGPRDKSGEASETTGTEGMEVTEIASDVEGQAEEGDVPIEFLPLARQITPHILERCAADQNAAGAKRIVVDNFFTDPVEARRSILENLEAKLSSTSSLFSLSPSSHPSPPLWLAYSRSESCSIRTSTISRAEEVCGAWRESAPEAVLIVSPEQPPAGMPSLPPTLGDAEPPAAAVPLSPSGAETGVPLVPESPGSPAAAGRQAATKAPTESEASAATEGDHPRVGTSAEARTRQLPTAEQQTLEQRKALLEARLRRLEMQTIAQRAQLLKQRLDAMKQYGTRPTTIFNTWLGPHKRGFLQSVGGGTGASSGAFPVSAVSGRSSTATRTQAASDLHGSRRLPSALHQAADPLAFKRTLETLKWREQGLLQRQAELRTQLRKVNAFGSTAGDSTAPNLGLAEDKNLRLVENVTVASGASLGSRDQTAIAHQTDVLPPPRASIPTVPTLTPAPSPVAFAALPQIHQQLPGVDVGAEIPRPVTPVSTDISASASAFVPGSVQASLSQSPAASVKGAGAPPLPLAHQPFASLPPAPQLPQEPRVQEANVGSPSPPTVVPGVPTVGATAPTVGEGATTLGAGAPAVASPAPTVGAAPQAVTYTAPTMGAGAPTVASLAPTVGAAPQAVTYTAPTTGAGAPAVASLAPTVGAAPQAVTYTAPTIGAGAPAVASPAPTVGAAPQAVTYTAPTIGAGAPAVASLAPTVGAAPQAVTYTAPTIGAGAPAVASPAPTVGAAPQAVTYTAPTIGAGAPAVASLAPAVGAAPQAVTYTAPTIGAGAPAVASPAPTVGAAPQAVTYTAPTMGAGAPAAVASLARGPSFDYQAGVVSRAVGGASQPQAEQAASYVSDPASVARVSSASILPHAAVPVVHA

SEQ ID NO: 323 - protein, 376 aa, Toxoplasma gondii
MADEEVQALVVDNGSGNVKAGVAGDDAPRAVFPSIVGKPKNPGIMVGMEEKDCYVGDEAQSKRGILTLKYPIEHGIVTNWDDMEKIWHHTFYNELRVAPEEHPVLLTEAPLNPKANRERMTQIMFETFNVPAMYVAIQAVLSLYSSGRTTGIVLDSGDGVSHTVPIYEGYALPHAIMRLDLAGRDLTEYMMKILHERGYGFTTSAEKEIVRDIKEKLCYIALDFDEEMKAAEDSSDIEKSYELPDGNIITVGNERFRCPEALFQPSFLGKEAAGVHRTTFDSIMKCDVDIRKDLYGNVVLSGGTTMYEGIGERLTKELTSLAPSTMKIKVVAPPERKYSVWIGGSILSSLSTFQQMWITKEEYDESGPSIVHRKCF

SEQ ID NO: 324 - protein, 256 aa, Toxoplasma gondii
MSPLGFGAFLSPLLLFCVSPHLRTGVSRSFSSFLKPQKLQRFVSREYPRRRCLPSLHFTSRCFSTRLSSRKMAVKVLVPVAHDSEEIEAVSIIDTLRRAGAEVVVASVEDTEIVRMSRGVCVKADKLISAVENETYDCIAIPGGMPGAERCRDSAALTAMLKTHKAQGKLIAAICASPAVVLQTHGLLQGEKAVAYPCFMDQFPADMRGEGRVCVSNKIVTSVGPSSAIEFALKLIEVLYNKEQAKKIAAQLLYAY

SEQ ID NO: 325 - protein, 475 aa, Toxoplasma gondii
MFRLLVPTYYSYSVPLRFPFCKIYRYSTSNKMVAIKDITARQILDSRGNPTVEVDLLTDGGCFRAAVPSGASTGIYEALELRDKDQTKFMGKGVMKAVENIHKIIKPALIGKDPCDQKGIDKLMVEELDGTKNEWGWCKSKLGANAILAVSMACCRAGAAAKGMPLYKYIATLAGNPTDKMVMPVPFFNVINGGSHAGNKVAMQEFMIAPVGASTIQEAIQIGAEVYQHLKVVIKKKYGLDATNVGDEGGFAPNISGATEALDLLMEAIKVSGHEGKVKIAADVAASEFFLQDDKVYDLDFKTPNNDKSQRKTGEELRNLYKDLCQKYPFVSIEDPFDQDDFHSYAQLTNEVGEKVQIVGDDLLVTNPTRIEKAVQEKACNGLLLKVNQIGTVSESIEACQLAQKNKWGVMVSHRSGETEDSFIADLVVGLRTGQIKTGAPCRSERLCKYNQLMRIEESLGSDCQYAGAGFRHPN

SEQ ID NO: 326 - protein, 433 aa, Toxoplasma gondii
MLCIVERIAMPTRGVNPSAANGKLPPRTRSATGCRVYIHPMVKFISLLFAVFYARFFLLFCVRIQSTFPTMSGYGLPISQEVAKELAENARKIAAPGKGILAADESTGTIKKRFDSIGVENTEANRAFYRDLLFSTKGLGQYISGAILFEETLYQKSPSGVPMVDLLKAEGIIPGIKVDKGLETLPLTDDEKATMGLDGLSERCKKYYEAGARFAKWRAVLSIDPAKGKPTNLSITEVAHGLARYAAICQANRLVPIVEPEILTDGSHDITVCAEVTERVLAAVFKALNDHHVLLEGALLKPNMVTHGSDCPKPASHEEIAFYTVRSLKRTVPPALPGVMFLSGGQSEEDASLNLNEMNKMGPHPFQLSFSYGRALQASCLKAWKGVPENKAKAQQVLMERARANGEAQLGKYGGGAGGAAAASSLFEKRYVY

SEQ ID NO: 327 - protein, 489 aa, Toxoplasma gondii
MALLTTVRDSCFYFPQKTASRHVFLACVTALLQRSDPTFFCEQSTSMQPEADSAWQPDAGTVSLLTRVKDLRVAIAPVLWKSAEAHEHRHHPSACCGPVERNLLQYTARPAPPPFPDLAPSLLWPRARLRTKKIAGRSYTTPDCRHFAKMVCKLGINGFGRIGRLVFRAAMERGDVEVLAINDPFMSLDYMVYLLRYDSVHGHYPGEVSHKDGKLIVGGKAVTVFNEKEPTAIPWGQAGVHYICESTGIFLTKEKAQAHLTNGAKKVIMSAPPKDDTPMFVMGVNNDQYKSSDVIVSNASCTTNCLAPLAKIVHDKFGIVEGLMTTVHAMTANQLTVDGPSKGGKDWRAGRSAGVNIIPASTGAAKAVGKIIPSLNGKLTGMAFRVPVPDVSVVDLTCKLAKPAKYEDIVAAVKEAATSGPMKGIISYTDEEVVSSDFVHCKFSSVFDINAGIMLNDTFVKLVSWYDNEWGYSNRLVELAHYMSVQDGA

SEQ ID NO: 328 - protein, 116 aa, Toxoplasma gondii
MPKCMIFCPVAATPAQQDALLKDAEKAVADALGKPLSYVMVGYSQTGQMRFGGSSDPCAFIRVASIGGITSSTNCKIAAALSAACERHLGVPKNRIYTTFTNKSPSEWAMGDRTFG

SEQ ID NO: 329 - protein, 471 aa, Toxoplasma gondii
MRAGFSFALLAVGLLATAVVYSAAEEEAVTVLTASNFDDTLKNNEIVLVKFYAPWCGHCKRMAPEYEKAAKTLKEKGSKIVLAKVDATSETDIADKQGVREYPTLTLFRKEKPEKYTGGRTAEAIVEWIEKMTGPAVTEVEGSAEDKVTKEAPIAFVAELASKDSDMAKLFEEVANESRQLGRFLAKYGASDEKIYSLRYEEGTEAFTGKTKDELKKFVDTESFPLLGPINAENFRKYIDRDLDLVWLCGTEKDFDEAKTAVREAAKKLRDTRSFVWLDTDQFKGHAENALGITEFPGLVFQSKKGRFVLPEATTSLKDAAKISQFFDDVEAGKIDRSLKSEPVPEKQDEAVKVVVGKNFEEMVIQKDKDVMLEIYAPWCGYCKSFEPIYKEFAEKYKDVDHLVVAKMDGTANETPLEEFSWSSFPSIFFVKAGEKTPMKFEGSRTVEGLTEFVNKHGSKPLKKDDKGEEL

SEQ ID NO: 330 - protein, 645 aa, Toxoplasma gondii
MAEKALTRATTPTGSWRRPEPVDRADPENRRDSLHAGAPYASEGQGGRKTESGRSPESLSLFSRQFLAESRTPQSSWSRSRPSSSAPASSLRPSPSSDPSPRASSSSSCPACSCGLSSCLSTDSPGSRTSASGVPDKFKRSCAYSGKPPPSKKRRLLPAAQLASPTCTLKGHVYRCPLERKHSLPTPSVFLEKDGSLSSSALRILSRLHVKYVPSEDPHKVTSGSSGFVRTASFSASVKSGQLGGRASPPQTKTGLNPLISLLCCLPLLEPSSRPSCFFFLSPSALLTPSSSRASSSSSSKPPYPSDRVRPGGLTGDAFKLSRLQLLYDSLPLCCQPLACSSSLVSRFSSLDQSFGVPSASPAFVPINTWAFFLSLLATVTSSPLPCVSPSSVSPSSSSFESSDGFSSLSRSASPRFKRALVFVFEFIPTLCCSACCEADHAESLRRRGAEPTANAVECRGSQGSSETSRIENVQREDDAGGCRHGAGEGERRTEEKEGEHRLEAGSTEQTRQQGREPESNDDAGMPVSDEQRGDPQRPTGRVEREERRAANENDGFWARICGVENSQFIRVCRERFSRVVMLLPPIPEASHIMGCEEIKGEQSGREETHSQENIEADAELAWTTWIEQGGRVAELTNPAFDRPF

SEQ ID NO: 331 - protein, 182 aa, Toxoplasma gondii
MKIQSIVTKTTKAALTAAIDTLLAKGADAPAVSSFHEKGGAVPVLCVFIVRAYFVGSYLVIVPLLCFPNFPLLERLAQHCSSGTLLKGEDTLCRDPKASSCHLHLRLRFLEVVAVCFVLPRKQADLRLPLYRFQAGVRRPCLHAPRALNEAPLKFDVALFVQFVLHIKAFCCESHDSCCRPT

SEQ ID NO: 332 - protein, 216 aa, Toxoplasma gondii
MKVASGSAIVGLLLGAAVPVVYAGPHGGHRPQKKGGYTTTTTLPPNPMDVRTECFQVPYSVEKTCYKDEHISRPYTCPSSYSEEVCSTQLAESRDVCTQLVKKEVQYQCPKATKQTLCSQIPVTLNKTCKKQVTNKVPSSCPKILTVPECEIQSRPSQDVCYESEAYTQEYDCWGSELHRECEVDMRVVDTQCNRIVDSPVLYEYEDTVVERVCST

SEQ ID NO: 333 - protein, 952 aa, Toxoplasma gondii
MHPSGGQFVPTPQRHGPDLTKSWGLINRDFALRTREWAVSQRSLVFPVAVAAVRGETAPIAGRASQCPRLLVPFSWVLFLEQRPELSLTKVVFLLWNLYFVSLSPLRPFTGSLHPRPVVKMVNFSVEQMREIMGNPKNIRNMSVIAHVDHGKSTLTDSLVSKAGIISAKAAGDARFTDTRADEQERCITIKSTGISMYFEHDMEDGKGAQPYLINLIDSPGHVDFSSEVTAALRVTDGALVVVDTIEGVCVQTETVLRQALAERIRPVLHVNKVDRALLELQMDGEEIYQTFSRTIENVNVIISTYNDELMGDVQVYPEKGTVSFGSGLHGWAFTVERFSKIYAKKFDVPKEKMMERLWGNNFYNAKEKKWTKTQSENTRRAFCQFIMDPICTLFTSIMNDEKEKYTKMLGSLGIELKGDDRDLTGKALLKRVMQLWLPAGDTLLEMVVRHLPSPFAAQKYRVENLYEGPMDDEAAQGIRNCDPNAPLMMYVSKMVPTSDKGRFYAFGRVFSGTVATGQKVRIQGPRYVPGEKTDLYIKSIQRTVIMMGKYVEHVQDVPCGNTCCLVGVDQYLLKSGTLTTLDTAHNIADMKYSVSPVVRVAVKPKDNKELPKLVEGLKKLSKSDPLVVCTTEESGEHIIAGCGELHVEICLKDLRDEYAQIDFTVSDPVVSYRETVSAPSHMTCLSKSPNKHNRLYMVAEPFPDGLADAIEAGQVNARDDPKERANALAEKFDFDKNAALKIWCFGPETTGANMLIDTTQGVQYLNEIKEHCNSAFQWASKEGVLCEENMRGIRFNLTDVTMHADAIHRGAGQIMPTCRRVLYACQLASAPRLQEPMFLVDITCPQDAVGGIYSTLNTRRGHVFHEEQRSGTPLVEIKAYLPVAESFGFTTALRAATSGQAFPQCVFDHWSTLNGDPLEKGSKMEELVHNIRTRKNLKPEIPPFENYYDKL

SEQ ID NO: 334 - protein, 689 aa, Toxoplasma gondii
MFFLSTSVIPGAAVFSVRFARNPTPCLLPRNSLPVHLRHTALTPRFLEHSNLAFGFFRRSISTGCSRTLRIKSTPVGVLFSAKMASRTPFQDAALSIVKGAACIALSLKTARTTQNVKFSKDNRCSITLGPIEVEPTAAEEALLKTLTKQKIEENCPFRVFTIPRDLATRMYQESYLDEFGIPANVKEVRLVVLPEWNINANMYPVLKSTGQIADIQFESVKFNEEKKQLCLSLHVVPGPDEQSPALAEEEKLGPEEIPSRAQVLPPSGVEGDDFGEGDDDQTITPWDVQAAEGGIDYNKLLRKFGCSSITPELISRIEALTGKRAHHLLRRGIFFSHRDLNLLLDSLEKRQARLASGKREDGPGSEGLSGPGFYLYTGRGPSSEALHIGHLVPFMFTKYLQDVFDVPLVIQLTDDEKFLFKDSLTLEETHRLAFENAKDIIACGFDPDKTFIFSDLSYIQHLYPVILEIQKKVTYNQVRGLFGFVESDNVGKSAFPAVQAAPSFPTAFPMIFGGKKDVRCLIPQAIDQDPYFRMTRDVAPRLGLLKPALIHSRFIPALQGFKTKMSGSVETSSIYVSDTPEQIKNKINKYAFSGGQPTEAEQRVKGADLDIDIPFQYLTFILNDDDQLKEIGEKYQKGEMLTGEVKAILIKELQALVLGHQERRAKVTDDMVRQFMDPFRPCFKKYAQ

SEQ ID NO: 335 - protein, 475 aa, Toxoplasma gondii
MERGQMLEPKETAKALSATSSGYYSDHVDQNEQVRLLNRLANAEGSSQVKQDAVLANPPDWKTLEKAGVLPAGLSAVLSKINPLCLDEFAEMLAADPDLVRALVALVRLEGNLHTVQYVLTVLCEVVRDDSSKYEALCSAVADSEVFEAFRQLLEVANLDSYTADRAAFLLSGLMCRARSGTFSDSQVEYLVQGLLHGRAANKFLLSEGGRLDAFVNLLKIDGYRPMIWDCRGFPELVLRNLSLTLPASVLYKAMFCVWLLTFHDAFLPQLNEKGIVVAVCVVLKESRVEKVIRVGLGVLHNLLKCDASVETVIEQNVAQVLALLEFEKWRDGDMYDDIRLATSHLEQKIRQFNNFDRYCHELDKGQLTFSVLHSEKFWRENVMAFENDEFRAIKKLVKLLDTSTDKTTLAVACYDLGEFARLHPAGKKVCQQLKVKDRVMLMISDKDREVAGEALLCIQKLMLNNWQDVAELGK

SEQ ID NO: 336 - protein, 616 aa, Toxoplasma gondii
MAPRGEAAAPEGDAEMGIIYKVSGPLVLAEQMSGTKMYELVRVGWQRLVGEIIRLEGDKAFIQVYEETAGLCVGDPVLKTGKPLSVELGPGLLDNIFDGIQRPLERIAQVAQSVFVPKGVDVPALDHKKLWEYNPVANVQVGDILTGGDIIGTVHENNLFLEHRIMIPPKIQGKVSWIAPAGSYTVKDTIMTLEYRGEQIPIQMAHDWPVREPRPCLEKLSGNTPLLTGQRVLDSLFPTVQGGTCAIPGAFGCGKTCISQALSKYSNSQVIIYVGCGERGNEMAEVLTEFPELTTVVNGQEEGIMQRTCLVANTSNMPVAAREASIYTGITLGEYFRDMGYHVAMMADSTSRWAEALREISGRLAEMPADSGYPAYLGARLASFYERASRVRCVGSPEREGSVTIVGAVSPPGGDFSDPVTTSTMSIVQVFWGLDKKLAQRKHFPSVNWTTSFSKYIRALEPFFDSYDAEFSSLRQKISDILQQEAELTDIVQLVGKDSLSEDQKLILEVARIIREDFLQQNAFSDYDYMCPLYKTVGMMRTICHFYDQCLRVMQETSGSEHKIGWGTIYNTMRPTISRITSMKFLPPTTTEAQAKQHFKQLSDEITSGLRGLVEK

SEQ ID NO: 337 - protein, 505 aa, Toxoplasma gondii
MAAQAAKADAALAHAAAASRDYRVAPRLDYRTVAGVEGPLVILDDVKFPMYNEIVNIHLGDGSVREGQVLEVRGKRAVVQVFEGTSGIDTRQCHAEFTGDVLKMPISEEMLGRAFNGSGKPIDRGPRVLAEEFLDINGCPINPQCRVYPKEMIQTGISAIDVMNSVVRGQKIPLFSAAGLPHNEIGAQICRQASLVAGKDVKDHSNENFAVVFGAMGVNMETARFFRQDFEENGSMERVALFLNLANDPTIERIITPRLALTTAEYLAYEREMHVFVILTDMTAYADALREVSAAREEVPGRRGYPGYMYTDLSTIYERAGRVEGRNGSITQFPILTMPNDDITHPVPDLTGYITEGQVFVDRGLHNRQIYPPINVLPSLSRLMKSGIGRGMTREDHPQVSDQLYANYAIGQDTRAMKAVVGEEALSPDDLLYLEFTDKFENRLLSQGPYENRTIFQSLDIAWELLRIFPEDMLKKIKEEELRKYYPRDKYLEEQERNDKRVPPS

SEQ ID NO: 338 - protein, 404 aa, Toxoplasma gondii
MLGSSEGGARGCPYWIVACNTDETHSAEQIFSSLKHAVLGSRNALCDEACLLDIPHLKFGTFDDLIRSVDILQKQDAYVESVIRRIERQAVEIDPDCELKVVWQRHSLTVDQYIRRFQWDDAKFPRLRAIPENLDALVQSVTKTDDEVRAKVAVWQEVRQQMANSASGKKTGPATYFQRDLIDVLSPDTVRDDDFLVTEHLTTAVVVVPRGQEREWEQSYESLDAFVVPRSSRKFNVAEDADGNALWRVILFTSHLQAFRQAAQAKKFVVRDFHYSPQAYKETVLARSRVEAEKTKQETFLSRVCFAAFSDIFVAWMHLKVMRTFCEAVLRFGVPPEYAAFVLRPVSEAKEKKLRHELDKLFSPKGGFGNSYFSGKDDPGSDDEDFYPYIWLALQPFGSHRASA

SEQ ID NO: 339 - protein, 396 aa, Toxoplasma gondii
MELSFFNVDDGYLEGICRGLRSAFLTEEDYKKLSAADSLEDLRSALEETDYGPFMQDEPLPLAVPTLSQKCREKMASEFRYMRSQASGPLGKFMDFIATEKMIDNVVGLIQGALNRKSSHELLARVDPMGYFQEMAAIANMDLTTSYEELYRALLIDTPVGKYFQAFLTESGSQAAAHSAEHGGRSLAEVASIVSETDIELMRNSLKKGWLEDFYAFVQSLGGTTKEVMTHILKREADYRVLRLVVNSLSSNQQQQMDRQALYPSFGYLYPEGTDGLRKAWNDTTVRAALAPFSSYLNLYEQCKSFYVGQEGQGNEAAINMASTSKFKSLEDLLYSETATMCELAFEQQFHYGIYYAWVKLKEQEIRNIVWIADMILMKRKEYISDQIVPLFPPRV

SEQ ID NO: 340 - protein, 345 aa, Toxoplasma gondii
MLSFEFSSGVYMRNNSSAALQETGVWHNAWRARSKLPTAFFIDISSFSVGSFFSSHSLANNTSSTPPFVCKKRFVTAPIYLRFPRYHEEEFAIFFPTLSSSPAPAPLGKMAMDDAEAQRQIQQMVKFILNEARDKAQEIEARSLEDFNIEKLKLVQQMKDKIRQEYEKKAKKLETQRAIDRSTAVNKARLRRISAQDQVLSEVYSQAMTQLSAVSRDRAKYQKLLEDLIVQGLLRLLESEVIVRCREMDKALVEAVLPNAVKRYSEIMRTEAGLHKTVTATLDKSGRYLPPPPSADNDGMSCCGGVVLMTRDGRITCDNTFDARLRMVIVECAPAIRHTLFPSHQ

SEQ ID NO: 341 - protein, 195 aa, Toxoplasma gondii
MHQFRCLARIKKHYCGGDTVENHSDKNKELQLEQIFAPATVCGLSRLRPAAGCSKVVLVSKILLVLAKMAPVLGRVQGTDLKVAVIGDEDTVAGFLMAGIGMRDGLGRTNFFIVDSKTKRQDVEDAFRTMTERPDIGIVLINQHVADDIRYMVDLHTKIIPTILEIPSKDKPYDPSKDSVMQRIKFFFGGELPTS

SEQ ID NO: 342 - protein, 131 aa, Toxoplasma gondii
MAAAKGSNALIQQLLEAEEEADTIVNKAKENRVKMLKDARFSAEEELKVFRAKEEERFKAEYEQTAGQEDSLVSSLEAKTKGEIEGIKKDYMENKDKLIEFIHRKVMDVDLSLDTETIAVLRTCDKRGVAP

SEQ ID NO: 343 - protein, 157 aa, Toxoplasma gondii
MFWSAFLQCDPNSTFFGFMGITAAMVFSNLGAAYGTAKSGVGISSMGVMRPDLVMRSIIPVVMAGILGIYGLIISIVINGSMDTPDTYSSYAGYGHLAAGLTVGLSAMAAGLAIGIVGDAGVRANAQQPKLLRHDAYPHFRRGSWTLRSYHWTCRRY

SEQ ID NO: 344 - protein, 162 aa, Toxoplasma gondii
MERASAAAATRSPIFASALTKRKPLLLLLGFAVVLTFFTCGVPTTSLRLRGPKFTLQDMKKAIKDAKDGVKGVEDAKKKHQKAEDSAKKASGSKKDKLQKEADEKKETLQSKIKDMKQKCEELRQVKEGTKNNKGLSDKEKKDFSKEGEKADEVLKRCGTVV

SEQ ID NO: 345 - protein, 571 aa, Toxoplasma gondii
MRTSVALFFAAAGGISLVCAPQVSLAAPVQGTLGPDVADTAGEPVVLQVARGADSLPDSRGNIDEEGITEVATTGVPPQTQSSGRSFGQRVMSWFTSARNAIRRPRTDEQGAVPGPSQPIPSGTDSTPEGWETVQSGDVPPGEPEPKAPTRSPRQRARDMFGRVGRFFGGARRFVGRGWRRFTTGMAGVTDRVRGRLALRSSFEFRNEEAVGQSELASLASSMTVTAPEGEALEVAREAGLRSGASINLVSATTGEQVTVSLRAPLGIGEYTAVFSGFISGIDSELAVKAFLGKTTESMSVAETEARILKIVSLKDPVDAMHRLRLLAPIETLVYRGDGDSADQSEGRPVVLVPKASSSLVDVINFLRSGDASAFDDRAKKIVLLGATVQLIQLLAALHTRKVVHGKLEPKSVLLFSHGLLYLSDLGRARRHGERFTTSRPSRYGAPEVLEHPETPYTYSRDGYSLGIILFELWCGRLPFDLGTPGVDSSEKLENSHPATLYQTVRNLDQRLSFDVCPSDMPESVKTLIRKFLTRRRWTRLVPQAALRDANFRRTMQLLQETVQGNGETQL

SEQ ID NO: 346 - protein, 572 aa, Toxoplasma gondii
MEKMEGRKSFRVLGTPLPVAALAAILLLGCMYTRAAGTPDDSLFPLSEDTSVDPRESFSAEDVLNAFVSPESVESLFASIVAEQVVATSGNLTESAPRDRDSAPERRSDGGTLRGHPEDAGELLRLLLADSEDMELWKANFFRHLTHSMRHIVRDSVLVSEKAFPSEQADEAGRDPGDLKKALKETGEDVFWESRPASSNAAVALIKRKMEKQAGKTGEGAGHTWEPEVSLRFRYLSLKDAKKLMGTFLVNTKVEGFPTPKGMPLPAKEFENATEPVPAHFDARTAFPACKDVVGHVRDQGDCGSCWAFASTEAFNDRLCIRSQGKGLMPLSAQHTTSCCNAIHCASFGCNGGQPGMAWRWFERKGVVTGGDFDALGKGTTCWPYEVPFCAHHAKAPFPDCDATLVPRKTPKCRKDCEEQAYADNVHPFDQDTHKATSAYSLRSRDDVKRDMMTHGPVSGAFMVYEDFLSYKSGVYKHVSGLPVGGHAIKIIGWGTENGEEYWHAVNSWNTYWGDGGQFKIAMGQCGIDGEMVAGEAAWQETEGVVNGEEELPGQHASGARVGAHAEEEREM

SEQ ID NO: 347 - protein, 537 aa, Toxoplasma gondii
MIPRTCDDPRRDSCCPLFSVDCCPPHPSPSSVFQSDGKHELPASEIPHSFRAVPEGTFAARSPRSHGAGQPQGECPSDATTSAASDTSSQAPHDVPVFTDSLLSSSTSEWPHQGPRSDAVESLEHAYISGTVSSDEPVSEEPLSSDEEYLPSVDFTKNASCEMSPGDLPESLNSVSEPVSKLHSGPSRHATVIRRAPQSARDGFSVMRKDASLRQPAIPPMAPVRLLPSRRCQWLRALPVVFLMVLIAYILAVFVMYHALPLLQLNIPQSMKFASTYNRGLFELLGVGILTFLFLVSYWLAVVTPPGSIPNTDEWSYSAPEIFDIEGLPSVVETKKTGARRHCKWCRRMKPDRAHHCRVCRQCVLKMDHHCPWIYNCVGWRNHKYFMLSLIYGSLDSLLIAICMFETVKRVVASDKDQFEKMFMVLFAETLDIFLCTLITGFFFFHTHLVCNGMTTIEFCEKQFMRPRTPMQESLWNKGCWRNFTDAFGSNPLIWLLPIDNRPGDGVHFITEDTRLLHTPVLRRIRTFEPIIESSVD

SEQ ID NO: 348 - protein, 399 aa, Toxoplasma gondii
MRTSVALFFAALGSISLPCTLHVSLAAPMQGTLGPDVPENTGEPPVLSSSSSDVPLRGAEGGSTQEGAVEGPLPQEWRQPPPKPPRRRLVESMPSHSSSSIRRGGESIVTGPENVANDEGGSPSDDLKIVQPEDVPPGGPGPKAPGVGTRMRNWATRSPRQQAQRARDMFGRMGRFVGGARRAVGRGWRRFTTGMAGVTDRVRGRLALRSSFEFRNEEAVGQSELASLASSMTVTAPEGEALEVAREAGLRSGASINLVSATTGEQVTVSLSAPLGIGEYTAVFSGFISGIDSELAVKAFLGKTTESMSVAETEASILKIVSLKDPVDAMRRLRLLAPIETLAYRRDGDSADQSEGRPVSWFPRPRPRWWMSSIFCAQVMPQHSMIERRKLSAWARLCS

SEQ ID NO: 349 - protein, 96 aa, Toxoplasma gondii
MVSEATDKVTGEKIAVLVDHTSTKGSRKDMDKQWHYVPCAVLFGKVKNSITACNLQRFLVPFYFARIPERPITQEARQGARKAGSLMPCRCCLDSG

SEQ ID NO: 350 - protein, 519 aa, Toxoplasma gondii
MTDCPFAAIRGSSGRISRSHVAFLVILAVSVTSNPTLAFHRGSLQGTATRDDLPTQAQYLSAIGAHETLVRAQRRAAFQKTPGKNSGRPHSLLQDVAEERENSSTAVGSIPHFSALPESEWDYKQHGKDWGGMCATGMQQSPVDLHIEGLQEPEYRNLTNVYMNAFAGTQPSRTLKPWKRGDFFYTYPHQFTKVEVYKTSKVFQVRVPEDQMTPLGALFSTDTTEMYTAQHIFFHSPSEHTFQGEANRREIEMQIWHYSNDLLSYESSTSLNHTSLPFLALFAQSSLNLPDVEEALKRDHSSGSDPSLPSSHWRVISLTFMSEELDQTSLAELKSLPSERMLSTLLSAERISSQAGQSEKVELAHPLNLQSVMMMLQLTNTEFFAYDGSTTMPDCKENVRWYVARQPLPVATETMLRFYKMLNPHQLRSRDENDGNFRMLQNVEDNMRNEGNVFLVQGFPLQVLIANSLGFDTMAKMSKEGAQMFQGWFSAAGEHTFGHSGSALAFATAALVFLNTVGI

SEQ ID NO: 351 - protein, 176 aa, Toxoplasma gondii
MWADYLSEFASLHEDAERILAGGDPSEGVEVRQQKLDALMKKMKRCFSSLEMNVRSLQPRERQPLEASLMNCRRQFTDIERRTLLLREGSRGSGQPSASKSRQNTLEKLKKGSSQLEESLRLAAEAEGVGESALCSLYVQRETLSRTMTRTKDVQRNMDEADTIVTKMSKWWNGIW

SEQ ID NO: 352 - protein, 277 aa, Toxoplasma gondii
MRTSVALFFAALGSISLPCTLHVSLAAPMQGTLGPDVPENIGEPPVLPSSSSDVPLRGAEGGSTQEGAVEGPLPQEWRQPPPKPPRRRLVESMPSHSSSSIRRGGESIVTGPENVANDEGGSPSDDLKIVQPEDVPPGGPGPKAPGVGTRMRNWVMRVPNIELQPPRQVVGRMGRFVGGARRAVGRGWRRFTTGDASAFDDQAKKIVRLGATVQLIQLLAALHTRKVVHRMLEPKSVLLFSHGLLYLSDLGRARRHGERFTTSRPSRIPGTLLEQVD

SEQ ID NO: 353 - protein, 332 aa, Toxoplasma gondii
MRTSVALFFAALGSISLPCTLHVSLAAPMQGTLGPDVPENIGEPPVLPSSSSDVPLRGAEGGSTQEGAVEGPLPQEWRQPPPKPPRRRLVESMPSHSSSSIRRGGDSNVLLPEAEGGSTQEGAVEGPLPQEWRQPPPKPPRRRLVEAMRSNSSSSIRRGGESIVPGPENVANDEGGSPSDDLKIVQPEDVPPGGPGPKAPGVGTRMRNWVMRVPNIELQPPRQVVGRMGRFVGGARRAVGRGWRRFTTGDASAFDDRAKKIVRLGATVQLIQLLAALHTRKVVHGKLEPKSVLLFSHGLLYLSDLGRARRHGERFTTFRPSRIPGTLLEQVD

SEQ ID NO: 354 - protein, 264 aa, Toxoplasma gondii
MFPRVALFPVPTCDLFLVGRSRLSRAAKLHLTRQLVVSVAWLHRHGVAHNDLKLENVFPSEEGKAVIGDLGFGVQIGTSARLKYTAAYLDPHAAEECLNNQVETVANEGTGAWALGTLVFVIWCRSYPVVSREQACLSTRDLRDRLVTMAKTTKPTPSSHHCQELPSPVKDLIAGFLQWSREARRLPGDDVDEFLAATLLLQSQKQRPPQRVCDTDNCHIQITATVIPKTNHWFTILTTGKSGRPIDFLIYEIGRGLTGIRGQE

SEQ ID NO: 355 - protein, 122 aa, Toxoplasma gondii
MFTWTQESQQQALVDEKSSCLHRRMHEHYEIFSLRLWRQTYPFRLDSVSAATAQEVKQFTITCAQKTTPQPDIHSCTGVPVEVRKIFTGFLHRFVEDRRLPGEVAEEFLAATHAGGIEGPDQ

SEQ ID NO: 356 - protein, 248 aa, Toxoplasma gondii
STQKGAVEGPLPQEWRQPPPKPPRRHLVESMRSNSSSSIGRGGESIVPGPENVANDGGGSPSDDLKIVQPEDVPPGGPGPKAPGVGTRMRNWATISPRQQAQRARDMFGRMGRFVGGARRAVGRGWRRFTTGMAGVTDRSEGRPVVLVPKASSSLVDVINFLRSGDASAFDDRAKKIVRLGATVQLIQLLAALHTRKVVHGKLEPKSVLLFSHGLLYLSDLGRARRQGERFTTSRPSRIPGTLLEQVD

SEQ ID NO: 357 - protein, 489 aa, Toxoplasma gondii
MSILGKHTATVGDRYKVRLTPEYGPGGGYGHCRDYLLQSESCWRGDLTSGVRGVLTKKGTRARTTKRHDLVAVTSGEHYWNQGLVYHEEQTAPPVAASSSFMQSTTSLATPADLNAPVDTQGQLDINSVLKNRPPAEAQLSPREIAAKTHFEAMFAKGLQLTVESIFTGETFTLTKPARFLGWGSTAIVFGLHRVKVGGASAPQQLAAKINVRSLQELQHLSSSQKKTALEDIQERFLREESSARNALQHVTPETALEHGVLFPVDVCRISKLFSGFCAGISYVILPVLALFPVFTCDLQQVVKSGLSRAAKLYITRLLLQAVAWLHANGVAHNDLKLENVLLSAEGKAVIADFGFAVKLGTASAIQFTAPYLDPQTAEAVPQEKTKTTASEERDAWALATLLFLLWCGSFPYVSDEQADLPTSDLLKLLVTLGKTEKPAPNFHLCKDLPPAVGHLVTAFLQWNSDNRSRPGDVLDDFLAATVSEGASA

SEQ ID NO: 358 - protein, 204 aa, Toxoplasma gondii
MSILGKHTATVGDRYKVVKSGLSRAAKLYITRQLLQAVAWLHANGVAHNDLKLENVLLSAEGKAVIADFGFAVKLGTASAIQFTAPYLDPQTAEAVLQKKTKTTASEERDAWALATLLFLLWCGSFPYVSDEQADLPTSDLLKLLVTLGKTEKPAPNFHLCKDLPPAVGHLVTAFLQWNSDNRSRPGDVLDDFLAATVSEGASA

SEQ ID NO: 359 - protein, 568 aa, Toxoplasma gondii
MRRLLLSPVGFVIVLATLLECHPPDRCVAHHGSSTDESNVWSPRGAQFVPGASEAAVKNQVGIPDSALLWPSQDATETGLRPTEQVEARSSFPAAKQYLSEAAPARGDLPPRATGLLRRRGARVRTVKAHEIGVETPKTYGWDHRVVDSEKQTTAPVADSSGFIQIPSSRATPTTLNAPIDLQGRRDIRNIVRNRPPADSDLSRSEIAAKNGFERRFVRGLQLKVESLFSGGVFTLTGPAQFLGIGSTAIVYSLNKVQADTASAPERVAVKISINNLQRLRSLSVFDRQELLDKTPERFVSSEGAVRNLLPGVTPETALEHGILLPLDICRVTNLPSGFRAGPDYKMFPRVALFPVLTCDLFLVGRSRLSRAAKLHLTRQLVVSVAWLHRHGVAHNDLKLENVFLSEEGKAVIGDFGFAAEVGTSTKLRSTPAFLDPQTAEEYLQRKTETVVTEERDAWALGTIIFVIWCGSYPFFSFEEAVLPPAVLWQNVVFMSKTTRPAPPLQHCKGMPSPVKALITGFLQWNSDDRRRPRDVVEGFLAATASEPATSSATAAEGSVRPRASRSQ

SEQ ID NO: 360 - protein, 541 aa, Toxoplasma gondii
MKNTLLSPVGFFTALAVLIECHLCDRCVAHHGSSTDGSGLRPPQEVDSAPRTPSIAVKELATFPGDDIQTSSQELPGYELWTREQSGASVRVGFPQNAESFLTQREARDEIANAHELVAVTPEGDAWNHSGVVPEEQTVTPASGSFIQRQAAHAPPSTRLTPVDRRGRSHTVSAVRRRVTVEDVMRPDQSAAMHAVLSAFGGGLVLKAKNKWGRTRYTLQGPATFLGMGAEGIVVRLNQVKSDRERSVTPVAVKLCLIRAAVFSGLTWWRKRRTRTELMKLFLSNENSVKRALPDLDPAEMLEHGLVVPHHAELVSGMPTWFAAGDSFFVLPVVSVSPLFTCDLETVVQNPLTFWAKMYITRQLLKSIAWMHQKGISHNDLKLENVLLSADGRVAIGDFGFSSPFGASLPIRGTHLYMDPDSSEAFFEQRENEITPHRDAWATGVLLFYLWCGVFPFGLQNVANASPPQVMRVTVMHARTTRPPPNFRLCRRIPREVRNLVTGFLQWNEEARRLPSDVADAFLAATDDGGREARRIRTHQF

SEQ ID NO: 361 - protein, 199 aa, Toxoplasma gondii
HVLRKLHLTRQLVVSVAWLHRHGVAHNDLKLENVFLSEEGKAVIGDFGFAAEVGTSTKLRSTPAFLDPQTAEEYLQRKTETVVTEERDAWALGTIIFVIWCGSYPFFSFEEAVLPPAVLWQNVVFMSKTTRPAPPLQHCKGMPSPVKALITGFLQWNSDDRRRPRDVVEGFLAATASEPATSSATAAEGSVRPRASRSQ

SEQ ID NO: 362 - protein, 697 aa, Toxoplasma gondii
MRRSRSKYHVGTFVTGSAVQRLTLVGMYSAVWVTSAHSSPVNSATVSPSFFFLHSKPPHGSPPNERTTGESSGSNASIELMEMQPTQPESLSPTAMAARRPNVPPLPEASGLPSRLPPWQETPFSPGKGDTQDSAQVSTPSGTPRVQPISSPKREALFRMSPPPVPKRSLRRTLSQYFRARKHSGVPNPRASAQLPTADREQAVNRPHRASRLMKSSPSSASHQAHGAAPHRRRAATSPQPRTRRDPAGPVGRTLRNWISDRLSRAYRHVRSRLRTGYARLLRQLHSMTEKIPTPPVQLPGQECVNVLGAHVARQVADWRQQMGRTSLEFAVDAAFPRDKDISFKSYISRKSVTLRMGKVLGGGARSIVVEVTRVDTGDRWALKAFLVPRDVIGSPGTPPPWDAISEEAHAIKLLPHTVPAVVYRNLRFLVPADVLIYEGDGMEKLWNRRGTGSNFYTTYLLFPIAQGSLLDAVRAMFRDARRGNAEVSDGEAARTLAANVSFSIQIIRLTALLHSHGVVHGDFQTKSFFLCQDGSLFLGRVRSLTRVGAPYRSPSSATDSPRCTPPEVLSPPENAAFTFSLNAWELGCILYQLWCEGLPFGLSPTPETPGKIVLPPVITSPYLQTKKRSGLAGTSTRPVKHLVFTGCVKNMPVEMRQLIRRLLQEDPHKRLLPTEILRDPVFQKLEEQSRPPDAQA

SEQ ID NO: 363 - protein, 114 aa, Toxoplasma gondii
MWLWFPCCQFIHVAAQHEEKQCSGSAVHSGRTRVAAHFVRLKTTRTCCKTEDGLSAVIPLVTQCAYQPGKPSNSGGYFLVLEILPDRCLFFSLTTSNTLTGNSSSVLEINELLN

SEQ ID NO: 364 - protein, 494 aa, Toxoplasma gondii
MTVAVNAMVTYGELERIFCTCTSHYFCSTVPQSGAVTSEGELQNETGPEGAQEGRGMEGDDPTVLSDTARAPGDRSNAQNRGEKSDVNLHASVVVPRETDNHGEFSVTLYPPRPAEEDKQSMEQSERPESEAVLQAKDDDEVSEDNAVLSERQEWQRIETVGREWLKSQVAAFVPPDVTPWPDPDSSVDRLFAKKFPSGKLLILEPDEPGGTYEVLYRGPVLGRGTRGIAFKGTMVATGEHFAVKLQFVRKSLFRRRSSLLRDLVKYLQQEFAVRNMLVAAYGEENVQKKGMVLPLTVRRRHAFGDFITTPFSFTMFWNFLVFYPLMKCTLGNLLVGPHWPREARLFVAKRLIEIAAALQRAGVLHRDIFESKILLQEGSGDIFFADFGDASGKHMQSGIAWIELQLAESSRLGHLVYYVYTGKTFTKFWKFRCTDNVLFHNDVNVKDVPLADKLIRNAIKALITCNKDKRILPQEITASIPFFRDEPEFYESK

SEQ ID NO: 365 - protein, 346 aa, Toxoplasma gondii
MRFPVASLFAAGWLGLAVSAEEPTWESLEERGRELVKQHVSAVSGYTHLFERELHMVNAATAVLPLGSVLEVWGGKRLVRGRNVAVTEGAVLFDVTDNESKHEYTAKLFSVANKSVVKALSAVWKSFKEKNVENVLVERFGSDENVLKSGFLVPVGGGSIVNVPPVLQPAGKWSDTSFLGALILYPRVAQTLDALLWSGATLEKAAKFFLIRRLIRSVGDLHRSELCHGNLHPTNIVILAESGDIALTSFGDSCFQSLFVLSDAMGVGGAKQDTVRLGNIAHAIYTGKYPSDDLDKCNDNPDFPKADDTDVNDVVIRAAIMRLLCCGECPMQKPADMVVASPLFSS

SEQ ID NO: 366 - protein, 1781 aa, Toxoplasma gondii
MTGGAAAPRSSSGASRTPLSLRFSLTLLCSLVALLTLSVSLSTPASHTYVFAVVAADTGVSSVPGHERGASKAGPDATVKSKRRRERSKKSDGNVSAKGGPEESEMQDQSTTDVDFETTPPVARDAKTQSKRDATTRGKKGKRSRRKRGEKSKKGNREAGAKGDSEASLTEGESKADIGGETTAQVERDATTKGKKSKRRRSRSRRKRGEKSKKGNREAGAKGDSEASLTEGESKADIGGETTAQVERDATRKGKKSKRSRSRSRRKRGEKSKKGNREAEAKGDSEASLTEGESKADIGGETTAQVEREATRKGKKSKRRRSRSRRKRGEKSKKGNREAEAKGDSEASLTEGESKADIGGETTAQVERDATRKGKKSKRRRSRSRRKRGEKSKKGNREAEAKGDSEASLTEGESKADIGGETTAQVERDATRKGKKSKRRRSRSRRKRGEKSKKGNREAGAKGDSEASLTEGESKADIGGETTAQVERDPTRKGKKSKRSRSRSRRKRGEKSKKGNREAEAKGDSEASLTEGESKADIGGETTAQVERDATTKGKKSKRSRSKGKRGEKSKEADLQEGAKGDSEASLTEGESKADIGGETTAQVERDATTKGKKSKRSRSKGKRGEKTMKRDTQLAGKGEPQTAAIVDALLQMESGSLTEREAVAKDPKEGNADAIVGTDSIEARVAVSAERTEEGGKPAEAVSAADASKSAEQGRQKSTKRGKKRHRRNRKRSKSKKSHTGSSAPTTAGVSAPTGSLPLSSETPTSAEKEATEFLLSSGFPAISAVLASRGSKLDAAKKSKGAPGSTSVVDSESVVSGRERQTHDEFLPPVDVASVLRRANTGDESLFDPDEADNTSAATKAFEVTDDEPKAEKPSETETQLQELMATVPQLDELLQKLPKLEELATRVPQLERLSESEAQREASNEHGRHSAELRATGPSLDEPMRGPRFGALQATESKPVPTSLANVLISSLVFPPRLSLLFAQPASGATQKKATVGEQTSPADSPQTKGALPPTAELPKERAAANSNVETTAKSQGDSEAEKLLKELRELEKGMQSQTVGDISSTRGETESDNSRTRPESDIKYRGMSGSFSGSGPASSRHMKHRVSIRGSFGEADVVLLHQKPQRGDETAERTSSFSATADNSVSGPRRRGFGPVPRSIFGSAFSDLEAELQGDVAEFGDAAGIEESFGFFGERRGGGDRSRRSRERRSEDRSRRRRKGSKGHREAGSSAATPGSRHLRQVDRRSGLARAEDVDPEESSEESRGSREEHSMKKLPARERSSRSAGPSLSRRRSRLDHELEQRRAKEAMEAAETFDERGGYGSGGHNWLTPGPPLVVSGESWPRRGLLYPEPALLLEDSRAVQMMENAAKELAHSRQTPVLPGDRGRVAAAGGAFERLFPRGALFTLQPTHGQPFEPKTLKRGRFLKAGGGTLLFEVWEGRTRWALRLHLTELSERERTGLVSRFPVDRVSGAGVSAWQRTADGVCAEAEELELHAVRILMQQNEQPRDLFCRERIALPVAVGEVSSLPKVTQLRDGEHVTNIGGLYPLAACDMRELAEQYVMPEEVKLEAVRQMVAAVGRLHSRGVVHLDLKLEHFLLDNHGKVYLGDLSTSEKITGVNVEPTSCEFGSLESLSPEHLACWARQQRKFTPSMATDSWSLGVAIVQLWCGEAPFRVPDALWSNGPVAVAQYLDQLLRRTDGEIDFSGCPGGDITNPELKRIVTGLLTYDRVKRWLPLDVLFTSPLMIDPAVARNASSPSVSPLTSGKRSSKNRKRNN

SEQ ID NO: 367 - protein, 538 aa, Toxoplasma gondii
MAGPRSPLRFVLLLSLLALKVFVDSPSVLPALAGESAADLSTSIDDDDFDSSSGVAVPSLTTEQEVHRTQEALDPEVVDLGKPSPYAEEESGILAASASRLNFSPMMALKSFFHMGGETGAPGHRSRIDVVKNAAMDHVHRLLQMLRESSEDEEERLLFADRREKKVITVNEWYTTTVAATMLGRRPTDEDAILVSAPATSRPNVRIKAVFDGHAGEATSQYCAKHAAKHLGKLSEFTFAEVKKACLSLDAEIIRKLGPKHVAGSTGIIVAIERLSAPVVENVVGREIVPRAHEETFVPLEKLIQEEEEAEHPELVGRYPRVPDVQQKTIPAGSFLVTAINIGDSRATLIHSDGGLTRLSKDHKPNHPTEASRIEKAGGSVETFDVPRVDGVLALSRAFGDSDFKMNPNLPPEEQKVIAVPDVRQFYALSSDLLLLACDGVYEPSGMDWAYVRDLTVAEMQRSKGDLEEVAARVMDYAYDMNSQDNISVMLVAFHNQEVEHPTAVYKVVSGQGVVLSETRRPSDAEDDSVEGDTVSLF

SEQ ID NO: 368 - protein, 479 aa, Toxoplasma gondii
MFSCECHFCCANPNKSLPVIEQVTAYTCAKATAAMASLRVLALACLPLFAVLHADAKTLLGKVKRATGMGVGEGPSVAKKPKYTATVPGFTPPSGDQRMNEFMAVDTSGEFMRHLYIEEGRTVCASATSRNRRPTSESPHSDDVVVVEGMLRGRPETRVHAMFDGFQGRHSAMWLAQNVMNYLNDLRDVNEEEITRQFERMDGDLRAANLPGGSSALIIFVRYEKKPTEARVVGRQIVPEGAKEFTSVAEALGGPLMPVVAMNFRRDPRAAKGIYTIHVASLGNSRCVLKSGRTAIHLSTPHTASSHKERHRVQAAGGVFTTVNGELLLGGVVPMTRAFGSFDFKKGGQGKLQQDLVSAVPDVTTFFAYPGDDIVAGTAGAFAHFRSHAAIAAAIALYPVSPETVLDAAKAMVVNAKRRKVTKNISTFVRHLPESRTRSQKMLEGTSGENGEEDFSIDRTNELTQALQAGFFSFLLYYP

SEQ ID NO: 369 - protein, 320 aa, Toxoplasma gondii
MTGGAAAPRSSSGASRTPLSLRFSLTLLCSLVALLTLSVSLSTPASHTYVFAVVAADTGVSSVPGHERGASKAGPDAAVKSKKRRERSKKSDGNVSAKGGPEESEMQDQSTTDVDFETTPPVARDAMTQSKRDATTRGKKSKSKRSRSRRKRGEKSKKGNREAGAKGDSEASLTEGESKADIGGETTAQVERDATTKGKKSKRSRSRSRRKRGEKSKKGNREAGAKGDSEASLTEGESKADIGGETTAQVERDATTKGKKSKRRRSRSRRKRGEKSKKGNREAGAKGDSEASLTEGESKADIGGETTAQVERDATTKGKK

SEQ ID NO: 370 - protein, 1320 aa, Toxoplasma gondii
GAKGDSEASLTEGESKADIGGETTAQVERDATTKGKNSKRSRSKGKRGEKSKEADLQAGAKGDSEASLTEGESKADIGGETTAQVERDATTKGKKSKRSRSKGKRGEKSKEADLQEGAKGDSEASLTEGESKADIGGETTAQVERDATTKGKKSKRSRSKGKRGEKTMKRDTQLAGKGEPQTAAIVDALLQMESGSLTEREAVAKDPKEGNADAIVGTDSIDARVAVSAERTEEGGKPAEAVSVADASKSAEQGRQKSTKRGKKRHRRNRKRSKSKKSHTGSSAPTTAGVSAPTGSLPLSSETPTSAEKEATEFLLSSGFPAISAVLASRGSKLDAAKKSKGAPGSTSVVDSESVVSGRERQTHDEFLPPVDVASVLRRANTGDESLFDPDEADNTSAATKAFEVTDDEPKAEKPSETETQLQELMATVPQLDELLQKLPKLEELATRVPQLERLSESEAQREASNEHGRHSAELRATGPSLDEPMRGPRFGALQATESKPVPTSLANVLISSLVFPPRLSLLFAQPASGATQKKATVGEQTSPADSPQTKGALPPTAELPKERAAANSNVETTAKSQGDSEAEKLLKELRELEKGMQSQTVGDISSTRGETESDNSRTRPESDIKYRGMSGSFSGSGPASSRHMKHRVSIRGSFGEADVVLLHQKPQRGNETAERTSSFSATADNSVSGPRRRGFGPVPRSIFGSAFSDLEAELQGDVAEFGDAAGIEESFGFFGERRGGGDRSRRSRERRSEDRSRRRRKGSKGHREAGSSAAAPGSRHLRQVDRRSGLARAEDVDPEESSEESRGSREEHSMKKLPARERSSRSAGPSLSRRRSRLDHELEQRRAKEAMEAAETFDERGGYGSGGHNWLTPGPPLVVSGESWPRRGLLYPEPALLLEDSRAVQMMENAAKELAHSRQTPVLPGDRGRVAAAGGAFERLFPRGALFTLQPTHGQPFEPKTLKRGRFLKAGGGTLLFEVWEGRTRWALRLHLTELSERERTGLVSRFPVDRVSGAGVSAWQRTADGVCAEAEELELHAVRILMQQNEQPRDLFCRERIALPVAVGEVSSLPKVTQLRDGEHVTNIGGLYPLAACDMRELAEQYVMPEEVKLEAVRQMVAAVGRLHSRGVVHLDLKLEHFLLDNHGKVYLGDLSTSEKITGVNVEPTSCEFGSLESLSPEHLACWARQQRKFTPSMATDSWSLGVAIVQLWCGEAPFRVPDALWSNGPVAVAQYLDQLLRRTDGEIDFSGCPGGDITNPELKRIVTGLLTYDRVKRWLPLDVLFTSPLMIDPAVARNASSPSISPLTPGKRSSKNRKRNN

SEQ ID NO: 371 - protein, 219 aa, Toxoplasma gondii
MAAKDEYYDYLYKIVLIGDSGVGKSNMLSRFTRDEFNLESKSTIGVEFATKSVYLDEGKVIKAQIWDTAGQERYRAITSAYYRGAVGALLVYDITKRQSFENVERWLKELRDHADPNIVILLVGNKSDLKHLRAVSVEEATKFANREHLAFIETSALDATNVEQAFHQILAEIYLLRQKKQIEDNPQSTTQPGRGQKIHLDEERTDSQIRQSRRGCCSA

SEQ ID NO: 372 - protein, 332 aa, Toxoplasma gondii
MATDARRLATGLVLLTCLVWRAGAFQPSPPTSRANELTSGIPGEAPENTAEERGIGDISDYPHSVVDDAADISGGTVPEGPGSPASTSGSGGVFNRLFSRFRQVSGSTQGTGVADEPQQGPRPSLRERLAQHFRRLRVLFGRLMPRWGFGFGRHVGRWWPRRWPDPLFPCMEPGDEFIRSRLSQTEYRTRFYRRGMVEGYEVEVKAVTAAIWPQNTAREVASLLDRRKRTLRVVGAFGRSVRSVLYLAQDVESQERMAIEVFTLTSGNTVSDLARVHDNLFAMTGLVSESPQQARDICRLLLPTDAVTVPTQPPFEELNPGQSNYPVANYSS

SEQ ID NO: 373 - protein, 222 aa, Toxoplasma gondii
MFPRVALFPVLTCDLFLVGRSRLSRAAKLHLTRQLVVSVAWLHRHGVAHNDLKPENVFLSEEGKAVIGDFGFAAEVGTSTELRSTPAFLDPQTAEEYLQRKTETVVTEERDAWALGTIIFVIWCGSYPFFSFEEAVLPPAVLWQNVVFMSKTTRPAPPLQHCKGMPSPVKALITGFLQWNSDDRRRPRDVVEGFLAATASEPATSSATAAEGSVRPRASRSQ

SEQ ID NO: 374 - protein, 456 aa, Toxoplasma gondii
MRRLLLSPVGFVIVLATLLECHPPDRCVAHHGSSTDESNVWSPRGAQFVPGASEAAVKNQVGIPDSALLWPSQDATETGLRPTEQVEARSSFPAAKQYLSEAAPARGDLPPRATGLLRRRGARVRTVKAHEIVVETPKTYGWDHRVVDSEEQTTVPVADSSGFIQIPSSRATPTTLNAPIDLQGRRDIRNIVRNRPPADSDLSPSEIAAKNGFERRFVQGLQLKVESLFSGGVFTLTGPAQFLGIGSTAIVYSLNKVQADTASAPERVAAKISVRNLNSLRDASASERQQVLDQAPERFVSSEGAVRNLLPGVTPETALEQGILLPLDICRVTNMPSNFRAGPDYNVFPRVALFPVLTCDLFLVVESGLSRAAKLHLTRQLVVSVAWLHRNGVAHNDLKLENVFLSEEGKAVIGDFGFAAEVGTSTRLQSTPTFLDPQTAEESLQRKTETVVTEER

SEQ ID NO: 375 - protein, 351 aa, Toxoplasma gondii
VRGLQLKVESLFSGGVFTLTGPAQFLGIGSTAIVYSLNKVQADTASAPERVAVKISINNLQRLRSLSVFDRQELLDKTPERFVSSEGAVRNLLPGVTPETALEHGILLPLDICRVTNLPSGFRAGPDYKMFPRVALFPVLTCDLFLVGRSRLSRAAKLHLTRQLVVSVAWLHRHGVAHNDLKLENVFLSEEGKAVIGDFGFAAEVGTSTKLRSTPAFLDPQTAEEYLQRKTETVVTEERDAWALGTIIFVIWCGSYPFFSFEEAVLPPAVLWQNVVFMSKTTRPAPPLQHCKGMPSPVKALITGFLQWNSDDRRRPRDVVEGFLAATASEPATSSATAAEGSVRPRASRSQ

SEQ ID NO: 376 - protein, 110 aa, Toxoplasma gondii
MQSTTSLATPADLNAPVDTQGQLDINSVLKNRPPAEAQLSPREIAAKTHFEAMFAKGLQLTVESIFTGETFTLTKPARFLGWGSTAIVFGLHRVKAGGASAPQQLAAKIN

SEQ ID NO: 377 - protein, 354 aa, Toxoplasma gondii
GWDHRVVDSEKQTTAPVADSSGFIQIPSSRATPTTLNAPIDLQGRRDIRNIVRNRPPADSDLSRSEIAAKNGFERRFVRGLQLKVESLFSGGVFTLTGPAQFLGIGSTAIVYSLNKVQADTASAPERVAVKISINNLQRLRSLSVFDRQELLDKTPERFVSSEGAVRNLLPGVTPETALEHGILLPLDICRVTNLPSGFRAGPDYKMFPRVALFPVLTCDLFLVGRSRLSRAAKLHLTRQLVVSVAWLHRHGVAHNDLKLENVFLSEEGKAVIGDFGFAAEVGTSTKLRSTPAFLDPQTAEEYLQRKTETVVTEERDAWALGTIIFVIWCGSYPFFSFEEAVLPPAVLWQNVVF

SEQ ID NO: 378 - protein, 538 aa, Toxoplasma gondii
MATDARRLATGLVLLTCLVWRAGAFQPSPPTARANELTSGIPGEAPENTAEERGIGDISDYPHSVVDDAADISGGTVPEGPGSPASTSGSGGVFNRLFSRFRQVSGSTQGRGVADEPQQGPRPSLRERLAQHFRRLRVLFGRLMPRWGFGFGRHVGRWWPRRWPDPLFPCMEPGDEFIRSRLSQTEYRTRFYRRGMVEGYEVEVKAVTAAIWPQNTAREVASLLDRRKRTLRVVGAFGRSVRSVLYLAQDVETQERMAIEVFTLTSGNTVSDLARVHDNLFAMTGLLSESPQQARDICRLLLPTDAVTVPSQPPFEELNPGQSNYPVANYFLLMPPPIMSLEPLHRIVDHEEFLTGDIGRVVRMVLTAELIRIAANIQIRGLVHGRITSENLFIMPDGRLMLGDVSALRKVGTRGPVSSVPVTYAPREFLSNTETAAFTHALDAWQLGLVIHRIWCLILPFGLVTPRMKRSGRRPSMRVPGLDVLSVEACTPMPDAVEMLVRHFLNFNTRKRLLPLTAMGTPEFRQLQLDISTSLSSK

SEQ ID NO: 379 - protein, 538 aa, Toxoplasma gondii
MATDARRLATGLVLLTCLVWRAGAFQPSPPTARANELTSGIPGEAPENTAEERGIGDISDYPHSVVDDAADISGGTVPEGPGSPASTSGSGGVFNRLFSRFRQVSGSTQGRGVADEPQQGPRPSLRERLAQHFRRLRVLFGRLMPRWGFGFGRHVGRWWPRRWPDPLFPCMEPGDEFIRYLVRAKKDRIGFYRRGMVEGYEVEVKAVTAAIWPQNTAREVASLLDRRKRTLRVVGAFGRSVRSVLYLAQDVETQEHIAAEVFTLTGESRGLDLQRVHDNLFLSAAFLAESPVLSRDRRRLLLPYDAVTVPSQPPFEELNPGQSNYPVANYFLLMPPPMMSLETLHRIVDHEEFLTGDIGRVVRMVLTAELIRIAANIQIRGLVHGRITSETLFIMPDGRLMLGDVSALRKVGTRGPVSSVPVTYAPREFLSNTETAAFTHALDAWQLGLVIHRIWCLILPFGLVTPRMKRSGRRPSMRVPGLDVLSVEACTPMPDAVEMLVRHFLNFNTRKRLLPLTAMGTPEFRQLQLDISTSLSSK

SEQ ID NO: 380 - protein, 525 aa, Toxoplasma gondii
MSSSRLVLVSKMVDSCARLACFCIGLFFCLAVWQHQAGHAYSATHHHAVNSDNKSFNDSAPHWTLNQVLRDGTVQSESPSYLQHSSLPSNISPALELAALGQDPVRRRPQPVQVARTGTTTTGRVQLGRQVARVTPEELATMVEPSLKDLLNRSTLPQTPFVIETLRVFATPEGDTSLPYTMERILGAGAASIVIQAVQETVPQEPARRRRSWFSRLRKSHAPADTRPRVALRFPVVDVRKKQQELPEVPEAELLSQLAEEQLRLEIHKVALVSSAAGTEGNFDSEWGFALPFRVGRLSNEGLVLAMDGSGKAILNFVTVSPAMMCDLHTLRSSSRTPAMDEFVVMRVLQLAANLERLQLTHLDITDENVLVGRDGQLFLGGFQHVRAKDGGISCGKIPSVTFTDPRLAHCAVNNPGSYAAVNPAVDAWMAGMMLLRWFCGDVFFNRRSSLAEPRQAVQVLAQLQADFIAANDYMVSFPAFTQWDRCRHHVNERFQFIIQSLLDVNPYKRGAPSAQLTAYFPVTG

SEQ ID NO: 381 - protein, 568 aa, Toxoplasma gondii
MRRLLLSPVGFVIVLATLLECHPPDRCVAHHGSSTDESNVWSPRGAQFVPGASEAAVKNQVGIPDSALLWPSQDATETGLRPTEQVEARSSFPAAKQYLSEAAPARGDLPPRATGLLRRRGARVRTVKAHEIVVETPKTYGWDHRVVDSEEQTTVPVADSSGFIQIPSSRATPTTLNAPIDLQGRRDIRNIVRNRPPADSDLSPSEIAAKNGFERRFVQGLQLKVESLFSGGVFTLTGPAQFLGIGSTAIVYSLNKVQADTASAPERVAAKISVRNLNSLRDASASERQQVLDQAPERFVSSEGAVRNLLPGVTPETALEQGILLPLDICRVTNMPSNFRAGPDWNVFPRVALFPVLTCDLFLVVESGLSRAAKLHLTRQLVVSVAWLHRNGVAHNDLKLENVFLSEEGKAVIGDFGFAAEVGTSTRLQSTPTFLDPQTAEESLQRKTETVVTEERDAWALGTMIFLIWCGSYPFFSFEEAVLPLAALLQNVVFKSKTTRPAPPLQHCKGMPSPVKALITGFLQWNSDDRRRPRDVVEGFLAATASEPATSSATAAEGSVRPRASRSQ

SEQ ID NO: 382 - protein, 510 aa, Toxoplasma gondii
MKNSLLSPVGFFVVVAVLIGCCPPGRCLAHYGSSSINESQWTDRETQMLAAAVKPHAGYTDSGPRTSSREMNDTGSWATERSGALPRFRTTGEQLSEGASVREDLAPGIRGVLTKKGARARTTKRHELVSVTSEEHYWNQGIADHKGQTAPPVAASSSFMQSPSSLATPVVLNAPVDFHGQGDITAAVRSRPLVTAGLSRHQIEAKNDLNKVQADTASAPERVAAKISVRNLNSLRDASASERQQVLDQTPERFVSSEGAVRNLLPGVTPETALEHGILLPLDICRVTNLPSGFRAGPDYKMFPRVALFPVLTCDLFLVGRSRLSRAAKLHLTRQLVVSVAWLHRHGVAHNDLKLENVFPSEEGKAVIGDLGFGVQIGTSARLKYTAAYLDPHAAEECLNNQVETVANEGTGAWALGTLVFVIWCRSYPVVSREQACLSTRDLRDRLVTMAKTTKPTPSFHHCQELPSPVKDLIAGFLQWSREARRLPGDVVDEFLAATVSEAATSSASV

SEQ ID NO: 383 - protein, 552 aa, Toxoplasma gondii
MRLDAVYYLAQMASHRIPRCQATFRHFICWFLIFAAFAVSDFSNVHGSFLPDPHFLCHHRTLRFRRGYVPQLSPCPHASTHHVKSGSFSSKISFLEEAAQPPSPISSPESKTELLLSLSVGHYGKWMTDEDERGRRKVAASVSRLLRSERPKSISDRVQFLLDETVAPDTVFVVESLEGVPTAGVQVQAFRRGSPLASGSYNVLSEATPVPVPLPTSLLVRPKRGEVSQQSARMMNVVVAAVKGSEGHAAQVEEGKTGKAGVSSEPVAVRIALSARSSCEVEAEDECLSLARRYSNLMSKLPPFSSRDLLEKFGMVVPQLVGQLRGRPSLLRKQGDTSLLNFVQIMPLMACDLNQFRITDPDAVKFVVKRMIQLLALFGAAGLVHQDIKAENFLVSRQGRLYLADFDAVVRENDTIQCNKKLSLLFSPPEVLRCFFNTPEEKIALTQVVDSWSLGMAAWEVLCMSEPFDGMRFSEDDLYNMKVIAALPEGGDDTRALDWNRCRGRPPAPLRKAVECLLDRNAATRCKALDLFKSSPLFAEERPVPPEPSSSD

SEQ ID NO: 384 - protein, 749 aa, Toxoplasma gondii
MVHGQMHYVSWVKDGCRQFAPDNLQPHGLDLEVLRSFFILQMNPHAVAEIAPGDRAEWTRATIYRQCRAAAPSPGGSPVSTGISSVSNSRFPRSILSPRSAALSTLKLPFSFLRLPWRKFEVNAPTRGAVEASSVKSHGETSAASSLAGLGATDEDGDAEEAVGLVDEELMGEEKLIPLEQRMVLARQLLEGSEAYNESFSSDEDWFDSARVSSPLGFPAKTTLELGFPTNRTAREPADLHGSEGSDEFEDHGPASTLVPTVKSPHRQGGVKSAVDSSVDSIQHHGPSPKSSPTTPAAASPSHAAGGARTQNTRQEAGSREGRTQRRLAGQEGAARKTGRPVLTVHTGGNAPPVVTDARFKMPSTTLKSLVTPQDPGEWTAEKEEFERSYPLHTPIQVRSTRTNEKFSVQLEDVLGAGGYGVVFSARDLRTGQGIALKVFRIRPDQRREESKEDVILRRRVQSELAIWEYVPRGIEPKQWSEMSHLVIPFDVIEVVTPCATPPMDQTRYASEWVVMDLFAGDVARMPKIMAADPSVKLEVTEQVFLANMYLHDMGLVHSDIKLPNYFISIDGRIFLGDHSLASPTGENVPCMWGTLRYLPPENMKCISDGRKRIMTTERKDVWALGVVLYKLWCNQQYPYEMGELWSKDLFVRTARAHVDELDLTLCDGHVTISILSLLRTMLTPNASRRPTLREIYKFHPVFKQRKSMILQKKTLVSILKEVDHKKGENPGAGGGAQAGSDIGSTEED

SEQ ID NO: 385 - protein, 611 aa, Toxoplasma gondii
MNLLLLNEPSLRLPRIFTVSLCAILSWGHAAFPLFFAECGLATRNLHDTGASSWDTDTRHIASTFNSSRGSADHSFAQRAEAVSDKSVAYWKGRIVEDGDVEVEDKIVHVAQEIVGGGDSLSAVDPTELTDVARILAATERPKVVANADAFKEKRFAIFSAGLRTSSSGPKANTFRFLAPDRTEKFAFPGRRSADPQAVSRQLVPPANLVTRGSGETVKLKGIELTGAARGLFVTKVSAVVRQEADGSSTKNPLSSSLQTRSTQRRPWYQMLDGFVAEVDKVYEEEVEARLAWELRIWRHLPSSRAEQLAAEEHILIPGALLSHSGRGSPSSRRKDAARFSRELEGKWNDLLSEKVFNVFIWYPAGYRDTLESSMMHSDQITEPWFSSTPRDVMESITVQMILAVANLNSYGLVHTHLRSSSFVFTPEGIVLLSDLNRVVRQGEFMDCVADREASLNDLTASPEERVCVHEHGYKGRDAKKKEELVGPLEAHPTVDAWRLAVILYKLWCLESMYERSSYHQFVARQDLQRVPDSESNITFLRQNPFPMSACRKDMPSSLQRLLRQMFEPDPANRITSAEAVKNSSFFHDKKRAVLRKKQERLIQKSQPADG

SEQ ID NO: 386 - protein, 548 aa, Toxoplasma gondii
MEKILWAASVFIAAQLDSSFTVHVYAKESTVLSELVESGTRLRPEEEGSFLTSPRSDEETLVQGAGPRGPEEKAQAAIDEAEVEPFATNSNTGTFSSFPPELHAFSPFGVIVREPKDMFFTVFSRLGGRVKERDFVGELIQRLARAVFPLFRRLHFWGESPGTQHAQQSGGGVEWGHKAVVRVLRIMRDRPVPPVYEDSRRRVMLKTGVGVLREHSPLVMNSLSGNRKVTITVKDYIPVAGWGLCVGVVHPESNQEFLLLNFVSLADAAWGKWFEWRLRKIAEPLQWLGLRNPSEAYSQDRLMLPLDLLEISNSSRYFVRAPFVVPNLFVLMPRPATSLSDLVSFMSTTKNIGQTLAVRLSLTLQTIRVVAGFNNRGFIDADIRPASFFVNAKGLVFLGIFTRTTIAKRGRRASGRRQFDVATAPELVFREKVFFRRDEKTNAWALGITLYYIWCNRFPFGILDGDSAPPPELFQPVPPEFGVCVHNMPDPVKVLVAELLDRQRRARPTANTAMQREIFRHLQDLLSASKLSALPRTVPVVALLKGIK

SEQ ID NO: 387 - protein, 535 aa, Toxoplasma gondii
MATRSFLFVFLALSSLGGLCSEYATQRPLEPYRGETERPLPERLGQKMYISVVQHKTLSFSRSSGGPFRRQNPQTWPNFVQLTSTSGVPHRRRERVADADEPTTSTGNRRDRAFPLRSWLRHAIRRLGVGANNRRQGVQHKEVLPSTEVASIVTLLQQLQQEIGRCRLQQRTNAHLEDTVTILFFRRGSTRVLLSDGGRHTRNIRYDGEILGSGPWSLVLRVMDVDENQEYALKVARLRASLSGAAGYRQLLRQGLLHHRFTPPVSPHHALWCLQLMVAIDLLKLPRIPRFVREPSSRLTIANRFLLLPLAYTDLLAVLRALFTRQDVSESPGGFLARLHMTAQVVKALASYHSQGFVHGDLKPQKFLVMANGSLVLGGFTEVRTPGALRSGDVFTESYLPPEHLDRNSVYSFESDTWQLGLTIYQIWCLLLPFGLMTPFVAEGPERRVFEEVVQHPGVQPSFNDPDCFSNVPEYIEMMVHHMLQFHPEDRPRPADILISDNFQRLQDHIQRLERSQEEEESVHGSPAGTLSRNP

SEQ ID NO: 388 - protein, 1122 aa, Toxoplasma gondii
MAGYQPSAAWPVASFPSASLPLTSFSSFVARVARQFLLFCLISIFASAWSVLATDATGEEGEAVDDGSADASNDAEVWLRRQDYSSSGLHIPQAIAEHDREGESPLFDSERITRTQSQQRWVSELGRQPSQVSESLPYGGMKAGSFGGYETFRPDKLEAVWDRGTAATELHRSGGARASVNPAAAAAGSAGGSTDVYRDEKGEGKRTERDGRNREESARVSREGEIQFSTGWEAEADPEPAWRVETRRSEQGNASQWTEEKPQHSSSNGTQKATASSRWGASPHSDASLRPPQESSWPSLLPPAGRPQPPAPSPTHLPSLLPGTPWPSTPFALDPRARLLNYRNEGHALRDVYDEEEGELSDTESLHRAHRLSLEGPRYGFRAGSYAPRRRENDAGDLYGEVSATIELPETNPSAVYPNQHGEGLPDFASAPRTNVHLPPQLGRSGVDPDQVRAAQLRLANLAGHTGHTPGDGSSSYGASRDEVPARRDQVQGRGGPSLLPGALRAGFDPSAGLVSLQYPGVSAFRRPGVLGAASSQGPAKSLLVEGAPQQRQFGASGFAQTPSLLSSSPFLDAFMHNRGGLNLGAQLFATQQVLSGPAGMWGSAGSSEGEADKWWREQDGWVWPELPSLSATDLEAGVKDISGHAQMVRVEAHLVRSQVNAGNALGLYIHQGKRYELLDVEGRLAPMTAIRGKVLGFGAYGVVVELVDVSASGAHRRSSPSSTDATAGEFGGTAVNSGSPSASNSGNKVSTSGNKVSSSGTTAANVEAEPGQLSSAEREGEPAAKVDGDAASEAGGPPREHTERSSRIPGKRASGAVEKSGGSGIEPRGDSARVSRSVTYAAKIMYWAKAKTSAKPEEVRQTLEGFVHEELEAFKLLRETGISDSDLFQKHGLVVPQSVRRVAKLPTLLRASPALFPDTPLFFHNQLIMFPALKCSLDMLAQDRFTREGLRVLVRSLVRLVAGLHALGFSHNDVKPQNFLVGGDGGLFLGDFAYLAPIDEVQDCNKGFTVDYSSPELMACALKNGRMSMGPERDSWAVGVSAYRLACRNRFPFLLDRKFNAKSDPRLIATHIANLKETDLETSRCGTEDRVVMSIVLRLLHPDLSKRATVDQLVHEPFFQD

SEQ ID NO: 389 - protein, 435 aa, Toxoplasma gondii
MLLSISAGTGDTLSSRSQLYRELQNQAMNPAAASQRPNFAAGLGVILTKGRQYRVRLPSEEDLNLLRTMLTARGRLIPPSGQPSLSMRLRPIGIGGTEKHVSFLGVAGVHEGFILLKMRDKQDGGNVPDHIYWQPLFYTNPHSEKESVDPQFLKHGLVQRVQKQISLIPPGYEGRSEHLCSHYGVMFPGGTYVLAADNAPLQFDVESDQSGSRAVLNLFIQFSPAEIPLSVLSYKNLSPTLAAFLVKQMILNTAMLHSMGVVHNGISSAAFFLSGSELTGTTPPARLLYLVNFGAARFYTGKPEPFEEAGHVMYYDPETASVFTKVAALRPNVVYGQARDSWSLGRVMFQLLCGGSQHPFGHLGPPASPLVTAKRISMLARDRPALRLSTCFPPTSAPEMQDLMSIMANFLKFDANERPTPLEIVRRYPQLFTPL

SEQ ID NO: 390 - protein, 975 aa, Toxoplasma gondii
MKSQVLPGGGVGALPVFPVKPLGLVVLCFLLLLLVSEVLFLWRLQQLENDASRPSLDSLSPSTETSTKPPPSSPLEADLSASLVDAKDLLRLLSNISTVTREKTIVSENSTRVADDPGAVHSDLDTHIVSSVSSLTARPSVSDTPRLRSLQSPKAPLPPPAPSHSEASSISPSSSLTGKEEEMSLHHTPSTPPRPSSSSPAHGHRSPDSPHSPAGTTSLVSASGEVQASAVHAISTADPLEANRRTQPEERGSEKKRTSANEKRGRRDREAVSVAPAAVEDEEEVEEVEAFHDPFSEDDVALLRVPDLLVSQNATAFRMQFLSEDERRRVAKQKPLAVQGAPSRAKKKRAPDTSASASFSPPASHAYGSLRWKDVSFPASATVTHIPGHTGSFAEVYEPFLKGEDPRLLPHYLLGGSLGLTGAYGAFAAEGAYPRFSAGSTERRLKTDLASPDGAATLGHRSPARVSRHRSAERSRSSLRAGQRAAGVDGNSVDPQQQEAKGEEAARRELQRDADHVENAKGKEAENEARPTARITRSVVGNALLTREVRESSENLANLVNALDSGGSPAGEHRGALQTEDKEGGSNVPEATTPRLRLADLPKVLFSKPSRSLVKAARALERSVSSKEKQKLAGIIPFDVPVVVRSLATQKRRTVIFDGVLGAGGQGVVLLARDVDHPGLEMAVKIFRIKKKNRGASALHEIARLQRRLRWETAILKHAPRDVSSYVWSQLAHLVMPLDIVEPVEKWEHSDAEMRYWHQWLIFESFAGDVTRLKKLHSGSGQARLDASKQIFMACMRLHDTGMVHSDIKLANYFISSEGRIFLGDYSLSRPIGDVSPCVEGTLRFLPPENMKCIRDGEKNLVLSSKKDTWAVGVALYKLWCRNFFPFDLDSLSSEHAVDRVAEVSRDELNFYPCAPDMPVAVMDLIQQMLDPNIETRPTLRDLFVSHPVFSQLRKVTLQYTLADFREEQANQKGI

SEQ ID NO: 391 - protein, 694 aa, Toxoplasma gondii
MAEQKVCHKKMTQFAAQSMVSSLSSPPRVLRVIQLLLLQITLVTFAVDAQVEPRRLLRQARKPFEAHLRGQNRFYPHLERRNPPRGQQRYVPPRNQQILRHGQFSPDDGAMHFKPPANRVQSPYNFVKAGQAPTSTPYRVYVPLKERRGLAVPVNSREEDKLINKRDGLRTFRKERNVPTSASSQPKEEWADPQMIRPLDAKVLNEGKQFIARAVMAVQGKGVSPSFLTLQTLSQHAGGDEKRNHLHRRYEEAEGESDESVIWDTAALIQWMKPSRSYNIRATDALGIKNASGAQQESSWPLSTSSFLEIARKFNNWTRASGFLNTVRRFWPSGTVAKVADDAGLKHNIIWHKLLGVGGIGGVLLLEDKDEPVGSPLKKFAGKILYQLSDPSMNLSQSKEYFYQARNEEIGVASLFKHAALSLHDCPVTATDRMQFLFQRGFVLPQKAFWFEGTTQIPRFQDIVEASPRVVGSPGGEIMRLDRYIIAYPIVGPDLEDLDPRKFSLSAVTYIIYKLTKLMATMQEMNLVHTDIKAENFLARDDGELFAADLSMSIKMDPATLIPCLQGTMLYLDPNGAECAYRRGYQSPRAKRDAYALGVTFYKLICHDGPFHLGRLEKEAMEQTKTCPGNNPLLLMLSGISRFTRKDWVERKCPLADTSLLTIVKLLLDPREDRRWTPLDLVRKTAFFDQAPGI

SEQ ID NO: 392 - protein, 489 aa, Toxoplasma gondii
MSILGKHTATVGDRYKVRLTPEYGPGGGYGHCRDYLLQSESCWRGDLTSGVRGVLTKKGTRARTTKRHDLVAVTSGEHYWNQGLVYHEEQTAPPVAASNSFMQSTTSLATPADLNAPVDTQGQLDINSVLKNRPPAEAQLSPREIAAKTHFEAMFAKGLQLTVESIFTGETFTLTKPARFLGWGSTAIVFGLHRVKVGGASAPQQLAAKINVRSLQELQHLSSSQKKTALEDIQERFLREESSARNALQHVTPETALEHGVLFPVDVCRISKLFSGFCAGISYVILPVLALFPVFTCDLQQVVKSGLSRAAKLYITRLLLQAVAWLHANGVAHNDLKLENVLLSAEGKAVIADFGFAVKLGTASAIQFTAPYLDPQTAEAVPQEKTKTTASEERDAWALATLLFLLWCGSFPYVSDEQADLPTSDLLKLLVTLGKTEKPAPNFHLCKDLPPAVGHLVTAFLQWNSDNRSRPGDVLDDFLAATVSEGASA

SEQ ID NO: 393 - protein, 470 aa, Toxoplasma gondii
MRDSSRFGRTVFSRIFNVIAHFENMSFFSLLHLHSHQSVENATPSTSPVAEPNANAKDHPPRAGDTGYLLPKPDSGKSSSTHSGWCLSPHRDARDHIFSHSCISSAASVKIPRRTKSTNPVDPNSNPSPSTPPPEGLCAKRSHSEGGSAAARSKAHGWGHRERHASRRHTTQHLNPVKAGQPGAYGADGGTHEKNMREKGEESAPQCRSSRWHLGESQREHSLASVFHSVMVAMKSLPATFQREWSLVRKIYRQSGRVKHAQRLERAREAKLQKFGLSRRASSRKPLPSLVSMQQVVPTAECASALIKEVRRNLEKSMRDFQHASPALSFRRERLFPPGREFVVRSLARNPPFTTMALVAGRLLGGGSEAMVFAAEEIELPEKRDVFIGADDASRETSGEYLPRLLAIKIYLCEANLLDQPVKAAEEAEAVEWLQMAFWRLVPSCVDVLLSRQLGVAAPSWRYEWRTEST

SEQ ID NO: 394 - protein, 531 aa, Toxoplasma gondii
MRAQVALCLSLFLFATGVFGIKLQITSRQKKVGRLPADTQPEESALETGFSDSRAKRGFSQASPDGRRQSAGRSPSRRSDWISEISASPLETPSSATSTGRSGTYAVDRTQQRRPVWNRFRAVQTHFARLAWRLCRPFICPSVRRRFRHTEHGPIPAVNFRMGLETGQAALADYCGMLRLTEREACTETAQQVSDLLISTQVMPPDRNLVFESLFNPGSRVNLTRGELLGCGGTSNVYSMTQEDGTKVAVKILSSYAQMTNLASVLSAGASAMKIMRREAGISELLGNQDLDDILYNDRLLVPSDVLRLPGKNDWFFPEQSTVIYNFFLAFPIAAGTLEDVVPLLDTTQKSFAARVSATVQMVKVVAGLHRKGLVHGDLKPSNFLVSNSGIVLLGDFSYAYVRGQMSTFPIITWAFFSPENIRMATQFSQVRVELTHDSWMLAFTIYFLWCGRLPWGIAIEEGDYRKIVAILDQNTPETLNFHNCNGIPAGIQQLIRLLLAKDPSRRWTPEKAIAELNIFKLNRSEYAAQT

SEQ ID NO: 395 - protein, 632 aa, Toxoplasma gondii
MAAVCRDLLPYFTSWRILLCCYSVGLFMHMSRSLLPNTMVWASANSPRRLSHSTPSVFRSYTEIDNTAPVGSIHSPTESNVEPTAGRNKRALATASEEQLPTSHRSRRGAATSILSGLRSVYNASSRPAVDSRNRAKDPDRFVMRRAVVHSIEEVTERSDHHDLRGEDSAQTDSVNAPDDELVSELLHLGEYPHHIESLSDPEAVKILAHLVATTNTHDIVSQSRKKKLVEAFNMYLPDGDRFFVESLSDASESKEFVRGPLLGVGGNGLVFEAQDSDGHVYALKLLLVRMSTFLEAVGDLSHDAWRREEDWAFARALRKEMKVLRLFPPDKSPEQLYEEGFVLPLFQGILAGKPRMTPLTEEFGATSVVVGFHKVACSVGQLFSAHRLPDGVKLELTKQMVDRVARLHSYGILHGDVKWENFFLDDNGRVFLGDFEQAQSLGHRRTGPCGPRGGGTPSLHEPARAACYFSEPDRRLDLLESRDSWCLGVVSYKLWCHRLPFGLHLNRADMEGFMNQVATIERDRLVPDFDDCRGSEQTPEDVKELIAALLYHDRYRRETPLSLIEKSHLFRRPPSERNDVSVELRAHESDAADVLRPAAPLPEERLHAPETKFFKPRKHWWRSYLQACSIQ

SEQ ID NO: 396 - protein, 746 aa, Toxoplasma gondii
MASPRRFPCSTMARLCVLLLFFTLCLTTASSLAASDAKLASGAPASDNETQERSQANTASPSLTLALSPSDNSEAETENAGEHSNSSQQATVAPATESVLMSDSVGSDPLAAKTTSEETTVEALNSEATTSEDPLAGRAFSESLDASVKSDTASGESAEVADSLESQEASHLVGADVLIGKERPTDSEVSSATSSPESSAVSSEPERGEDAVALASPSGEDVGQASGDLGPLAPRVSLPSPLEVQGRNRDKQAVGTSLEAAQREAPVDAGAIRDLHHLRPPAPSRGRAAGDGNGNKPIGGKQSGAAPVPPGSPANQQADTNPANETSTGPGAGAGAANDDSGEQSATEDKSDSCGSSCRRGRSERRHRRGLQILTDIASSTWNAIKAVPTAVLSGARKMRLIARGKLPLSWRRFLSKVPRVDVNAVPEFRRLKEQMRREDRMVMLVETPSKELRALVKSAMRALGLSRVRPGITHATDPSPGDDANAQMLEEPLVVKARVFDERDGTRVGLEVNGQLWAAPKNAFILPAYGAWISDLGDWKPRANEGERRRRKKKLFMAFMVMPRTRGDVRDYLCKRSLPVDVKYAAAEMLYAVQKLHREGFLHRDIKLTNFFVGYDGHVLLADFDGVWPIGVPADADKYLVYTRGYLAPEIDPHDQVILNTAKSDVYALGVCLKQLAKRYPKTADVDKLHDLSDKMTEANPRRRFTLEEALGHSFFDGVDFETLEQLKHPAPFPGDFQNRATFYR

SEQ ID NO: 397 - protein, 553 aa, Toxoplasma gondii
MMFPAVAAPRRRLPGERLQRSQNPVETSWLSFRILATRGPCVTFTFLFLTVAFLGLSWVSVAVAAHAEHPEDSATNFLFSFAENSLANREPPEDSAARPSSRSGGAERRRLDSLIPGFLKRRRIFKQLRPVDEFQLREFQEASSKVKAQFFSAGHSRVTFVDRPSAALLSFLHLEEEDVPYGVVIKAIPYDAFDFYESVAEPYIHRMFDDPRKFPYVVPVLAALRSTSKRVLYLVLPLYRELPETVDEEARSVDFVLLLAEMAMAVCQLHERNLAHRDLKEDNFLVSPEGHIVVSDLATLDITDNKSFLIGTSGYMPPETRSSYLLRKGYTRSRYGEKTDVYSLGVAFRHLAFMLEGLGVQVPHRTQLAKLIKKMTSADPEKRPLIGEVMEDPFFASVDFRLVRQRAGKHPFKKLPGADLLVERQRARLEAREKADAAAKAADNAEVPAAKSPAGKTGGAGTLSGDRDRAGSGEKPAERAEEEKGRGRGAQTHEGNHDRTDDTGREELREGPGDQKPSGEENRGGGQPPGQREEQREGTGLEEGFNKEDAQES

SEQ ID NO: 398 - protein, 640 aa, Toxoplasma gondii
MPEQDLASGFLLRFQNARPVCLSVGSFVSFRTVQPRKMRDRGWRCVWHRMAGVGALFGIFGVLCTVEAGATVAAPQVETGPLLSVRAPRSPLHLRDVDAPEVTHASSEGSPQFESSLSQQRLRRPADRGEAHNGEEPRKDAATQTVRGYGGQSTEPPPASIVPVSSEAPQDGAEQRQASSAAESLAGLDPDAGDTGLRSQEMDEEGSGAAQDMERAHAAQPTVSTWDDAHLVQVSTSHPDMFPVDGSFSKKQEGRRERRLAVRGDDSFARGHNRDRDASNGRSILRRAPGWAKIAALATGLLVSAFGYSSYKHGGPRVALRIHKLHLKRKLPISWRRYLNNLPVLDERLFPEFEDILPWLRRGARLVKRVPHVSEALADFIGLDEETRRTGIVIKVKSSTDAEARRLVYEVNAHANMVPDNPFFLPIIGAYQGASKRAVYMILPRARADVADYVRARPYDVDVRLAAAEMVYSNYILHTHGFLHRDIKAHNYFVTFDGHVVLADFEGVGVLQQRTPVVGTRGYFAPELSRATDHTEKSDVFALGQTLKRLVKYMRPTVRVPHLRELWALTKRMTAKDPEERPTLKQVMEDPYFDGIDFERLEAKDQGVPFRGDFSIDDPDAGGKMYIPPSKEQDHEQENE

SEQ ID NO: 399 - protein, 624 aa, Toxoplasma gondii
MYQLLRIRSLFIFVSILVLQTVTVAALDDGAESLDPQPTAGEGAKELGNRTTSRRKDAVALKTDGTLSEAEAKRPVEERSPQSTYDFSSAASAFQKWADGMTPKKKEPDNLLVVKGDRKPKAPRIAEDNGTDDIAVDEGNEIEEVILPPLTTFLEREHYSAVAQMLNGMHERYEHYLSATVLEETRAFLDKVKDLRSNHIERFNKVIGNNEFAFLRPLRYSRLPHPSSDVLRNLHPEHNAVAEKHWKRAWGNHYASGEVLKIKRLDMINYGYASATYAVKRIFPYTLDPDDRQSRTLDQDGALKVFVVKRNRIEVDLVEELLLHQTRAWRFFPPERAEQLAETEGLLIPVSLLKLVNDDDEEIGQKEDRINELLGPKGDILNAFLLYPRAYACSLKFFLISWGRTDLLIKTAPMKAMISISIQMVYAVASLNSYGLVHGHIRPSSFVMTTDGKVLLTDFHTVVEEGSKLSCSHKRVRAMADLNASPEELECSHHGPGQTFEASFALDAWRLGVSLYKLWCRESWREPKPGETWTERLTTRQVAFVKAQQRGRTSRSGLDLQHCRADTPSFILRLIQQFLEPNPETRLTPIDAVKGTSLFRHMERRLKVVQDIRETMLRKRSEEL

SEQ ID NO: 400 - protein, 776 aa, Toxoplasma gondii
MGRAISFVLLLSALLPEGRGSVGAAALGSLSLAPTATPQTLLELSASSVTPEETGAAPLATPGDDSRKRKEDQAAGELLLSWLQVAGTSPYFPAAGPQTRRPVASSYQSRPRNPSHQPPPRGRRGPVRRSPQPDSVPYNLRRRPQAVGVQPGSAATRGRLQERGGLRQLGSNLRHRPLARHMPPEYSVLPDQFSAPLFTSGGNARWLGVDPQEGSDSVPASLTDPVSGPLSEEPSIAGRDQRPCQPVASPPRSYAPQPLGTSSPTFPGSSPLVSKQVGSDTPPATTHTSQTPSKGKKPPAPRPWVEPSVLSSVKRSELTLGQRDLADLVGGSPPQTTPTIQKASPPITDVSTDPPELGVSPQRVLRPRRMPETLPARILPPQHISQQVKQWRAFVQISPAISAASASSAQSPESQAMSESIDRMVPPQASYSVAAPDGTVRQFMRGAFLGAGATGIVTELIEKTSGRYFAAKFFFKEVASMEGASPAAFQAAQQRLQKESNGNELLRTTAAQVRDLWQKGFVASLGTYKLSARSGDGNQLLGTNLVDPEYTGLDGHQLMVLSDFLLLPLMGPRLDSLPHTALSDNAQKYLFHTLVTVVGSLHKSGLVHGNIRTTNVLINKLTGEAGLADFSLLMQTGSDVTDTMSFHPTQSEPERVHSLFGLGTQLPASEDFDSWNLGQLLFSLLCGFDKLPWALGQVFARFSAESPWEMAAEKFYRQFIKEVKREKFDAFCPGMTGTKLQLISIVKLLLDPTHETRWTARKLVDEHPFFQVVEDA

SEQ ID NO: 401 - protein, 541 aa, Toxoplasma gondii
MKNTLLSPVGFFTALAVLIECHLSDRCVAHHGSSTDGSGLRPPQEVDSAPRTPSIAVKELATFPGDDIQTSSQELPGYELWTREQSGASVRVGFPQNAESFLTQREARDEIANAHELVAVTPEGDAWNHSGVVPEEQTVTPASGSFIQRQAAHAPPSTRLTPVDRRGRSHTVSAVRRRVTVEDVMRPDQSAAMHAVLSAFGGGLVLKAKNKWGRTRYTLQGPATFLGMGAEGIVVRLNQVKSDRERSVTPVAVKLCLIRAAVFSGLTWWRKRRTRTELMKLFLSNENSVKRALPDLDPAEMLEHGLVVPHHAELVSGMPTWFAAGDSFFVLPVVSVSPLFTCDLETVVQNPLTFWAKMYITRQLLKSIAWMHQKGISHNDLKLENVLLSADGRVAIGDFGFSSPFGASLPIRGTHLYMDPDSSEAFFEQRENEITPHRDAWATGVLLFYLWCGVFPFGLQNVANAGPPQVMRVTVMHARTTRPPPNFRLCRRIPREVRNLVTGFLQWNEEARRLPSDVADAFLAATDDGGREARRIRTHQF

SEQ ID NO: 402 - protein, 588 aa, Toxoplasma gondii
MSKPFFPQVWVSCTGGVLNLRRHWLRVGNMSRAFAPTVLFVLLNVGGSLWVPRTLPVSAFQDAVAPHHPCIGRPCDQVASVVAVPPANNLGFKREPSVGSPGHFSFLQAVGGVGGPPYAGDGSPLLASRLDWQFLQQWHTDEDENARDGFVAALSRVTRLSQILEDCNMEMVLLLDRVFSRSPRITLSAVEPRTHRRRTLKLKIRSVAGTGGYNIVVKAFVIKSWFFRLGHWLGSLGRQRNTARAPGGETGQQTGTSGRRSSRSRGQSGREEGRREPQMVSLRIRVGGAPDCQVANEMQAAEVVQKCVSEADRIMHVFPEDVTPDVLVSRFRFAVPLYSGRIRHRSALLGQSRGYALLNYMDVLPPMLCDLFAAQSVVQPSMTRAIAKQLLELVAHLQALGVVHSDLKPENVLVDEAGNLFLADFDKAHKVGSRVRCSSLPHSLFADPQTVICRETTPDQEVTLAFSQDAWALGMLMYDTFCRNWPFMGMDYNNDSDTSNTIVLAGLLDRAAAVDTRAPIDWIGCDNPRVESEIKDLISRLLDIDPENRLDVLSFYMHSDFFNEGRNEANRSPPQRGAPILPLRESIV

SEQ ID NO: 403 - protein, 525 aa, Toxoplasma gondii
MTPSTCCFGVLFQSFRGNSASASEESCLGGGHPDGTTATVFRPKTFQALGLATDSDSEPEGRGGYQRLTESTRRKKKATGRIASLFGRGRGKGDEEASGDEGASGGKEQPLGPPSGIPRRRRFWQKEHVEPEDAVVRAFRRFLKYRVLDVETIEGAPSQLDRSSWTPSPPFFQPGEGSSKAVEYFVKQQTPALTDEMHKLLEVVDPVMPPGRPLQMSSPSSKRTTHFERGPMLRTDFFALTVDHQPFNMRIFPLPGGFEGEQKVEQYKKVMLNEQKVLSIFGVADGKKVSNAYHCYLPVEEVFFGKGQQVISLGPSLKMPSVVFLYPSASATLGQVAEAIKLAAQQQGTALVAQAAQLHITLQLIKLVAITTSKGILLRRLSLENFLLRGDGVVFLSGFSELVNEKEIFYETEDGTLVTQPPTRTSRGRRFTPADNSCDLGLVIFSLWCNGSPPEREPSGWVNLDFSSCESEVPVLVQQIICGLCRAHGYPPQNAFQTLGSHEFKQLRQLYRDVEQRAEVHLLVE

SEQ ID NO: 404 - protein, 490 aa, Toxoplasma gondii
MRHVFNSSAWRVDLSGSANVGRVAEEFDRQEGPDALIGQPTHADNQESLSNLCHTQNDTSTEPAGPVSNTSRRKAFRWRVHHVNTRVFSTLHRYLRCTPLCSRAKYDIRKNGLAFAQLDEHRGRSDIMAVLRWVDVEACVYKQDKGAIAAAVAVDSLVSNGSHFTLDVLDKECQPLRMVRGRYLGVGGNGIVFEASTAHSGELDSLALKLLFLDRTFLQSPQSDISKALAVSKRMEMRIRLLLRSVTSAQLYFRDRFAVPLFCGRIRGLPDLFDIGSRGAGCSIVVLYKRLYCSLADLLSACASLSYQARLFLTKQMIEVVHNLHCKGLVHRDIKDSNFFLDEQGNIYLGDFGLSVPNGSTEALVYTPKLTDPSDVGIVLAGWDRRRAIFAQVTEAADLWALGMTLYKLWTGVYPFGLSSKHFRRTKDVTMYIQQLSEDKSLPDLFRQRRDAGGQQVHPEVQRIIRGLLCFDRTQRLRLSEVVRTSQVLS

SEQ ID NO: 405 - protein, 206 aa, Toxoplasma gondii
MNYLGLCVTREKKGCTTGNVYMFTPLLQGDIRRVAVQHPSQCISGELVLKEMAASLKVLHDAGLVHGDVKEQNFFVGRDGHVVIADFGALGYPGCSLEAGTLGYIAPERLVNDNANSFASDIWALGVTFKNVLTALRATVRADREVLDGLSNRMTASDPAARPSVDDVLLDPCLSAPPSLASHDVAPFTPDAFGYYCLTGATNTSD

SEQ ID NO: 406 - protein, 510 aa, Toxoplasma gondii
MRFSAVLYMLSTCAVCGASLGLTSDEVDTVANTDAAGPAEQNDRFRKLGEKLRSSSDKNETDQATSESEDAHLWSSGSEGASGAPDELTSVTSMPFEEDIGYSQADLTGYSASTSQQSESWAKRAVRKGAAPFLEASESSSASPGVLGLGWSFVRSVWDDLKDLQSSNSSRDKQKEGDEAVNETGQNESFSWMSLWKWWSFYANLPELVETDYEEMKDVVRSMESSKEPVTRQVYMGSAKLAEDLRVPHALLTGGFTVKMCPGSRSKPWKALTEIFLRKKLLPPNSPFFVPLVATAKGKEAATLQFFPPTRGSLRAIATQAPEKLNVVLVMAEMVAAVEALHGLGILHGALSLDAFYVSREGHVQLSDFDSAIVDNVFRPISEMAEPVRDGYRALSRKLNISLLHTKAADVFSLGKAFEALADLTDLENGDRLMLEVLVERMTQADSEKRPSLNDIARDKFFDRVDFDSVRARTNPCVYSCRWRREKMSANDAATTASDADEDSDDDDLP

SEQ ID NO: 407 - protein, 377 aa, Toxoplasma gondii
MANTSVRRRQLLSSVLLLQWLTTVLGVAWGPNPIDGSKHGQFPSLRRTEGVSQSGSGHRGSVYRIPLADMTFWSWMSYLKELPDIDESRNPILKRLLSGSFLRRDGSTTVNVRVPARELVRLLSLTPEQQREGVSAKVRLINLLDPKYSVYEPYLYREILPKRSPLLLPSLGEYRGAFLTYIFHPLSKGLVGDMLETGRSHPDVQVLAANMVAALKSLHNLGLLHRSIELNSFSVLPDGTVVLGGLDTAAPIGTETRLWVGFFGQETAPEIDRNFLADLALTQGRHTVKSDVYSLGVAFRNLVQLLGNGNLGPEDRGAVRQDHLELLDKLSQKMIEEEPGNRPTIEEIMKDPLFEGLNFEDIEEGKARPFRYKQNRL

SEQ ID NO: 408 - protein, 159 aa, Toxoplasma gondii
MNDTGSWATERSGALPRFRTTGEQLSEGASVREDLAPGIRGVLTKKGARARTTKRHELVSVTSEEHYWNQGIADHKGQTAPPVAASSSFMQSPSSLATPVVLNAPVDFHGQGDITAAVRSRPLVTAGLSRHQIEAKNEFDRRFAEGFQLTAESIFTGET

SEQ ID NO: 409 - protein, 1363 aa, Toxoplasma gondii
MKQGTTRPRVGLTGAVLLLVVWTVAILIDCSSGSRVLFDRRPILARLRRATSFVDSTSGQNASPRPTKTDKIRKPRNDSRNYRYIELPNELRALLVSDPECDEAAASMRVGVGSMSDPPKIPGLAHFTEHMLFQGSKRFPGTHDFFDFVHNHGGYTNAFTSKFSTVFSFSIGPGFLEPGLDRLADLFSAPLLKSENLLKEVNAVHSEYIIDLTDDGRRKHHLIRQTAKGGPFSNFTVGNLESLMERTKQQGIDPVKAMREFHNKWYSSNLMTLAVVGRESLDVLESHVRKHFGNVPNGRVTPPVFEECSEAFIPLDPNELGTETLVVPEADLHDATFVFYLPPQAKNWRSKPLQFISEMLEHEGPTSLSSKLKREGLITSLVTDYWSPELCTVLQVNVRLTEGGRSKESVYKIGHALFTFLRNLGVSRPERWRVTEMAKIRQLGFTFADMPDPYALTVRAVEGLNYYTPEEVIAGDRLIYHFDPDIIQQYVQKFLVPDNVRLFIFDKKLAADVDREEYWFKIKHGVEPIMDSVFKKWKEITSAPANTVQSMMRMEGMALPAPNRFLPNNVAILPRPPGSGQGAEKSAFPEPLVFAGDHICANKCAVFHKQDTTFHSPKAVVELQIYYTGSHEDGVRERILTALYVQSLRFALRERFADTHRAGMSLGLGSGVAVGSTTLPTVKRQRVLTLSAAGFSDKLDYVLRAFAKSLAATEGASDEKPIPSPMELGVTMSHGVRHLMHSRVTAPSNVLASVQSSRVYTTAVRLPGGGRAARRTLTHDQITTMHRKPASMDVTLMRTPVSSLGIRIVGGRAEREATPVVAGGGKPLLEKRFFRLAFDQLRTDLRVATLNRTPLAQANDAVLELIMHPHVPVHKMYAALFEMEKNHPTLDAIFEEVADWGVKLWNEAAVEGLVQGNITSESATQLVGDVISLLPLKNIVAANTIAKPTISSFSSLRRASSVAPQSSSKQDSVPSSDMPTSTETLSMPSSAESQTPESTDRASFPMESTTGPAPYSVELSTGRTPYPDDLPTSSTPYPDDLPTSSTPYSDDLPTSSTPYPDDLPTSSTPYSDYLPTSSTPYPDDLPTSSTPYPDDLPTSGTPYPDDLPTRSTPAADDLPASSTPYPDDLPTSGTPYPDDFPTSSTPYPDDLPTSSTPYPDDLPTRSTPAADDLPTSRTPYPDDLPIRSTPSPIVLSAGRAPSVVVSPIERTSSPALLPTERTPLTERIAQALRPVGEAAAVRRLLVLRRSSIHRMPYSPFQYSSTWFHPSSNSRRQMMLRMALRRQLGALTRQAQPDTEGKPSTVFVFRRLAPMPRRLNIEQGPSFLQRQGEYAASGSAPHSDCTNGACAKGACSGTGCQKRL

SEQ ID NO: 410 - protein, 354 aa, Toxoplasma gondii
MPRRLNIEQGPSFLQRQGEYAASGSAPHSDCTNGACAKGACSGTGCQKTPVKPSGGPCKGDACTGSSCNSLECQRSSSSKSDHPCTGDECPVPCRGPGCSAPASHPSPCTEAECGKNSCPGCKQEEEKLVQLRSIRKNLNPNDKKNQAYLLIEVGALPNIHDRAVLYMVSRWMSQRFFNKLRTEQQLGYLTAMHSSRLEDRFYYRFFITSTYDPAEVADRIVEFINAERSKIPTQEEFATLKQAAIDVWKQKPKNIFEEFRKNRRQVVLGDRLFDINERMVAELERVTPEEIQSFKEKTMFNASWLLMEVYSQREKPQMLPQANGASGESKLDPWVDIDPELLSNITVPDMESD

SEQ ID NO: 411 - protein, 1645 aa, Toxoplasma gondii
MKQGTTRPRVGLTGAVLLLVVWTVAILIDCSSGSRVLFDRRPILARLRRATSFVDSTSGQNASPRPTKTDKIRKPRNDSRNYRYIELPNELRALLVSDPECDEAAASMRVGVGSMSDPPKIPGLAHFTEHMLFQGSKRFPGTHDFFDFVHNHGGYTNAFTSKFSTVFSFSIGPGFLEPGLDRLADLFSAPLLKSENLLKEVNAVHSEYIIDLTDDGRRKHHLIRQTAKGGPFSNFTVGNLESLMERTKQQGIDPVKAMREFHNKWYSSNLMTLAVVGRESLDVLESHVRKHFGNVPNGRVTPPVFEECSEAFIPLDPNELGTETLVVPEADLHDATFVFYLPPQAKNWRSKPLQFISEMLEHEGPTSLSSKLKREGLITSLVTDYWSPELCTVLQVNVRLTEGGRSKESVYKIGHALFTFLRNLGVSRPERWRVTEMAKIRQLGFAFADMPDPYALTVRAVEGLNYYTPEEVIAGDRLIYHFDPDIIQQYVQKFLVPDNVRLFIFDKKLAADVDREEYWFKIKHGVEPIMDSAFKKWKEITSAPANTVQSMMRMEGMALPAPNRFLPNNVAILPRPPGSGQGAEKSAFPEPLVFAGDHICANKCAVFHKQDTTFHSPKAVVELQIYYTGSHEDGVRERILTALYVQSLRFALRERFADTHRAGMSLGLGSGVAVGSTTLPTVKRQRVLTLSAAGFSDKLDYVLRAFAKSLAATEGASDEKPIPSPMELGVTMSHGVRHLMHSRVTAPSNVLASVQSSRVYTTAVRLPGGGRAARRTLTHDQITTMHRKPASMDVTLMRTPVSSLGIRIVGGRAEREATSVVAGGGKPLLEKRFFRLAFDQLRTDLRVATLNRTPLAQANDAVLELIMHPHVPVHKMYAALFEMEKNHPTLDAIFEEVADWGVKLWNEAAVEGLVQGNITSESATQLVGDVISLLPLKNIVAANTIAKPTISSFSSLRRASSVAPQSSSKQDSVPSSDMPTSTETLSMPSSAESQTPESTDRASFPMESTTGPAPYSVELSTGRTPYPDDLPTSSTPYPDDLPTSSTPYPDDLPTSSTPYPDDLPTSSTPYPDDLPTSSTPYPDDLPTRSTPAADDLPASSTPYPDDLPTSGTPYPDDLPTSSTPYPDDLPTSSTPYPDDLPTRSTPAADDLPTSRTPYPDDLPIRSTPSPIVLSAGRAPSVVVSPIERTSSPALLPTERTPLTERIAQALRPVGEAAAVRRLLVLRRSSIHRMPYSPFQYSSTWFHPSSNSRRQMMLRMALRRQLGALTRQAQPDTEGKPSTVFVFRRLAPMPRRLNIEQGPSFLQRQGEYAASGSAPHSDCTNGACAKGACSGTGCQKTPVKPSGGPCKGDACTGSSCNSLECQRSSSSKSDHPCTGDECPVPCRGPGCSAPASHPSPCTETECGKNSCPGCKQEEEKLVQLRSIRKNLNPNDKKNQAYLLIEVGALPNIHDRAVLYMVSRWMSQRFFNKLRTEQQLGYLTAMHSSRLEDRFYYRFFITSTYDPAEVADRIVEFINAERSKIPTQEEFATLKQAAIDVWKQKPKNIFEEFRKNRRQVVLGDRLFDINERMVAELERVTPEEIQSFKEKTMFNAPWLLMEVYSQREKPQMLPQANGASGESKLDPWVDIDPELLSNITVPDMESD

SEQ ID NO: 412 - protein, 784 aa, Toxoplasma gondii
MARSSRAAPSGAFAHGVAKASFTWISGMKTPFGCVFFFCLIALWGFSAALRTSDIGVDALSVSSRAAANGSEGGVAQSEQERASDEQRNDSEAHDSVASSESSDAERKDDPPDNKSTSETPEAKLAGRDASNPPASSKSPTPSPAPTPAVSTSTTPAKSSADTSKDPKNKLSSARKEKRIGKKFKRHDEFLADAVIDKLDSMRSVQVSGALLRRIWKEHQRVGDDMRDLLREYILALERELYTQQAEVFGVEQLKMDDVIHHEHSSEARKREVELEMQALAEQHNFMKKLFGHIQANVEAKNTSALVNRIEELDKPIDIIDAIDKRSGSDVLHCLKVIGKSIRYMQESVKKFSRELKTLERLDAERPSGEAERIRETLGFVMDPLSGPLSSMDYESLSWIPSKGQALLHVDKAYHDRMQHDYDSFLMDNDDADFDHSHHYDPFDYNDPFDFDDEDDDDDDVPRKKRTHGHPEKQLHFKRNQGSWKHDFRLPWEKEEAHPWYKGSSKPSRAHSHRQSVSVYASPTEPVEDHEEDSSMNHEDSAVFPGLFFLELGSKRTVGTAADNTPYAKQKSFVQRAQHSVQDIREHRDVDREDGVEGEQPLSFLETRSSAEEGGGSDEMRSESEGQGSAANGTEGESDKAEEAGKTAGGSAEKDKDASEAEGAEEASSEKTDGQGGNDQPSESESAGGAATHGESSTPEEGEGSEKAEEKGGHDKPEENDSSEKAEEKGGHDKPEENDSSEKAEEKGGHDKPEENDSSEKAEEKGGHDKPEENDSSEKAEEKG

SEQ ID NO: 413 - protein, 291 aa, Toxoplasma gondii
MKHFCLKTPASTKASRFTSGFCRNKFPPAAAPSYQSVSLTKQAFEGIMRGCEEFRDKPSCDMMEKATQRLKESGTPVIYDCHWLSEGPEVSGEVLSDGTQPGDNEEKEVGKEEAAQTQGGRSICVNRLEAPTAEKLLWGTIIAEKERKLQELQISRNLTPDKVCVRPRELANAMLNPDKPFYALGDQVEASHCCFVKCRPGASFMGISRVITCHEEGVFDPQVACIAKGTLSSQQQAFMKEVQDYADVVEAAPELAAAGLETGGALATASTQGVAVAAFALIGVSAIVKTF

SEQ ID NO: 414 - protein, 1158 aa, Toxoplasma gondii
MARSSRAAPSGAFAHGVAKASFTWISGMKTPFGCVFFFCLIALWGFSAALRTSDIGVDALSVSSRAAANGSEGGVAQSEQERASDEQRNDSEAHDSVASSESSDAERKDDPPDNKSTSETPEAKLAGRDASNPPASSKSPTPSPAPTPAVSTSTTPAKSSADTSKDPKNKLSSARKEKRIGKKFKRHDEFLADAVIDKLDSMRSVQVSGALLRRIWKEHQRVGDDMRDLLREYILALERELYTQQAEVFGVEQLKMDDVIHHEHSSEARKREVELEMQALAEQHNFMKKLFGHIQANVEAKNTSALVNRIEELDKPIDIIDAIDKRSGSDVLHCLKVIGKSIRYMQESVKKFSRELKTLERLDAERPSGEAERIRETLGFVMDPLSGPLSSMDYESLSWIPSKGQALLHVDKAYHDRMQHDYDSFLMDNDDADFDHSHHYDPFDYNDPFDFDDEDDDDDDVPRKKRTHGHPEKQLHFKRNQGSWKHDFRLPWEKEEAHPWYKGSSKPSRAHSHRQSVSVYASPTEPVEDHEEDSSMNHEDSAVFPGLFFLELGSKRTVGTAADNTPYAKQKSFVQRAQHSVQDIREHRDVDREDGVEGEQPLSFLETRSSAEEGGGSDEMRSESEGQGSAANGTEGESDKAEEAGKTAGGSAEKDKDASEAEGAEEASSEKTDGQGGNDQPSESESAGGAATHGESSTPEEGEGSEKAEEKGGHDKPEENDSSEKAEEKGGHDKPEENDSSEKAEEKGGHDKPEENDSSEKAEEKGGHDKPEENDSSEKAEEKGGHDKPEENDSSEKAEEKGGHDKSEENDSSEKAEETGSHDKPEENDSSEKAEATSHTRSEDHPRCIEIMDPQECVKTKNCFHDDVYRQCFFNCTAIVEADKCKEHQNCRYETLLPKDACVNQGYQSVSLTKQAFEGIMRGCEEFRDKPSCDMMEKATQRLKESGTPVIYDCHWLSEGPEVSGEVLSDGTQPGDNEEKEVGKEEAAQTQGGRSICVNRLEAPTAEKLLWGTIIAEKERKLQELQISRNLTPDKVCVRPRELANAMLNPDKPFYALGDQVEVKCRPGASFMGISRVITCHEEGVFDPQVACIAKGTLSSQQQAFMKEVQDYADVVEAAPELAAAGLETGGALATASTQGVAVAAFALIGVSAIVKTF

SEQ ID NO: 415 - protein, 835 aa, Toxoplasma gondii
MPEVNCLGAEPAFCNPSKCIFNLRLRGASPLVSIFVLTLLVAAPKLSPQWATATTVLKDQGFHAAIHHLGNNREGRRPESSSWGFSDQSPSAPRFAAIPKSVELSSFLQTDASPSSGGIWAGVKKYVELGTSGERHVAQDDNEKKTTNGDTAQGDMPSQEGATAAEAQPQEAKESEDAFSHETTGKVETETENKSEVYRHMAQEELRSARADLVKQTNGTPEEYEETGSFPSLCGSWQTVPSSPHFSSNKEFTRYSQQNASLLEGESDTADPLPYPTCQWLPRRGIHISERRTYGFKPNVVSIERLEFHSEEGCLPKHLAKVWRYSGYWDPQSAAKDPQTKSEEIPAKLSWSRVNIKMEVNALSRSQHLAPPDARSGEPTPVEAECLGDGDRMWIPPVRHMHLDLRDTCTRPHGNFLYSQPVPPEFIITPQEIPVSHEVLAHRLKRRLRARMSILQRKHTNSPDVPRDVSLKSEAEEAIASKWTDAVDQRFATRWRDYLVQQNLWIEKVCQWHLLRESCLVPPPLAGPTPPEHHKDKGDGKKEHESQCYIPSVRHSLTRENGIDYLDVPLFPFTEDAEHVRLRKVGGCNPHLQVDLRQNKDASKLAEEQERHSADEELASVAVTSKSIHPHNHASSPGVNQGAAGGTAIPVPSVTDAKNVNTHERAENAPDAVAPEMLAQNVPTDEAGQQDAAKLGSQDEATIKPVAQQDIPVEKATSTDATESVETPVEKIGENSQEEPAAVEQPSSVEGQTEPDQQPSDEEAQKDGAENETPESTGETAETPAAEIPEQEAESAAPAVDASSSDAAGPAATEAPDQETGEANEEASSATEDSS

SEQ ID NO: 416 - protein, 1479 aa, Toxoplasma gondii
MTKRAGLPLGRAFLVLILLSAADSLFFSSFPRSALQLFSSVLFTDAAEPDSDATPGLRPQPSPRTFRPTGYQRIEVKTVDEELPEDLKVYTASTRGSSSRTFEVRNAGGRQEGFTLSVLTAGGPLPHGSWSWSGTPPEVQTTGGSQISFGWVPDTETPSLPERNLLQLKRMLRDEGLIEAVQLRAAEKGCPVAVLHNLRQLPVNFREVLHEEYESRSNPAKMYEVANSYVQQRGSDAARWSVSQSVELSLLEMHATSTTDPRGSSAVPSFLETGPQVRVAMTDAVPSGIRVYATPPAPRPVPVQSNQTEKERSPTSKRLVGMQLGLYLICKLAALFGHPTLFLNPYYTEQQLLEAVAQALGIAPPHRGDFENEGNEAQATANQHNGSADQLLAAIEIFRLGPNPYTIGHVLTLMIAYLDYESFFGASPSKPFHSWVSLAASAGNNTGFAMLDEMCDNHRGPKRRGQKHWYQTGGARKHKNRDMLPLHRQLCDALELVLNGVQQIQIDLMDELGKYKTGVEPLVDPATNSARIHTRTCRGLSPVCDYEATILAPVRALEPHEQQDSLRTKKAFNLVTGYGSGHVGQITGSIAEPFSHSWRTRWGKVVADPTAYGEIFERTLWFDDRELMAKSSGALFRQYDRIAKDSMSFGVFMNVENGLLKKDMRSKLEAYISQRKSFVEKRQQSRFAKLRKKIPENDPYALRAAIFLALNSRTFCAQPTSFLSSFRTFLTNQYHKLSQGRNLPRSQRSLMAFMRTGQVKFFQEWCSFDPLAVNALFLFRFAVSGTDPAALHDRQHTRVSRNKKTMRILNSKWTPAVLKKLMRKVNHKHMAREAKALLLRSLDPTVLSSIVTAFDFITHTQANLEVNQNAFMYHEVRAREVSRQSAAEKGSHRLHERGLVRETDDMIKRWAEHGIPGDIKRRLARGEKLPEGMSFGGIPIPNLTNWDAQLNSKWLEAYNAYLRHPYGRAALNARDPVALLVKDSRDRLQAEAEGTIFLGRIAKRVHQSKNLLRRAGRALKTFFLSLLRENERSEYAVWFGVKVDMRQVIQTCRQINSVAEVVKNDRLYDFITDGWMELVKDVVAGYTKASVRVPGFDTISAANEQLRKEGVAAATARNQGFLSIHYDYANLPEEERKKEFQRSMCMEQCEALWKLVMAFVMPNLQNPKKLKGYEKDFSGAKEIEKLNSPHHVNAFRFSLSVQIDFFDNMLDKTSKKNLKAMKFGASTWFTYAMKLAGQVNSEMGNPNLGTALYMQAAYYGNYIRKWMEQRRKSRKQAIIGVLTLGMMGLYALLNVADIVQHMEDIGGAPPVSCVTNEILGVTCAPQAIAKATTSAARVATQDFLKVGLFAGMAPYLMLPMAVVSVWNILKSEIKVLLQFEMALKHTFTRLKRWLAAPFKNWWAKRGRLKDALFRRASQTYRKTEQETKQPPRPRNLHNPSSWGDTELDSLGVPPEPFVQDFEIKYTTPVFPMSAPLIKA

SEQ ID NO: 417 - protein, 1958 aa, Toxoplasma gondii
MTTSPRVAKWALRVLALVFLHHVTVCTVCEAKALHVIRPHRNFAGLDVQQSSVADLQDEGKGISFAQTYRERDIWFGMLYFEYVITASTTMTLAFKSMAKYIYTAPFLTKLFASNRWLKYSTLDFPQKQQIIRKIARRASSKSLFSRALPGDRVADLFADMYLRRVTSRLSRTPGFRKPQYLKMKEDLTQLIKATNAPTEAMEVVLGNNTQNMFTWIDSVRQNPFATVKNVVVHAFENGLKGVSGMVEWELNQGCFAIAQQTRHILPFGSLFPGGILGKIMQKLMRSYIMFFHPVLANFKGLLALFLGVLCKVRLPQLINAVFGAIFRAKRRAGRYIHKFFFKTISLRKDITGKILVDDLVRGSGAVMITLLFQLHGVDIDAISRRGGAVESGVLAGQGVWTLSDGLFVGLKDFGQLFRAYFERYVNLTSAIHTYCAKQTTNFFTETELDEFYNGENVDRIPPRERLLAWCDKNKSYLAIIEKDFIGLATNFLNHMIKCLKMDFKYFEGYLANIMSIFYEMTFATLESDIVSAINANQGRAPHTLELEAILKRRQQANNPPKEAEMPRTMFRKPWMRAAIRKLAHGYFSSAAGFALKTLLQQIKPANAEKLLDKAFTRVKEGSKLIRSSLTVILGRFFNSQALIVRAHDQTVRMRMYEFINQCQNPEDPNHRDVCGNNVTTNIDEVKFVSKSLLALNLGILVSPRDLLLSQVIETDPAKDSIDPTEFFAEWEAWLQAKGYKPHQKGKEYLLFAEDINQKANIIAFVEALRHTLRDRLRFGRFDQEGADNLRLFDVNGRSAIFRPRDPQSMWDRIKEVRPDPLDAPATFEVLDYNEGILRFSSKPGIPFEGRLEYADDRRELRSIQQDPQAIKELLVSQIMQIKPRLSAEMTATLMMVLHRYTTSFHRHSFATFLQNLSPKMFFDGVLAFADQHQQQAEATLHLDRRLYSFPMTFQTFKDIVFNSLNTMVLRMHSLDTADSLSVFLVGLVHYAYQKIQKNRTGRTLVMQHFLRGLVHVMRSVDAERFREDFPECQFLIEPNGTIDEVVAIKCALYRFVKLRSLELPRAIAPDVEESRMTEARARTYLNGFVEYLDRLRSERTSWASFLNFKGFLETAELYRETVGAYSYEELERQIKTEPITDLDVLEQLRALMDPSLGRIVAPKKDEGTAQVIRKIWGNLGEFSSGTRQRVRSALSQMRSRLVSVMGSTTLPKAMRLFNVMNSSQFFGALEFAEFRAFPDTRTPPEDILKASDLALFGRVLLVLETTPLYLDNPKQMSDIVMQMRSIPFISPECQELFREIEEMVRHMSHEDVRVAVGWLLTFNIGKGLTGSTVALGLLALAGVPFANSQISHQDKIGILRTLDADTLRFIKKHLLMPMVFRHMASLSDGEAMNLLRFVPKATLLVAYPASIRYLPLSEPVNVVDAVDKLIASKAIDAVQQHLGQVRQLPGEASHDAVCRTMINNIKVELGLSTEDAMKFWTRSHMFFDKRLPAACILLIHLKAMREQNIRETTVAALVDMLYYNGTALNDHLAFIAKKGANELERQKQIDRVGSLLTMVYVAVVSGSLQVDASFMGYSGETKNLTFHSRRSSRGTEVPLLTACIQATTHIMGPPKEKPEIFQASLSSYFLGEWFRFVETSRLEEYAAAYRRGGGFQNISRETLKNISSVYNYYDIGDYFISIRQRSLYPQNEIVKTASMALIQDEATIDDYGMAMLTVDMGHRVRKAKIKCYEDALKDYVEYVDKSRSAQEMFKIDCVHNYFIDMGSLGYSAASITPEQKDQIIASLDRVFAGKCEDMYTALIGSQPDIHKLKQQAWAFATLAHNSLNSATRLGSIVNMLHNLITDIAAGTPWNNVVDGIAAERANKIWERLGDVSHRTPIYTAIDRPYLFNPFAFLLDFLLYVKTNKAHKLRMPKMLLMKRAAVLKELPFKKKTTPPGMTEYKERAAALKDAFFAP

SEQ ID NO: 418 - protein, 984 aa, Toxoplasma gondii
MAIKNTLTGSGLLVLLTLACGTTVQSSPPTPAPRMYPNMNERPLSAESRLTPGTYRSELHIDLKSPQKTASQSSLAPTGDNNSKVESIIAGSDTTPRSAEGTSESPPVPQLGTPPRPAPRRSKGEGERQPPTAAPRTSRSVDTGSGSDASTEQQAGGQKVVTPIPASKGIYPSLDELRRSQESNVDAGSGTSTNEGGGTSEGPQVPQSGIPPRTGRRRAKARNRKRHPTPASRESSSEDENQPPTTASRPSNGEGESQPPTAAPRTSRSVDTGSGSDASTEQQAGGQKVVTPIPASKGIYPNLDELRQTQEGEESAPQPADVTWFSMSVPMGVVDRRVSRALKEQFFQFLQHLSADYPKQVQTVYEFLGWVADKLPENEEEVQMFIDALNTTEAMVGKAARWIFKAIPERERETIYSSFYQMFRDKLPKKFFETAEGMNPDVGQYFSAEEPVAVTPEIPAKSEEDSEAAETPTPLRRQANVAAQVLHPLPAKGVTRREWIPWPKMQNAISKAHGPLTRVPEWTPVTGSCALGDGYTDIDVTKATTDVLFRITLLILQQIRRKKTERGKLEDDQALVALCSAAGAFVDAWQHQQQALILEDPGTPKAHAQLIERLRNAGKYFMKSYDETTGESDHQQWKKNKAEVSKLGKSALMKSCVKYIKASGDVATRPFDSGTAKYPSRSLYGGIANTLETPFADSEAVAKAVHDYAKEHKKPEKLVGLCGALQISGYFKKCFSDAGRLSSVSFFHQHVDGASVLVRTLARERPIGRHALSQAICDPNISAQYFEGAFRLFSSTVSQEWEKENLFAQLASWTGKEMVLAPSLEEQAAVPPAQPAYETVYGDEEDRIYRIHVSGRHSSPQEVLYVGGIPSTVKPQQVHVLGPTVSDESRRVIHPVRHRSRTAPSSEAASAAAESSDEDPLPAENATAFLGVTPQEEESDAYKHTLDFDAVSPRKNKNKENRISAPLKQSDTLIEESTSKTSEL

SEQ ID NO: 419 - protein, 1702 aa, Toxoplasma gondii
MAEFTWRPLLMSLPKMIAFFHILLFSGALAAAAGSPAADLVASVQTVSNERKDLYARDTQPTARTGIDIGVSFTQQASGNARTFEIRQHGSGPPRPAPRRAAAVADDIFGSEDFSPPPMNVAGAPLRDMGVHFLECQATDGKIECTGQGAGARPPFFRGGVDPTEIHEIVQSRTVGPADYDEERPEQTPDYLSPTDVVTLQRFVSSANASNSPLLEDPVQVCLSRRKPTYTCHLLHEFAATSVIVEESGNLVCEDKAPLTVAEKRKINDAVKAGRTPQATGGQSSRPPNPTVSPSKAGAAPQNAASRQPVSFVEQENSEASMPTANTEQASATTEDTKIASAATDSGDYGEAAAGESAQEGDRPPPYNPDADEAGVPRAVQEAYEEARPLQEATIDKFKQDAAAAAEAADHFAQVSAFNAMQSALTKISAGYHLRAGSHVVLSACKRLVEAVAANPPGPGTVIPLEELRMQLVATLTQDFALAQAFIDYAIHIVHSAIETLTPQMVANALLELSGIEELINHTARVKSRLAARGQDSPANVRKEIVQESFRQLKVELFQEIVTRVCELMDDPESFLKTVPIIVGTTPTAPLRTGGHLGADYIIHLRNDLCDVTASDAQIFPSAPADEGLQGFPRHNLGERLVGWMDVMARTKTARKEVFKIIDFTKAKDVLLFASETWKARYATLQAPAAPAPSFYGITTSGCRNVNDIMKSKFFDMYLHQSGFMKLQRHGNDNSRQRFMHRVTLLQNDGILPQLPLEADYELMELNAAMQKNFVAANKSIFSRRAARHSKYGYLDLCDVACYQKIDRLHNDVMTNVFFSLDTTLMKIVAKVHRSYGIAKAFFQLGARQQHIADPNLGMWARRLFVHWASHNEVKQMQGQKVVKVNYENLRHGEFTLDTVRMRDALVRYTNMLKADPITRDLMSLVIHTWIHIRGVRNAAMGFKNSQKLNESMNASAIGAVFAKLWYESDISVVAPHQELKPFGAPLASMALQIGFFLHTVVEEYKMSLLEKAGAQIKSWFVGMFQKNKRRTVPRTWKAVVAATNRAPKVNLKAYQGALLVIKTLAKMFRERFLYRFYMQGQGSKVDFNTPTLLIHALVASWMDPSLDRLELSSRTIPNAKKLFWYYVWVNENGPSNAATRIVLTGCKKYTFLLPGVVRSVTSSTSEVVEAGSNILKIDKIILKRSSLEAYMNHLQATYDDPLTIVQVALDLAARCEGYSAAKDQPAQAMRGPARVRRATGESTTFTIRGGGVQGGTMSFVEAEADDERKEDSEDNTVDLSEQDQDSSFVQLKKLFNRRGSSAAGQAVQTDAQPLPKAVQTDAQPLPKVRRGGPDVDASAVILGSRFMLDLWCSKYRKMLVEKLSGISTKDATVMQQEISKVFSAVSSIKIAIPDYKDLWDFSLRCDWMDGYPDAEKMRAARAEMVTYAMAKASTGKRLKRMLQKVRSWIRKKAFAAARKLKSLKNRISTAFGRGKPPKAKVPDWAVVNAGMGMWTGKVFSTHLTFNEDEMSCNGPHEPIRVMSWKQNHFTTFASSSTNAERNYVLVKKGDDSHCWATREALVHKGWSGIPVYQYAEPAGFWLQEVSPSNQPFVVNWDGYLTTSDNLTLQDIDINASSDSLKSHAVMRIVDSNGKTIYQGPPTGVVQTQGGVVTLGSIRNLVSGVHSTGDSVEVRVTASGPQLTSVADLDTQFKEIPDLVLR

SEQ ID NO: 420 - protein, 1738 aa, Toxoplasma gondii
MGGRATTSGARSLALPLLALFKPSFVLLFFLSSAVSSGLAGSRIADGVLLPAGQDRSRSAPPQIKPGVGHFGEGSHGLNISRTFLANSASTSLHSSSTGPSRSAAARLSSVHSVAPSSTPLSPSSLLRGSKASRSAFPSFSSLRKEKLSTSSAEKQGIVDNSFEDEGLEGRARKPRAPPAVDESLIDLSGHSDTPEMSPSAGVNDVLAPARILNPKQFARQLVAKVHTAFVQRDQRIAEDQKDGKENVEKERRHGSSALLGVDEQLKQADHGDVAADDGETGEIDVNEAEALIPDEESVGRSVFLQDAREFEDDDGEQDDDADDVSSSHDIRARDAHTFAFVQNTDQTEKEEAEGSSQEDDDMVGSNEETGSKSKSEGGDASEKEEKSEKGDTSERGDKSEKEDTTEKEEKSENGDTSERGDKSENGDTSEKEDQSGKGDTSQQGDKSEKEEKSEAADKSEADTSKNSSSAKAGVSEKFKSAAQPRSHLVHITTGYLPKIRAYRATVNPSHSRRRKKKKEGESEDTESKAHEKHREGEALPEPRDSEKESESKAEAAASHNEPGNEGDEAPGDSGDQERQAGGDSVPSHPGDNAVNESRSGDNRGEAGETREAENDAAVGHSDETGTGETPSAEGHHGEESGAETAVPSDPREEMGRAEARSANSPEENTAEATGGGASPYREEAETIVQPYTDARQGGNNDASAASPVARHDYTEGSQASPASRPDDNARATGSDSSPVYREHAWSGEAPAGEGQQEYTGGAGYAAPVSHHDQTEASPARSVTTPEWSAQATGSEPQPGEDTARDQDHVDNASADRQNAEAEGNEAKSEGSPENNAQETHETGSEPQPGEDTARDQDHVDNASADRQNAEAEGNEAKSEGSPENNAQETHETGSEPQPGEDTARDQDHVDNASADRQNAEAEGNEAKSEGSPENNAQETHETGSEPQPGEGTARDQEHVDNASADRQNAEAEGNEAKSEGSPENNAQETHETGSEPQPGEGTARDQDHVDNASADRQNAEAEGNEAKSEGSPENNAQETHETGSEPQPGEGTARDQDHVDNASADRQNAEAEGNEAKSEGSPENNAQETHETGSEPQPGEGTARDQDHVDNASADRQNAEAEGNEAKSVTGPDGGAQANGGESAITQHKQASAGDSEGRQDYRNGAGYASPVARHDHAEASLVRSATTLEGRAQNTGTPASAQREETKPRPAAVEDVSKNKEPEIEEEPIHLQHTGTNANIGHTNATSANHQPTTEAEGGSADAHHGGDEQKEGEHERAPGEGGHEAAGGSADAHHGGDEQKEGEHERAPGEGGHEAEGGSADAHHGGDEQKEGEHERAPGEGGHEAEGGSADAHHGGDEQKEGEHERAPGEGGHEAEGGSADAHHGGDEQKEGEHEREPGEGGHEAEGGSADAHHGGDEQKEGEHERAPGEGGHEAEGGSADAHHGGDEQKEGEHERAPGEGGHEAEGGSADAHHGGDEQKEGEHERVPGEGGHEAEGGSADAHHGGDEQKEGEHERAPGEGGHEAEGGSADAHHGGDEQKEGEHERAPGEGGHEAEGGSADAHHGGDEQKEGEHERAPREGGHEAEGGSADAHHGGDEQKEGEHERAPGEGGHEAEGGSADAHHGGDEQKEGEHEREPGEGGHEAEGGSADAHHGGDEQKEGEHERAPGEGGHEAEGGSADAHHGGDEQKEGEHERAPGEGGHEAEGGSADAHHGGDEQKEGEHERAPGEGGHEA

SEQ ID NO: 421 - protein, 733 aa, Toxoplasma gondii
EGGHEAEGGSADAHHGGDEQKEGEHERAPGEGGHEAEGGSADAHHGGDEQKEGEHERAPGEGGHEAEGGSADAHHGGDEQKEGEHERAPGEGGHEAEGGSADAHHGGDEQKEGEHERAPGEGGHEAEGGSADAHHGGDEQKEGEHERAPGEGGHEAEGGSADAHHGGDEQKEGEHERAPGEGGHEAEGGSADSHHGGDEQKERGGEGSAEEQERGSGGAWEAAVHPHEQGRVTEAEGESSRVEEEHEAGGAPVHAHLGNEGGNEVGLSLGDQKQGSGGESSSSQAGHAKTEERKSGYSHHGPETEEDTAFSHSGGGTGDERETRRSNSEQRKERTEEGGARDQPQNEKKTEEQHAQKQEEQYKRDIALSKHQEAEENRRHADVLLQHHHLGQGGPRGRTAVTSHSHMHVQDVTQHHQLQEATQMAGKLTRHLQIQNSLKLREMFLKRKEVGHLNLLKHFQDLMQAVVSRIYSKLKGAKRSLKRMYSHSRSIIKRFLHETDHKVVRPEELPSAVLTPPDEGNVLGKTTNGIVMDCPTDCNPAACDNKPVEPAQCFKYEAVAGGGGFRRCEPFADPLTATCGKGFTRCAMAAPTRGKHYQMFASPPDHPLPQPLLIQGSNLHACLRLLPVHQATRCSPESAETVEAALKDTQAVAQQPPPHVLEQAVLFENIQVPMPGSYKLCMLQYWRPPDSKPTDNVFIMGIDEIGTLDVLQQPDAETLKHVQGLHKKDSQMH

SEQ ID NO: 422 - protein, 2265 aa, Toxoplasma gondii
MGGRATTSGARSLALPLLALFKPSFVLLFFLSSAVSSGLAGSRIADGVLLPAGQDRSRSAPPQIKPGVGHFGEGSHGLNISRTFLANSASTSLHSSSTGPSRSAAARLSSVHSVAPSSTPLSPSSLLRGSKASRSAFPSFSSLRKEKLSTSSAEKQGIVDNSFEDEGLEGRARKPRAPPAVDESLIDLSGHSDTPEMSPSAGVNDVLAPARILNPKQFARQLVAKVHTAFVQRDQRIAEDQKDGKENVEKERRQGSSALLGVDEQLKQADHGDVAADDGETGEIDVNEAEALIPDEESVGRSVFLQDAREFEDDDGKQDDDADDVSSSHDIRARDAHTFAFVQNTDQTEKEEAEGSSQEDDDMVGSNEETGSKSKSEGGDASEKEEKSEKGDTSERGDKSEKEDTTEKEEKSENGDTSERGDKSENGDTSEKEDQSGKGDTSQQGDKSEKEEKSEAADKSEADTSKNSSSAKAGVSEKFKSAAQPRSHLVHITTGYLPKIRAYRATVNPSHSRRRKKKKEGGSEDTESKAHEKHREGEALPEPRDSEKESESKAEAAASHNEPGNEGDEAPGDSGDQERQAGGDSVPSHPGDNAVNESRSGDNRGEAGETREAENDAAVGHSEDTGTGETPSAEGHHGEESGAETVVPSDPREEMGMAEARSANSPEENTAEATGGGASPYREEAETIVQPYTDARQGGNNDASAASPVARHDYTEGSQASPASRPDDNARATGSDSSPVYREHAWSGEAPAGEGQQEYTGGAGYAAPVSHHDQTEASPARSVTTPEWSAQATGSEPQPGEGTARDQEHVDNASADRQNAEAEGNEAKSEGSPENNAQETHETGSEPQPGEGTARDQEHVDNASADRQNAEAEGNEAKSEGSPENNAQETHETGSEPQPGEGTARDQDHVDNASADRQNAEAEGNEAKSEGSPENNAQETHETGSEPQPGEGTARDQEHVDNASADRQNAEAEGNEAKSEGSPENNAQETHETGSEPQPGEGTARDQEHVDNASADRQNAEAEGNEAKSEGSPENNAQETHETGSEPQPGEGTARDQDHVDNASADRQNAEAEGNEAKSVTGPDGGAQANGGESAVTQHKQASAGDSEGRQDYRNGAGYASPVARHDHAEASLARSATTLEGRAQNTGTPASAQREETKPRPAAVEDVSKNKEPEIEEEPIHLQHTGTNANIGHTNATSANHQPTTEAEGGSADAHHGGDEQKEGEHERAPGEGGHEAEGGSADAHHGGDEQKEGEHERAPGEGGHEAEGGSADAHHGGDEQKEGEHERAPGEGGHEAEGGSADAHHGGDEQKEGEHERAPSEGGHEAESGSADAHHGGDEQKEGEHERAPGEGGHEAEGGSADAHHGGDEQKEGEHARAPGEGGHEAEGGSADAHHGGDEQKEGEHERAPGEGGHEAEGGSADAHHGGDEQKEGEHERAPGEGGHEAEGGSADAHHGGDEQKEGEHERAPGEGGHEAEGGSADAHHGGDEQKEGEHERAPGEGGHEAEGGSADAHHGGDEQKEGEHERAPGEGGHEAEGGSADAHHGGDEQKEGEHERAPGEGGHEAEGGSADAHHGGDEQKEGEHERAPGEGGHEAEGGSADAHHGGDEQKEGEHERAPGEGGHEAEGGSADAHHGGDEQKEGEHERAPGEGGHEAEGGSADAHHGGDEQKEGEHERAPGEGGHEAEGGSADAHHGGDEQKEGEHERAPGEGGHEAEGGSADAHHGGDEQKERGGEGSAEEQERGSGVAWEAAVHPHEQGRVTEAEGESSRVEEEHEAGGAPVHAHLGNEGGNEVGLSLGDQKQGSGGESSSSQAGHAKTEERKSGYSHHGPETEEDTAFSHSGGGTGDERETRRSNSEQRKERTEEGGARDQPQNEKKTEEQHAQKQEEQHKRDIALSKHQEAEENRRHADVLLQHHHLGQGGPRGRTAVTSHSHMHVQDVTQHHQLQEATQMAGKLTRHLQIQNSLKLREMFLKRKEVGHLNLLKHFQDLMQAVVSRIYSKLKGAKRSLKRMYSHSRSIIKRFLHETDHKVVRPEELPSAVLTPPDEGNVLGKTTNGIVMDCPTDCNPAACDNKPVEPAQCFKYEAVAGGGGFRRCEPFADPLTATCGKGFTRCAMAAPTRGKHYQMFASPPDHPLPQPLLIQGSNLHACLRLLPVHQATRCSPESAETVEAALKDTQAVAQQPPPHVLEQAVLFENIQVPMPGSYKLCMLQYWRPPDSKPTDNVFIMGIDEIGTLDVLQQPDAETLKHVQGLHKKDSQMH

SEQ ID NO: 423 - protein, 2980 aa, Toxoplasma gondii
MVATTLHSLPSRYLYTLLMSFLFVCGALALHESPDGLPEAPDRPQNAESGDGPPTLVLTLDPEYAGKSEEFAFTAEYFPPTESSKNEDGAQQSFVETPNRRLPGTFDPMSSSDVRSEVQLRVTTQQMERGLLAEIVVLQEGQMVSGFRASLQTKEQAALLHRLADLTNDPNIHFRVEWRGRGDGTGGLYIRTAVHLLATAYKPSVHFKLNLHQTGARGARETIKLLSSVPIDDLNAPGVDIGTLKQLIVDHAEPENILTGPGSFSIKRMFKESDPKNANTQEATLVPWLLRLLDLASPVTIVGDLTRNREFSTVLPQGPANWNDLLLLYTGMGDAANRGQNAPDFAQREPGYRPGSIFLSPDGFRGAAHLGDHQPDRLKQFWRQGGETGLNPGDIEHYYSPLFGRSYDTSNNPLLILDMYGNPVYSEGGVPKFIVGPGENDLTKLPDHVSGMVLPSVSARFLFPDKRSFTEFINPARPWNDISKGWKALMAKHKMKFNYREPGLVGVSVNGNWYGLTSEFIQTYPTLLHLLGSLAQSTPGFSLEDVTLHFDDKLPPKLPTLFVLDDAHDRQIPWCAFEFVIPLSPRGTVNIKSLLAKGKSAAESPKGCNFREKGFHFTTVHRWGFVESRNPLSIQWHGVLDYTGSKQECALLGNVLKDAHLAGRQIAVSFHAEHKATVIPVIETFGPDGELLKSKPQKPVTATVQFGDDLPGLLYDFHKPFQKKKVPTVVYPFLQGQGQGSRDALNGGVLGEEYYHRPRKTKITMRPEIPILNTHDTFVDGSGPHPNVPHFVIPLTAGPQQHLAPLKALRQWLRKEYPGSQLPFKLDRMSDEDLLGIADHLVFRFPDGTEATLRSIFGPEVFSPNWATMNPDAYQKLMDVLTRPKKVYLAKNFRIVVTDVDGQQIPFDIQIEPGDTWAKTLDDFFKAHPNLKPANVKLVLYDDKDTALRQFDINLDMYASPYTEAVDQQHMKGLQITLETPAPIVSCYQADPARPGQCLAVDMKRIFCGRVNPAKMVSRAWNEECTAAWIARADLGEVEDRYLMGPDDVRARSIRDLLTSAKNALKQRNPEKAKHLNIPVADVTESEELNRKMRERTELAMKSGKTLEDLDRLRHLKFEIRTLQRQGELQWAKLVGATITTTEKGKPAERHIRLDPKKFFLNDKLWKVFKELAAQVPGLKFENVFNFSFEVMNKEAREQWKKEQTTVTKEAKKQMRSQKTVVDVIFVGPDGSALFRDIGVELRQLSDEALGRLSKGDKRGLINQLAKRYDIPRQYFIRRGGFPSAAVNGTKWVITAMLGLVGGAGKKGLASLLKDPHAFVTHLQSAGGFSPTDTVKLVFDNGSVLDVPLSQLPDQDLGSLAEIYFPWKKTAGQAQEEKKKAVESKVAEGSGIMRKLEVTVMQPSLWPEVFGAWLSDLHEMDLFDDGPILLQVRPEGAQKGQVIRCSVKTLGELYQALNKPEIIRSKCPGMADLKKPFTFELSIRTPAEQYYKLYNRSRSPEDQRRTAAVLLKLKDHIRNLPDDGQVIFEYRKIKRTLTPQELQQLKALIEGLQPNENTDDVLTKILRLLGISDQDIAKSGRLRFGIKQAPTSSEQQMLREGSITAVVEDFQGGRRKATVRISIPEEEPLRLGASAQNYQVHMSLFSKNAQHLNTPCGSKSGAEVAKATWGQLCRWCNLKLADLPGLGHPTLYIRIISNEKTQTVRGGQPVTTNVDGHPVVYDIRMPGDPRSASGMPKSVFWNLVERPGSNELGPVWHQSIPKADGGLRKDYSYFDPNPGAWDPTLFGPSSGTFPQNTRAGIDIVTNPEAMETGDAYAPPIRFGFGFRNWNDRDAVKPQFNNMVSGIAPQERDLYKVYIQIPKGDGNYYPCSGVDINLFMQLTKEQIARACGIHPSLLEAPFGVYLLKETPTYARAQPSFPLFFVDGEGQEHPSLGHWTDAPAKFFSPHLRGASPNSLIQLEFAPGVTCNLTQQELMSLHTWEALLKRCNIDAGKERPATITTRIVPMFSTPNVTVKVPNELLQPLLRQHRGISPDQLFRQKPLEEVVALLLSNAHLGLYHVGLKYIDGTDQPYSECPEHLRQLPPSQIPGLQHIYIVPASEGEGDFPGVFRGGTLGDMMKGMNLSPQTTYGDFVRTVKKKINSPEGLTIPGVRQHVGGSGRPAQQIIDFDFAGPESPPGAAGKPGWEATWRPATVGAFPDNMPIGDIDREMHHPFLVFTTGHPPKYDLNGLAAYGGQPFREETTHLDASLRNLVEWMKDSLGISDPNGILAEIVIDTIRCPFPLSAAQLISATIGHLLHHCQVNDLEMSHSIYVTPTPVPGYTATPKRNGPQIVINGHNYGAPGTAPRDFGQLFNLPGRPGARPLNQDLEVSFSPLPGKPPVRGVLPGDVLPLLQSISDKHGQPGVAVVLNFLRQLHALAELPPGATLNIDTKLIPSQSPQQLYAPDQVPQPGPWIAGPTGGGRFPGGGVVVNESGGRRGPGGSAAVKFMPSTLRLPLLRQPSVELPRNSMLRGSIGGVGGLPRTEFVVPILPSQKSMPIEQVLKFFGIAPAAVQTLDVQEKPEQGAILIESGTVTFVPLKGPTFTVSMKKINATDKNTLATLLKAAGRSIIDLVGASDGTQPLVLKIVVDHGAVSPTKVTTPVGTPSHARSAMEGLTIWNLLPPLIDVHSVKTITIRVQAAKAFQQAAKAAAAAEGTEGDSAGEPLSRPKNVEPAVRTKFKNKIPELPAAFKPRQRTVSEINGAPNPKLVIFVEQDGQKTIRFTFPSRVNDVVIGQSTVSVVLDALLPNPGTWHRTFWGALSPDGTSCKPTMEFQYPHWLQTKMAELPVPNHSSCLLIREVSLNIKQRPNFFIKPYIFHSPLVIFALQGKQRIPIFEEQVDPAVTSQPLTALLEQLGIPKTQLDTILQCSSTNIDAPGECPSDSSTTVDPETVIPDAVATQSAFLVVTGKQKQAPGSFLQVLWRRQRRRNSIQKRITSH

SEQ ID NO: 424 - protein, 422 aa, Toxoplasma gondii
MLSVFPESARKMESVNRPRFPPFFCPPSLGVSGATVLLPFVGVLLFSSLFSSATTVASIPNPAGAWSPYLSSMSVWPANDEDGSTSVSSDTALDISPFADDEKDSLPVAASLSPSLFRAQRWQTPHNNRRTPLAHSSLPVHDDGLGASWVALTEDRNEGSGAEEEGENKEGESDKAESEEEKSSVSENDSKNEEKTESKDSETGDEAAARSEDRDEQDGETNKPGKQAQAAPEEGENASASSEKLSCPRACLIASKSGGKTGTDGHEKTNEVRADQKGGEGASTTQHEEGQETEQGSEEANSSSSSAPAQSHETPVAEHAPCPHAEEHNATNGSNSAEAASEDSNPHEAVKHTDAHGQTQASDQAQGHDQEEASQSSETPAEENAEEPKQAEEQANASQSSETPAEENAEEPKQQRSSDASQ

SEQ ID NO: 425 - protein, 1159 aa, Toxoplasma gondii
TDGHEKTNEVRADQKGGEGASTTQHEEGQETEQGSEEANSSSSSAPAQSHETPVAEHAPCPHAEEHNATNGSNSAEAASEDSNPHEAVKHTDAHGQTQASDQAQGHDQEEASQSSETPAEENAEEPKQAEEQANASQSSETPAEENAEEPKQAEEQANASQSSETPAEENAEEPKQAEEQANASQSSETPAEENAEEPKQAEEQANASQSSETPAEENAEEPKQAEEQANASQSSQTPAEENAQEPKQAEERANASQSSETPAEENAQEPKQGEEQANASQSSATPAEENAEEPKQAEEQANASQSSETPAEENAQEPKQAEERENASQSSETPAEENAQEPKQAEEQANASQSSETPAEENAEEPKQGEEQANASQSSETPAEENAQVPKQAEEQANASQSSETPAEENAEEPKQGEEQANASQSSETPAEENAEEPKQAEEQANASQSSETPAEENAEEPKQGEEQANASQSSETPAGENAEEPKQTEEPEEASQSTHSPAEEQSPEQAQGQERENASQPSESPAEESTPEQAEEKGTEAAEEPAQEQPAETQEGSDAEADAEGGSGANGEAQPQEESGENKDVPAADQEAPGLDEQGRDEVGTGAPEAAAASAAGASHENEAHGADQQDDSVESAGPAADEQQKDATGEVGELHGAETQTPQLAAEAETAGAEQEAGRADSVSDGCYVTRRQEVEAEAKKLLEVCERNDNFTKVDQQFCDELFKRIDGPFTVGEVSAFLRAADTANNISRNFRFCRATPTSSPPRVRDGDSVIHAAIAASKPRVVEILLQYGAFPNIEAFPRSPDAANRMGMRPLHYVARYPTLENYESLFLLLKYGSPVNVRDVGGRTPLMIAARSSHPFSKLFARALIDRNADVTARDKAGLSALHYAAASNSCKLVKLLINRGADVMSQDIRGNTPLHYAAAFNADKSMNTLLNLAGNAIKVNVPNKNGKAPIHLAAAPSSFDVVPAKIVPALSLELLLEKHADPVARDAHGNTPLMDAVLGGYLEIAKRLLQIARVPLHDKNMDGKTALDLAQEAAERTGDDVLAYLTAVSSKPSCPFIPRVANSIHVLSDTQFGSLMRVGDTVTYECHHGFRLLGHATLTCMSRDGSPEFIPDPPVCIPMEQGAASSLYSAPLGLATALLVYLIPFFLTQF

SEQ ID NO: 426 - protein, 1493 aa, Toxoplasma gondii
MLSVFPESARKMESVNRPRFPPFFCPPSLGVSGATVLLPFVGVLLFSSLFSSATTVASIPNPAGAWSPYLSSMSVWPANDEDGSTSVSSDTALDISPFADDEKDSLPVAASLSPSLFRAQRWQTPHNNRRTPLAHSSLPVHDDGLGASWVALTEDRNEGSGAEEEGENKEGESDKAESEEEKSSVSENDSKNEEKTESKDSETGDEAAARSEDRDEQDGETNKPGKQAQAAPEEGENASASSEKLSCPRACLIASKSGGKTGTDGHEKTNEVRADQKGGEGASTTQHEEGQETEQGSEEANSSSSSAPAQSHETPVAEHAPCPHAEEHNATNGSNSAEAASEDSNPHEAVKHTDAHGQTQASDQAQGHDQEEASQSSETPAEENAEEPKQAEEQANASQSSETPAEENAEEPKQAEEQANASQSSETPAEENAEEPKQAEEQANASQSSETPAEENAEEPKQAEEQANASQSSETPAEENAEEPKQAEEQANASQSSQTPAEENAQEPKQAEEQANASQSSETPAEENAEEPKQAEEQANASQSSETPAEENAEEPKQAEEQANASQSSETPAEENTEEPKQAEERANASQSSETPAEENAQEPKQGEEQANASQSSATPAEENAEEPKQAEEQANASQSSETPAEENAQEPKQAEERENASQSSETPAEENAQEPKQAEEQANASQSSETPAEENAEEPKQGEEQANASQSSETPAEENAQVPKQAEEQANASQSSETPAEENAEEPKQGEEQANASQSSETPAEENAEEPKQAEEQANASQSSETPAEENAEEPKQGEEQANASQSSETPAGENAEEPKQTEEPEEASQSTHSPAEEQSPEQAQGQERENASQPSESPAEESTPEQAEEKGTEAAEEPAQEQPAETQEGSDAEADAEGGSGANGEAQPQEESGENKDVPAADQEAPGLDEQGRDEVGTGAPEAAAASAAGASHENEAHGADQQDDSVESAGPAADEQQKDATGEVGELHGAETQTPQLAAEAETAGAEQEAGRADSVSDGCYVTRRQEVEAEAKKLLEVCERNDNFTKVDQQFCDELFKRIDGPFTVGEVSAFLRAADTANNISRNFRFCRATPTSSPPRVRDGDSVIHAAIAASKPRVVEILLQYGAFPNIEAFPRSPDAANRMGMRPLHYVARYPTLENYESLFLLLKYGSPVNVRDVGGRTPLMIAARSSHPFSKLFARALIDRNADVTARDKAGLSALHYAAASNSCKLVKLLINRGADVMSQDIRGNTPLHYAAAFNADKSMNTLLNLAGNAIKVNVPNKNGKAPIHLAAAPSSFDVVPAKIVPALSLELLLEKHADPVARDAHGNTPLMDAVLGGYLEIAKRLLQIARVPLHDKNMDGKTALDLAQEAAERTGDDVLAYLTAVSSKPSCPFIPRVANSIHVLSDTQFGSLMRVGDTVTYECHHGFRLLGHATLTCMSRDGSPEFIPDPPVCIPMEQGAASSLYSAPLGLATALLVYLIPFFLTQF

SEQ ID NO: 427 - protein, 1167 aa, Toxoplasma gondii
MSSNLAFLSLSLAESTASLGKSLEETRTRLTEKLKLVAGMALGFDQFAMHQTATGPGLSVEGKQTEQMSRKSAEDTRASSLSSDPDDGRAAQLAGQKGHVTPCIAGLIATSNPFLFTHMLALGAAYLGYDKYFGDGTSELLPFYGTRTLLSTLSPLDTPRLLDSMAAADRLSPKRSILSRFSRRKRSLDAPAPEPSGWDQKRKSRLPLGSLRLVLDILDRHLEALTTYVQQQIEIFRQAGVPLEASVTMTHNLNRLHVTRCQSRNNQMVIPCRWKDTTFFEELSNETNPGLTDEEQLEKRVKFHKLENAFNTVTGLGALEAMLDEDSVLLGGPAEESVARLYSDFHLGAAMNNWYFYDALNINKMLSRFQKVGTKVLKQYGLENLMNLATSHQAGSTASWDRTDIDTKLAKHHHYGSALRVRLYIMALLPQFTPHREGILSPVDFIREAFAGERSYAMSTARLKPLLSDDLVILGVPKGFSFLWLFEFLLEEDSPNALVAKRRALKRIPNWTKRLFSHSRSIPMLFRQFYKALNAGVFAKARRRTLDRSKTLLSRQLPEGWRDIVMDAFAFTAHSAALMQVVNYHSLFRDRTLNDLQEASYLATPPAFSIEDQSVMKRCDEQIYEWSRFGFSPDVLEADLHNETFKGKWENLRLETMPTPDTHQWWRRLHRAILDSLEIYQAHERHLKGMSDNLYTLVEDTIKNLQDGSSRDDTIFFGRIARGARESVGQKMWRGVKTFFLDLVRDVPGSDHAVWFGVGFNFPRIFQILRKMKEIALHAAGDQGSAILLDEAFVELVQETVAVRAQTYRRQPPTTLRNIGVIGLRPDYANLDTEQRSMEYQLSMCADHCVSLWVQILGFIYPYVLNPSLLTDYEKSFGTGHAIKKLDDPSYVNSFRYIFANDASLNFFEHNTPQDTRKALVSLKSGQAFMYANMMRFAGIAFEQLSMPYLAVSLQRQAPFMGQMVKDWVAKRSRSRKLAIVSVLSLGLIFAYTLLSALDIAQFLTDSGMKAIEDCSWNPIMQQMACVVVAGSGSLVAPTFAALSDVFKVGLYSGIGSTLIAASVVGNAYMIIRSQSRTILRTEMAIKNVAVKLWKQMRKYFSWVTRFTKRRKAILSTMMARATALAKNKKPRSETAATMTRSGDSVMDMLLQGVSPATPQRAQDGSR

SEQ ID NO: 428 - protein, 218 aa, Toxoplasma gondii
QQTRHILPFGSLFPGGILGKIMQKLMRSYIMFFHPVLANFKGLLALFLGVLCKVRLPQLINAVFGAIFRAKRRAGRYIHKFFFKTISLRKDITGKILVDDLVRGSGAVMITLLFQLHGVDIDAISRRGGAVESGVLAGQGVWTLSDGLFVGLKDFGQLFRAYFERYVNLTSAIHTYCAKQTTNFFTETELDEFYNGENVDRIPPRERLLAWLQIPMAA

SEQ ID NO: 429 - protein, 446 aa, Toxoplasma gondii
MACRQLLCSVQNLLFYFLPDIYCTDFDTMEQRLPIILLVLSVFFSSTPSAALSSHNGVPAYPSYAQASLSSNGEPRHRGIRGSFLMPVKPHANADDFASDDNYETLPSFVEAPVRDPRQVPGRGEAALGTEETPGQQPPVALGSAEGEGTSTNESASENSEDDTFHDALQELPEDGLEVPPPNAQELPPPNSQELPPPNSQELPPPNSQELPPPNAQELLPPTEQDLPPPTEQELPPPVGEGQGLQVPGEHGPQGPPDDDQQLLLEPTEEQQEGPQEPLPPPPPPTQGEQPEGQQPQGPVRQNFFRRALGAARSRFGGARRHVSGVFRRVRGGLNRIVGGVRSGFRRAREGVVGGVRRLTSAASQGLRRAGEGLRRGFTRVRGALRGRGRAADGASSVRERFGAASGRVRDAFSAGLTRLRRRGRTSGEEGRPLLGEGREQDDGSQ

SEQ ID NO: 430 - protein, 586 aa, Toxoplasma gondii
MGRPRWPLPSMFFLSLLCVSEKRFSVSGLHLRFRESPQWDSLLPLQDRRAVQPSSRWDSSLTLEAHAPQRIDTSDAGDDDLFLDATQQVYRGDPVLETSSLPPAALPVRPVSSKTEDGFSGSREEESDGGVPTGSDQGEVWRSSSLVDVSSPGDRGGEEQESSAQAKGEADTKDEAEKSEDQSQSSTADPNTPTAQGTDASESGEDSGSDTMGDSEVTDIPVDPLNSGPETASSGETGQRIGAESGAQPSAEASQDSAAASETIPAADATSPTDLPGTLAGATVADDSRQEATTDGLEKSPGEPKEVDVFNPPLATKSDVAPLSVSTIRAQAAPDTEANIGAEVATGNEGAPEVEEATEDVAGTGADMSTGTDAATEDVAGTGADMSIGTDAATEDVAGTGADMIPGAEPGTENEASTGAEGATEADEQVPLKTEAQGSAGSSPTQGHASHSVEETGRFSVIPFEFGSSPRLRRWTTQFLIRGKDLFNLMQKSNIAKQAEKGAKNLRSSMEILHNTTSFFNAFRAQQRSKEAQSKNVQLSVTSVPTDQPEEQNATTQEGSTASPEEAAREAAEAIGTPVSTEDAPN

SEQ ID NO: 431 - protein, 236 aa, Toxoplasma gondii
MARVLPCVFLVAYLSCFLLAGELTHTTALSVAPKAQLFSTDEGPVSESASKLDAELEEKAIQEAKEAQEDEVDDIPTDRNAPPTNGDPTDQPDVQLNAVDIDGFPTPEVPLPVELDAEKLQEDEFNREEEADNTVPNILVGPAQTPEPVAIPVTSLLAPAPGTVTTASPQEGVEAKEEPPAATGVPSAPSSPARRRAFFRSRGTRTITVNVRHFFPNGVPIVVVRPQRRSFLLRRF

SEQ ID NO: 432 - protein, 400 aa, Toxoplasma gondii
MKRTELCIAALVAVGAFAFTSPNAVAKSFERSLGHLDASSFLSSPLNSDVELGRSTFPAQSLSFTEGTNETNPPTSRPPGWKYEGSDLQRRVAARREEHKKRQEEWEQRKASRRSALTPSAPDPDGDGDPATSFPSQRRLLDRCLQQFREQLVDLENLCKGSPEPDDCRSTVQEILGKQSFGALHTTVISFSIFVNRDPRRLSFPVLDATDLRLTVKLKHLLDRIPGCAALSLPVYIGLVSSDVFKSEEFTRKVNRCSEDFGRSAREEPSRAGRAAAAVIRFMGLTPERQTFYQPFMFVTTQAAMLLSMVLKHPFLSILVNMACVAGSLCRKGIREVLLRALREADFLTEDVPLDSAPQELVDHLKVYLKLLFLRKYRRLRRQAANVAAQVVYANSLRLL

SEQ ID NO: 433 - protein, 1061 aa, Toxoplasma gondii
MYSSPQSEEASLVNSRGIRDESGPNGFSIGSATDTALKAGSPTGKSWKQLSLNLGRRVWDALDPTWSCAEKRRRLDPETLRKLKSTYWLSRIVFLRALGFVYFFAFLIAFNQSQGLIGSDGILPASDYVAMVKDSFADAEAWQRVKAFPSLFLLFPATDFWLHAIPFVGMILSLFMTIQGASNGFLLFLLWILYQTVNSVGQAWFSVGWEAQLLELGFLAIWMAPFWSFSRLPPSWPTPKICVWGNRWLVFRVMLGSGLIKLRTDRAWKDLTALDYHYETQPLPNPLSWYFQNQSHGVHAAQVVITHIVECVISFLVILPFRQCRLFAGIVQIAFQVGILLSGNLAFLNYLTIVSAIMCLDDHFLTCLFPSAILSRLPELVRGCAGYWSLPQIQAWPFPQLFPGEEHGKGKGRQANDRPEAEASLLDKDAGRDETLPFNAATDDSLDSPRSCCCWYRPYFPRIVRSLKIPSRVRKQVKEEIKENWGKMLAEVVASVAMLTCMAFVTNPATSAVWMVIAVFFLAIILSASSTFFTNTLVSNAFTELVLLIVTLWSCIAIYQHGPAVWSVWLTTCLFTVLIAFAYTTLTNAALIFKIHVEVLIFLLIAALSVPVVANLISPDQVMDSDLGNPFSVVNTHGAFGYIGKERYELIIQGTNASSPTQTLYWQNYEFKCKPGDLYRRPCWAAPYHYRLDWLMWLASMGDKETVKDMHPWLSNFLSRLLQNSKSVTGLLAHNPFQNSDPPTALRVLRIQYRFTKGPVFGGGPWWEVVPETRELFVAPSQVPGAAAHLRKQLLILRRREEKQRLEQRRKEEAEIRRKEEEAFKRRRERAMKEEERRKREAEEAEKRRIAEQARQAEDEKRIREQAEAARKAEEEAVRKQIEEEKKRHEEEEKERQAEEERERREQQEEEEKRRAEDEKRRKEKEQATLLARQRSEEALKEAEKKARKDAEEEERKRKEDALQEEKRQKEEKEAEEKRRKQAEARREAARAAAEKESEKARQLQEQEAKRKALEEQERRKARERQRSASSQVAVYTAQPHDGGGVPLRHAPLLTRKKQAL

SEQ ID NO: 434 - protein, 333 aa, Toxoplasma gondii
MLKTTPAFFLFLTWMFPRCDGFVLTHKNGTTDAYDSAVLSFLLTTEGVREGAAKSSGTEIPSTLACPSSSPLKTAKDKHDASLLGLVSSVPDSSILKPEFVGAGAALVAVTRSVKWTQLKQSLKALVDTGVKCKVNCKHNNKKLSKNTDFKDQQEFPQTSARILPTSDREPLIAGPQKVTEEDLQVLLFEIAHDCKMSAPQAAITKPLTILLAGIPGAHISKRPFEAAIPHFILQKEDTVDLLLTVDRSWCGKGLSHLVRYHVGYMSFNLEVNGRRLADDDTFEDDRLYRQVVLTTKFTAKSLGGTLKQVRSLTDIHKKTGKHGENRPHSSPF

SEQ ID NO: 435 - protein, 707 aa, Toxoplasma gondii
MKVTTKGLAFALALLFCTRCATARYMSFEEAQKASEAAKRQIATLPSPDSTLSNPGSKHRNRGGSPAAGQPSQSTLQPEQAAAEVGLGAGGSTQGQGRTGGSAGAREERRSPSPQSAYPATSSASLRGYQTQLSPSHLPPRSSGPGGWFPTESIFTPWSSPPQPLTQRKPSLSGVVVTEFQEPQEQYGAASSLASSPKRYVSGASSSALSGKAVPTPASLGQENPLFPVQSATLDSGIQSPAQERRGSPQRQIAMSTENPADSGASQLASSVSSYVAVQTPHVKRSERIRRVRLSEEGLEEVQQLKAAAAQLLVAVPDYEAMRAVLQEAVLSEQRVATRKRKRKQPPGAVESAVDEVFPPNERVMMINANGVPIALYNRGHLGSGHFGAVIKASLDDGTLYAAKVPYSQIVPNADATSAELEAEISSARAELVKTIRQELDVRDKLVAKGLTLTETAEQYGLPLCQMTLTLPENKATVVRRGSRLVVVSKEVMLLPLIDGSPSNSLVQSQPPFLFQRAVAREAIIALAKLHELGFAHGDVKLNNMMIDVHGFGHMLDMGSVRPVDSCVSEEDKYYLRLWAPELAKSQHTSQQTCLKRGALDVWALGLAIFEFVCFNRLPYSLSNLPSSLWSRVEHLSRLRLSDFSAKDCNESDPAVMGIVAQFLNPNPEERPELPKFVSSYTFFRQAPGVTSHLTRIPTTELSSHRM

SEQ ID NO: 436 - protein, 608 aa, Toxoplasma gondii
MELVLCFVIITISGVIRESSALLLRSPTSNDVFGELVASAERAQPLATRLTKRISRLNFNDREDDFWEDHGDASWNNSYTLVNGRTTLGSENRRRPASHSLIERPYYRDGRLSPVLGVQERRGRSVHSYHEEPVSFFDQRAFDEYTFRRRSQLHRQRARAGLRSRIKQNVRRLWRSARGAVGGWGRRVRRKIGDLFVGHLMPQLRRLRFWDQGLPPVVPPLIGNEPGQASVALVAERMEAGLREKALTEKNPTEAQQAVGTYLINSAENTWFISSPGGRYILLKKRGFLGGGGFGLVYHVEHPTTGQPFALKIFVQRVMNNEVGDKISDLIEDEFGVMKYFPPEWTPARMYSELRFMVPLLKLRVLGKPEFQDVRNHLRIYSVCALFPKAQGDLEEAVVLLADMDRTNAYNIRMSCTIQMVKLLARFHAFELVHGDVKLQNFLVDKSGLLLLSDFTQILRTNERRYPPVVTVIYMSPEIATCMITRLRNAIPYTPQIDSWMLGISLYRLWCGNFPFGMTLDATALQVAGIVIRSSASSLDFASCHDIPEQFREMIVGFLRKTPGVRLSPQQALEQFSLLNWKGPSPASDTASESEPVSTEEAALLQKE

SEQ ID NO: 437 - protein, 554 aa, Toxoplasma gondii
MFSVQRPPLTRTVVRMGLATLLPKTACLAVLNVALVFLLFQVQDGTGITLDPSKLDSKPTSLDSQQHVADKRWPATVGHYKYLAGATESTRDVSLLEERAQHRVNAQETNQRRTIFQRLLNLLRRRERDGEVSGSAADSSSRPRLSVRQRLAQLWRKAKSFFTRGIPRYFSQGRNRLRSLRAQRRRSELFFEKADSGCVIGKRILAHMQEQIGQPQALGNSERLDRILTVAAWPPDVPERFVSVTTGETRTLVRGAPLGSGGFATVYEATDVETNEELAVKVFMSEKEPTDETMRDLQRESFCYRNFSLAKTAKDAQERCRFMVPSDVVMLEGQPASTEVVIGLTTRWVPNYFLLMMRAETDMSKVISWVFGDASVNNSELGLVVRMYLSSQAIRLVANVQAQGIVHTDIKPANFLLLKDGRLFLGDFGTYRINNSVGPAIGTPGYEPPERPFQTTDITYTFTTDAWQLGITLYCIWCKERPTPADGIWDYLHFADCPSTPELVQDLIRNLLNREPQKRMLPLQALETAAFNEMDSVVKRAAQNFEQQEHLHTE

SEQ ID NO: 438 - protein, 433 aa, Toxoplasma gondii
MENCASVRSSSCLIWLAAAFFVSALGHVQQGAGVVRPRHWQNSEAAVSVRPPGGASPRPFHSPIEPVAFIDGEHVEDKHGGSWLEQEAAEEVTPLLNSHTETPTQSPSAFRRLLRRLRFWRRGRTGGSDGGGEPPQTPRPSLPTRLFQHLRRAAAAIPAAASRFFGRFRRGRLPVFPPDEFPEDVDTNPIYFRGTDPGDVVIEELFNRIPQANVRTTSEYMQSAADSLVSTSLWNTGQPFRVESELGERPRTLVRGTVLGQEDPYAYLEATDQETGESFEVHVPYFTERPPSNAIKQMKEEVLRLRLLRGIKNQKQAKVHLRFIFPFDLVKDPQKKKMIRVRLDERDMWVLSRFFLYPRMQSNLQTFGEVLLSHSSTHKSLVHHARLQLTLQVIRLLASLHHYGLVHTYLRPVDIVLDQRGGVFLTGFEHLVR

SEQ ID NO: 439 - protein, 382 aa, Toxoplasma gondii
  VARIANT 127: note = Xaa can be any naturally occurring amino acid
MGHPTSFGQPSCLVWLAAAFLVLGLCLVQQGAGRQRPHQWKSSEAALSVSPAGDIVDKYSRDSTEGENTVSEGEAEGSRGGSWLEQEGVELRSPSQDSQTGTSTASPTGFRRLLKRLRFWRRGSTRXNRYLRFLAPFDLVTIPGKPLVQKAKSRNEVGWVKNLLFLLPPTHVDMETFVDEIGRFPQEDRPLADAARLYLTVQAVRLVAHLQDEGVVHGKIMPDSFCLKREGGLYLRDFGSLVRAGAKVVVPAEYDEYTPPEGRAAARSRFGSGATTMTYAFDAWTLGSVIFLIWCSRAPDTKSGYEYSVEFFFSRCRRVPENVKLLVYKLINPSVEARLLALQAIETPEYREMEEQLSAASRLYSGDGTLTGGDDDMPPLET

SEQ ID NO: 440 - protein, 461 aa, Toxoplasma gondii
MSGGRVPRVPASSTTTSASEGIFRRLVRRLRRGRGTADGAGVADETHQEPRPPLRKRLAQHFRRLRGFFGRLTPRWLSGLGRRAQRWWRGRQRPLLDPSFHGLEAGDSFMRDLLKREKELIGYCREEALKEPAAMVEAVTATVWPQNAETTVDSLLSQGERKLKLVQPLRVGDRSVVFLVRDVERLEYFALKVFTMGAENSRSELERLHEATFAAARLLGESPEEARDRRRLLLPSDVVAVQSQPPFAQLSPGQSDYAVANYLLLMPAASGGEGILARHILTAQLIRLAANLQSKGLVHGRFTPDNLFLMPYGPVMLGDVSALWKVGTRGPASSVPVTYAPREFLNANTATFTHALNAWQLGLSIYRVWCLFLPFGLVTPGIKGSWKRPSLLVPGTDSLSFFPCAPVPDFVETLIRRFLNFDRRRRLLPLEAMETPEFLQLQNEISRRLSTGQPTAAPSVA

SEQ ID NO: 441 - protein, 549 aa, Toxoplasma gondii
MATKLARLATWLVLVGCLLWRAGAVQLSPPNSRTNDLASGTPHVARGDTEAQSGTGDDSDFPQAVAEEVADMSGGRVPRVPASSTTTSASEGIFRRLVRRLRRGRGTADGAGVADETHQEPRPPLRKRLAQHFRRLRGFFGRLTPRWLSGLGRRAQRWWRGRQRPLLDPSFHGLEAGDSFMRDLLKREKELIGYCREEALKEPAAMVEAVTATVWPQNAETTVDSLLSQGERKLKLVQPLRVGDRSVVFLVRDVERLEYFALKVFTMGAENSRSELERLHEATFAAARLLGESPEEARDRRRLLLPSDVVAVQSQPPFAQLSPGQSDYAVANYLLLMPAASVDLELLFSTLNFVYVFRGGEGILARHILTAQLIRLAANLQSKGLVHGRFTPDNLFLMPYGPVMLGDVSALWKVGTRGPASSVPVTYAPREFLNANTATFTHALNAWQLGLSIYRVWCLVLPFGLVTPGIKGSWKRPSLLVPGTDSLSFFPCAPVPDFVETLIRRFLNFDRRRRLLPLEAMETPEFLQLQNEISRRLSTGQPTAAPSVA

SEQ ID NO: 442 - protein, 549 aa, Toxoplasma gondii
MATKLARLATWLVLVGCLLWRAGAVQLSPPNSRTNDLASGTPHVARGDTEAQSGTGDDSDFPQGVVEEVADMSGGRVPRVPASSTTTSASEGIFRRLVRRLRRGRGTADGAGVADETHQGPRPPLRKRLAQHFRRLRGFFGRLTPRWLSGLGRRAQRWWRGRQRPLLDPSFHGLEAGDSFMRDLLKREEELIGYCREEALKEPAAMVEAVMATVWPQNAETTVDSLLSQGERKLKLVEPLRVGDRSVVFLVRDVERLEDFALKVFTMGAENSRSELERLHEATFAAARLLGESPEEARDRRRLLLPSDAVAVQSQPPFAQLSPGQSDYAVANYFFLMPAASVDLELLFRTLDFVYVFRGEEGILARHLLTAQLIRLAANLQSKGLVHGRFTPENLFIMPDGRLMMGDVSTLRKVGTRGPASSVPVTYAPREFLNANTATFTHALNAWQLGLSIYRVWCLVLPFGLVTPGIKRTWKRPSLRVPGTDSLLFDSCIPVPDFVQTLTRRFLNFDRRRRLLPLEAMETPEFLQLQNEISSSLSTGQPTAAPSVA

SEQ ID NO: 443 - protein, 480 aa, Toxoplasma gondii
MRSSVGQSRLPLKFFLAPFSVKNSVFALFFVFALVCVSGLSWEDAEDGAAWDSVSNDSDDSFAKGSDFGEVKLGSAGQRQLLSQLQNELGGEFEDADVSMLQRDHGIHGEEAGLFRKAVPGLDDPAEDDEADGESASDEAEADSDVLADDEEGTSLIENASEEDTDNSEADSQQEDDSVGEDSFLQQEGEDSEEERAVEDPYAAAEPSYLEEDNTVDDSAAEDYAPASFVQIGSGERKIRAHMHLDSRQVAPERFAHAFNQDHVRLLDQTAVEDELLDEAAPGGGASAVVSPIDENPAEMESTISEGEAGSAVAAPEQGIQPEAEFATASEEPRPLEPVDPEMAAQQPQLPQEAMPTENADLLGNQPRMRNALEPSAKVLEPETLEGSPALVPPAETEEGTAAQIAEEMSKQDQGMQEARPQEVLTRHTWQDMERTEDLRKNDVPAAVANSGSQIITAASSVALAGLLVAGQLLFSVGMY

SEQ ID NO: 444 - protein, 91 aa, Toxoplasma gondii
MGHPTSFGQPSCLVWLAAAFLVLGLCLVQQGAGIQRPHQWKSSEAALSVSPAGDIVDKYSHDSTEGENTVSEGEAEGSRGGSWLEQEGVEL

SEQ ID NO: 445 - protein, 575 aa, Toxoplasma gondii
MGHPTSFGQPSCLVWLAAAFLVLGLCLVQQGAGIQRPHQWKSSEAALSVSPAGDIVDKYSHDSTEGENTVSEGEAEGSRGGSWLEQEGVELRPPLLDSQTGTSTASPTGFRRFLRHLRFWRRGSTRGSDDAAEVSRRTRVPLHTRLLQHLRRVGRFFRHGIPAAAGRFFRRVWPERPQPVFTEGDPPDLETNSLYYRDKVPGEVIIREVLGKVAGFGPTSGHGVFAAYENAFSEMLWAEGGAVTVISELGRPGRQLVRGNLINIVDGGLLFQATDQATGEPMTVLVGSTWNKPSGKDLDKLRHQALAIGLFQKVKNPYLANRYLRFLAPFDLVTIPGKPLVQKAKSHNEVGWVINLLLLLPAIEIDMGRFVEELYELPTEDRPLADAARLYLTVQAVRLVAHLQDEGVVHGKILPDSFCLKREGGLYLRDFGSLVRAGTKVVAENAQGFSPPEVRGSRGGLLFGPRKTQMTHGMDAWGLGATIFFIWCFKAPTTGPEEEYSIEFLFSLCRRAPENVKLLVYKLINPSVEARLLALQATETPEYREMEEQLSAASRLYSGDGTLTGGDDDMPPPET

SEQ ID NO: 446 - protein, 587 aa, Toxoplasma gondii
MPKILARTVDALVTCERLFCVLHICNMENCASVRSSSCLIWLAAAFFVSALGHVQQGAGVVRPRHWQNSEAAVSVRPPGGASPRHFHSPIEPVAFIDGEHVEDKHGGSWLEQEAAEEVTPLLNSHTETPTQSPSAFRRLLRRLRFWRRGRTGGSDGGGEPPQTPRPSLPTRLFQHLRRAAAAIPAAASRFFRRFRRVQEPVFPPDEFPEDVDTNPMYFRGTDPGDVVIEELFNRIPETSVWNENERVLSNANHLVSTALWRNEQSFRVESELGERPRTLVRGPVLRDDGSYICLEATDQETGEPLEVHVPYFTERPPSNAIKQLSEQVLRLRLLRGIKNQRQAKAYLRFIFPIDLVKDPKKRKMIRVRLDERDMWVLSRFFLYPRMQSNLHILGDVLLSHSSTHKSLVHHARLQLTLQLIRLAASLQHYGLVHADFQVRNILLDQRGGVFLTGFEHLVRDGASAVSPIGRGFAPPETTAERMLPYRQHHPTLMTFPFDTWTLGLAIYWIWCADLPNTEDAELGGIEWIYRRCKNIPQPVRALLEGFLRYSKEDRLLPLQAMETSEYEQLRTELSAVLPLYQTDGEPA

SEQ ID NO: 447 - protein, 575 aa, Toxoplasma gondii
MFSVLRNRNMRHGPSIGSSSCLIWLAAAFFVSALGHVQQGAGVVRPRHWQNSEAAVSVRSPGGASPRPFHSPIEPVAFIDGEHDEDKHEGSWLEQEAAEDVTPLPDSHTEAQTQSPSAFRRLTRRLRFWRRGVTGGSDAGEEAPQTPRPSLRTRILQYLRRVGTFFRRDIPAAALRFFRRFRRVRQPVFPPDEFPEDVDTNPIYFRGTDPGDVVIEELFNRIPQANVRTTSEYMQSAADSLVSTSLWNTGQPFRVESELGERPRTLVRGTVLGQEDPYAYLEATDQETGESFEVHVPYFTERPPSNAIKQMKEEVLRLRLLRGIKNQKQAKVHLRFIFPFDLVKDPQKKKMIRVRLDERDMWVLSRFFLYPRMQSNLQTFGEVLLSHSSTHKSLVHHARLQLTLQVIRLLASLHHYGLVHTYLRPVDIVLDQRGGVFLTGFEHLVRDGARVVSSVSRGFEPPELEARRATISYHRDRRTLMTFSFDAWALGLVIYWIWCADLPITKDAALGGSEWIFRSCKNIPQPVRALLEGFLRYPKEDRLLPLQAMETPEYEQLRTELSAVLPLYQTDGEPA

SEQ ID NO: 448 - protein, 353 aa, Toxoplasma gondii
MTHPNPLQTRFSRSASLVSRMPLVRLFFTIAAPLLFSPSPCPFLPLKTHCLAIQLGKPQGSPPASQKEAIRDTGVSHQKGEPSDSSSEPKPQGTVAETPGAASAAAAEVGRPSRSSAGPGKKKRGPSLFTEETMGPSKRHPCLKTLAAAVERFQAQHLTGRDAAKAFVDAIQECGIQVVASDYDRTAISVHSGGSARRDDLSVLGALTPDFKLLGEELTRRNIPIYFVTFSDKGENRGDRIAAGPLVEATLKASNANFEAQGVFGYYPPFYSEPEDYAPLGLSAPMPTDKSFHIQQVSKASGVPEDKILLLDDDRANCVNFCRSGGAAIHVSGHEGFDFGAVRVVVKPSLIMQ

SEQ ID NO: 449 - protein, 102 aa, Toxoplasma gondii
MGHPTSFGQPSCLVWLAAAFLVLGLCLVQQGAGIQRPHQWKSSEAALSVSPAGDIVDKYSHDSTEGENTVSEGEAEGSRGGSWLEQEGVELTSRLLDSQAGS

SEQ ID NO: 450 - protein, 1010 aa, Toxoplasma gondii
MKPPRETSRGGMEGKVGFGASIRDRWFFQNFSDGLSNGEKSWWRRSVVHFLQMADPTWSCRETRRALEPGMLEKMKSTYWLTRIVFIRALSFVYFVAFLVAFNQAQGLIGSDGILPAQTHADSIREVLAEEDTWTKIKAFPSLFLFLPANDFWIHCLPFLGILVSLVTGVLGGSNGFVMLFLWILYQSVNSIGQEWYAFGWESELLEIGFLSIWLCPFWSFSRLPASWPTPKICVWGNRWLLFRLMLGAGLIKLRNDNLWTDLTALDYHYETMPIPNPFSWYMHNQSHTAHAFQVIVNHVVECVFPFLLLIPFRQCRLVGGVTQILFQGAIIFSGNFSFLNHLSILPALMTLDDNFVSCLFPSKTLERLQPLLQGCLGAWSLPKHQAWPVDSCSEHTNEHQGVGSVKDPEAAALLNDGGSQLEWSVDTDDDSNQASARTCCCWYSPRILQFFRSIPRTIFPSRARNRMKRDMEESWKSMLLELVVSIGVLVLMAVATSSESPSLLSVLAIIFLCLALATSSHFYTKTATSNVFTELVLLVVSLWSAVSLYKYGPLPSCLWLTIVLFTILLAFSYKTISNAVLVYKIHVELLLLLLIISLSVPVVANLLSPNQLMNASMANPFDILNTYGAFGTVTTERWELIVQGTDDPTPDENSTWINYEFKCKPGDVNRRPCLISPYHYRLDWLMWFVPMDIPEIVGVRHPWFPRFLGKLLQNSPSVTGLLADNPFKNKDPPTAVRVLKTLYRFTKRPFWGSGPWWEIVPNTTSVFVAPGDVPDADQHLEQMIVLKRVQEQKAQEELLRKELKEEQRKARERAEAEKMVAEEERKKLLEQRTQEELETKRRIQEEKELREKQAEEMRKQEEEQRKKQEAEEKARAAAEEARKRKEVEIARAQEEQEAERQREAAEEEKRKKEAQRTAEEEAAKLRKEEARKRDEEAAKLAEQRESLRRKEQKEKQAMLAKKRAEAAEKEQERNSQLSDQSRASADGGVPLRAAALFNRKKAAIFRLNQ

SEQ ID NO: 451 - protein, 1063 aa, Toxoplasma gondii
MLRHFGGGFMPWRHLDISSLHWVDSARFGSHCKRYNQESATERLREGDAWNPSTVLAVNPSVSTMSNGAVADSAGDSGQQTPEETRGSRDTFVFGPFKEWLKHHCSLSKKDHALTAEDLKVMEGTYWLARIVFFRTLGFVYFTAFLIAHMQGPGLFGQDGLLRLEDTPPCKSSGQDSRELWTRFAAEPSLFHFFSCTDASLLFITSSGLVLSAVLILTGGVTVPVLLWLWLSYMTIQAAGQRFYTFTWDTLLLEVGFWAMPLTLVCFLRPFLPLTSAPSPSNTTPDGPGARPSTLKSATMSQSAGGGGVSGAQLDPGHPKEGADGRGSTSAAAELSSTDGVRENPSGPESDSSSSGKRSTLRGQQMLRWPRAALQLLLRCCHSLVSPGAPFLPPTWPTPWISVWGYRWLLFRLMLGAGLIKLRADTAWTNLTAMQWHYETQPLPNPVAWFVHMLPMSMHKFEVLMNHFAELVLPFAVLSPWRQLRLFSGCFQLLFQVAIIITGNLAFINWLTIVFIVFLFDDRFLMWLFPTSTLNKLRPLLQGCPGNWSFPSSDSVTKDTSTSVSKSESEKSPREPQACSEQRPLLRNDVKLRETSEAEEAHCPPSSSSATTAAVSRALPWRLLTGPKWTGRALRRMLATWGCWRIPLFLFIAAVLVTSDGILLLLLGKAATAPSLSTTLVWESAGLLLLILTSVVALGGLAGAAGVPWSLLGAAVSAFSPRFTVENQHPLTNLASVERSETAENASLPTHPQDSERRGTVLRRPRQTEEDVGGHEGGVVESRRQSKSVVDADEGRDEAKLLWKRTQDVGALAFEVLVAGVVLANLLFMHFHLGPTFAGLDLLTGLLCVLLFAFAHRHCSNSFLVLRVMTEVGLLIVLVWRSIPVVENLLSPHQIMNDTYDSFRLVNSYGLFGFMTKQREELVIQGTYEPDPPSAPANPAWQTYEFYCKPGDIDRRPCFVSPYYYRLDWLMWFAAFNADLQAPYWLLRLVKKMLANDPKTSALLAHNPFRGKRPPTFIRILRYDYHFAYKGKEQDMYEQGKWWQRKYLSEFLPPVSAALFRKI

SEQ ID NO: 452 - protein, 1254 aa, Toxoplasma gondii
MGWVPPCAAPAHSQAAANLRVESLGSRSFPDGSTKKRRREERTDRFRNLHFRTLLYSCSSFSCSRNAPANGHKTSSPGHPEESLRPTPLFVKRARFCFYLLFLFSVLASNFFSHRADECTRFCNVFAQALHVKLDNPELSRQTLPASLRWQQVKTKNGEEVNAAESASWKGFADVQLAPFRPDEKPSRERTVHEHRDTVHGLSGRDTLGIDSFRGTDLRGNRLFVRLPRPALHSPFLFPSFSFPAATQPAESSVFFGADGIPSFSEIHSEQSEDAEEPESQDSSSSRNQDEAPKPTEHASQEKAHESQGEPTEDSGAAESASEHPSPSNSIPAEEESSATATQEKPTEGPSAPQTLASPLGGDTASSSGTEQTERRSGSPVEEQGKDSTRTASLGSVSYSSTTTTTGTPSAFNVKEALLAPVPTGAVAGPLAGREARAQRGASADSGERGAAGAKEAAGEAQGPSEVSEEKAEPKQKEATEGGKTGGDKDGQERGSAAGKEDSAPTTEKPLSKAEMERAAAEFVKKEGGMGSLEKKLAESGPQLTEEQTKTFVDTQEVAQNVRKLIGLKAGSNLHLENQKLIKADCDLATFGPEYCAARDNPNALSLLWSLEHRKNTIYFVIAMITLAFGIAVQTCIRLLERKISEGRDEFSKEVMETAFRQIATISIVNVILWGTMQSNVAEVLDELVFGDVMPPLRDSDTVLENVSPMLEVLFEELFFVSVILLVWYVVFVILFQCMIRQIIEWMRKIDEEEDIPLIARDAETQSHRWCGAVLGRSALDKANFIAHRYEFTDNVQSMSIPGVDPSGYYFMEYLRASLLKMAIEMIRLPNSTLFFLMIMDICLRPTFSFRLGQEVGLISGLSATCLVGMLLVWAYTARIEKQLLPRHVPHYLVMRYHMEVGGDTSSEYLKEFAPPYKLQKQKNAWPGVCSTFLRGTTLPNKHQQLFCFWANGPNIVLRAVEASFFCQLLVLAWWVQLFRSHPATWLNFCWWGNVVVVLCAGSQFALLKSVVYTVLLALNSGMLVDPELLEKVWDLQRAENVRRTAELIDALRVQSTLFAISEGGDMFWRQLLIRSKGASRQAQEQRLSLWAALDEEHQGEISRAKIFKFLTSQGLPIKSESGVNDFLHVFDRNHKGGVNEDEFFVMVMVVKQMLMEPLDRDAVRELFEGRYGIPWTSPVGIDLANLSKILAELRLTLSEGKKRYLLDFIGGKRGTTAVSPDHFVSQLQAMEEQALNPIQSESLRGPPIPGERV

SEQ ID NO: 453 - protein, 1257 aa, Toxoplasma gondii
MVSLCLPSPLLGLQGPCPSRKKPTRSNGKLQSQPCARWKPVDLTTPQSRLLCHSLPTVPSSISPSQSSASSRLSVNPSCLAFSPAVCFLDANRRASWSPCFSLKCSFRNSRRPFLCMALCIVHLWLFSALSFREIVYVSDSAHHNKANPTCLSSWSLAAPVDARQPVNAALTKEAQIDLYEPRNTLGGLGKSGRGSGFSLKTGDAFKDVAPDDSGVALLSHESQQSSAAHELNMHHDIQPDPSSTEFSNGRSAPVSFLLSRAFHLSRQPGHLSLHDSLSRLSLFPSKGSSISFSSMSSPSLSALPSSSADSPLSSGLTPPLSLSTESVPAAEESPSSGASSSSSPCEFSPSRDFAFLEAGQATSGKNSLPRACAYAGCKAGFFTPRPANDPNTCYTLSECSQCRVHPESHADLCSQVEERNGLLLLMKSSLGLMPNPTMPFRYKPLSAKDIARLRDSKGKGSAGGGGDGAEGEYDDAGGEEYGEDGASGEGEGADDWEGSDEGFLQLHSLETRTKGESEPTGNARGSSQPLRRQGRLPSSVSGTEEIFHPSDFRLASFLEQAQEVRHGQRTAGETATGFAASLSPLPFSSASGASFDLSVSSAPSHSQSPFSFLGEKVSSWDNEYGDQGDDYGFGDQASMLGEYDDNEGSDEDYDEGGEQPRGATGAKSGKAVFLKFDETRVYRIVPNSLLGDVGRCATDSKNYMRLQITVALQPRRFRMSVAKAKKLMGLRARKPIPRSFHEGDEGEDGGYDDADGGYDDEQGFLELENERREGRPVQGDGTGELGTESREQEGNWHELSGLTEGRDTSEDARERQRGKDRGENGRHTGVVSLSDTAAELGYEGKSEPDLQDGREQDLKFRFSSTRVADLEGEANQPLSFVQVEDDDYGDDEDDDGEGRGLGKKMKGFFGGVKRVFSRKKHGEDDDEEGGYDDDNPPDDEGEASPSKKGKRRGSFMNKVRGLVSSKSPQEKRFKKETKKARRGIKRVSRVAVDIAFHSPAVKKCRKSLSWSATFPAAKILQTSFFILARQGEVGGQLSAFINSGFSVTLKCKMKGGCMMNEVPVSCALVSCVKAKHVSTEALEEGKKRAAALAEHNLKLAQTSLVMSPADRAARAAEYERKIQEKQQEIEAGNLTQQQMLTAQQQQFLLQQQLAAISSSQSPLDPMQAKLLAAVQGGEDASSSTSGVTMQEASSGVTDSHTQRLIQHMIAFDSRRGGRGSRMSGGAIAALVILGLLGILVGGIAVFKYRGGRRRRR

SEQ ID NO: 454 - protein, 1490 aa, Toxoplasma gondii
MRIFHLLLLGWAVCLALGLRVDLAAAETETDGFGRRRRKKEQEHYGDNIEMTTLPTKKGGTAPAVPSSPAEAAKWPFNSSCMYSEVEIYRPGIKEYLHARTYDPLAPIAGNQQENLKALQELLTADFMTQGVASVLLAVEQVAGFVDFQQPPLSEGRLFCSEAKDELCHRIRDALRSGQPCKVIAPVLNCSQLNKKDMEAFLEAFEAEAAILPSSPDNECGKAYAEAVSLYHLVIVDTPLSFSETPMESEEMKEKLNLLFAENTRGGPTPAKEGVVYETVDLQAPNDSGDAPGKPEQVPKPSLLSINSSIWPADIYANSEADREASMVELKKLKNRFLGKPLGPPETTTLEAFPYEPEATRTLHYSAARRLFFIGARSPLVALLYNLLFQAWYRWDELFTGEGAARPFPRISTLLRAGSQERYSRLDALCGVALKKVKPRPKTPSTLPILPREKMFRKTRVVGEAKFSCDILYRAATALDLGESAAVVDFNERMESLNDEKKRRSVLLEHNASGSANFRRVCLSFRKSVDGVTELTDLLSCSFSDTVLPSALSASTSSALPPNLREVSEFDSVVLLETKAAAAPAVDESEDEDSPQEQEDRARRNFNWLRLRAAPHLEAGLLGDVLSLDYGTWWISLLFVDERSLGEVEAKRKKLKATCAKAAKSKKSTADDGVCTATWNKRWWDKNCSKNLTRFLCTPVLDVLALDGQLTFVTSRALKALAANDLQVKKPGQSAKGRPFASLAGSRATQKMLFARNAYAPAIFGALQFFSTSTMANAELLGGLDHPGIWDINFASSLFTGKGKRGWLFSRLTGSLLRRLGTRLAEKAYQPYMMQLLHQKLRPETRKKMFQAIQVIVHPLALKHLNQMAPLYSDSKGNLNKEGGFAEEIDNTLREWSEYGMNEKLIDRLEKGQNLSASDFAGVNILTMPIPSRERMDSLVAERLNGALKRLQENPENVETSRAACDFLSHASNSIYVTNDSRYLLNKFGPENLLFLGKIVKRSETLEKPQGFFARSWAGVEKTLKGILRLPPYMVRHFVFAAVKVREDLVSEVVREMAAIYNRFSNFFKDEIAFRKAVSELSIAYEDLLRQRIREPFAVPTHSLLDNIHPDYAQMDGQSRNQEFQASALSHIFSQAWSLFFSVSMNNYINPEPLAKIEAEYSTDAWKKSVDDHLAVNSFRMIFMGSDMPLKLYDQLIPNEQKRMLKRAKFGVSTMFAYQTLLTGRLYEAQNLPNLGMFLQAQGPYFGPMIVRWQQRRRTDRLIEIVSWLTLGAFCFAAVGAAMQQTTQVVEQIVQNQSSLAPELSGCPPMGICMDGTIGDPIASPPATAASAVFQSIALVGVGMMLGPAVAIWKIAVSHFKVLARFEMAIGNAFRRMGQWFRKKWRGRWFANKQNAEIEKEMQRHTKKMKEEQKKMIDRKAPNLIDQAVPATAPELDLVPDGPEPVLGASTSGSGGGFFEIASAYRRRPRFDRLASIRRHDALLARFDKL

SEQ ID NO: 455 - protein, 157 aa, Toxoplasma gondii
MDLEALSSVSPPRGIVEDHSQISVERVNCVAELVIDAKRGGREREAVEQVPPPAERQAGGCDGGQVQMVQQKHPGGLKFLYISDLLCTYGEWQDFSDTTSQRTVPDCSGAFEQNGHDRHEEPMDLRMSPLYYSDGDPGKAMSWQVLTRKPGTENDVN

SEQ ID NO: 456 - protein, 194 aa, Toxoplasma gondii
MNFFMSTDGSVSLGAFGAVKKDGFRGVLATHEEFAPPDVFVVLSEVMLTCAPDAWGLGATAFWTWWNKAPETGDTVGHSILPLFKTSEDGPQPVQFLVHQFLKRFARDRPLALQALGLLSNKRWQKSCPLLCRSTVMVERQQEETVLPPRGTSQGVEGIGGKGCDGLVSRGATGMPLEFYDVFDAEANASWEMN

SEQ ID NO: 457 - protein, 631 aa, Toxoplasma gondii
MHDPDFKVPLNVVVSIYRRGSIKCVPVSSLLPITLPGCTSEKHAYLAAYFLPKFLNITSAEQPPAAARMQLPAGSYILFGWSVRQRGCTKMKNTLLSPVGFFTALAVLIECHLCDRCVAHHGSSTDGSGLRPPQEVDSAPRTPSIAVKELATFPGDDIQTSSQELPGYELWTREQSGASVRVGFPQNAESFLTQREARDEIANAHELVAVTPEGDAWNHSGVVPEEQTVTPASGSFIQRQAAHAPPSTRLTPVDRRGRSHTVSAVRRRVTVEDVMRPDQSAAMHAVLSAFGGGLVLKAKNKWGRTRYTLQGPATFLGMGAEGIVVRLNQVKSDRERSVTPVAVKLCLIRAAVFSGLTWWRKRRTRTELMKLFLSNENSVKRALPDLDPAEMLEHGLVVPHHAELVSGMPTWFAAGDSFFVLPVVSVSPLFTCDLETVVQNPLTFLGEDVHYPPVAKEYCVDASKGISHNDLKLENVLLSADGRVAIGDFVFQAPFGASLPIRGTHLYMDPDSSEAFFEQRENEITPHRDAWATGVLLFYLWCGVFPFGLQNVANASPPQVMRVTVMHARTTRPPPNFRLCRRIPREVRNLVTGFLQWNEEARRLPSDVADAFLAATDDGGREARRIRTHQF

SEQ ID NO: 458 - protein, 131 aa, Toxoplasma gondii
MTLKIRMICLAAVGVLIGGVAITTVFKPVSPECTVHSFSIGLISADALRIRASHSSSKGEEGDGEKHKDKSSEEGAGDRDREEERDGEGEGSEKGPQPSPSGKPLQRRDAGYWKKNSDSGKHERVKGRKRK

SEQ ID NO: 459 - protein, 363 aa, Toxoplasma gondii
MCCMLVGLKHWEYCLSLGSAAVWYAIVSFCCAVWQLAAVFVHVDFSGDITEPIVRDDDGTRQVVLGLMSISHAGAAALNFAVVLLTGLAVGLRSPKLCRLSSTVILTQGIYNSLFLVGVWSIFDCSQHGAKTHSAGLHPDAWFGALLAWPAAVILASLATVQSAGNSGFEGRQRIASPRLHKPDDGHVSDAWARVGTWTVGLTLGQGVLLLSGVCFLMAAKTLRSFWNLHFVESYEAQQIGWAFMLEGLILCCLAATAFVGTVLTSTFSLLVALFCCIGLGPIATIVAVWWNVLLYRWKVEPGVFVGMQFSIIEQYVCVFCCWAACRTLTGFIAAKTKGRFGIDIPKDDSPESEALVPSASPA

SEQ ID NO: 460 - protein, 114 aa, Toxoplasma gondii
MWVDGIHLSLLAVGMPTPVRFRSMCSSPHSCCFVENSEQREIQSLFSGHQLLLLGSCFCDAAESTVAGRRSYQRHTTRPGWVTGAVQQTSNGWRLDVSRQQMPQWKRGHIRGRP

SEQ ID NO: 461 - protein, 233 aa, Toxoplasma gondii
MAVQTAVDDPEAPAEDQPLLGGSLKKPSTYRQCCCCALGTAVTLWAVFLIAFSVFLVLDFNIRGAAFTSGAVLGLVTATLLLCAAGQQNAFIAFVSFYLQIMVYLLWALQMALAAVSLWKVTHSSASVAGREDFPRVTLSQYAVMTDTVSDQSGTRPVQVYRQVEVSFALYEATLCAFYAVQLLLAHFVLSMLWSFYRVLQAGGTGFEKRTAEEIEEDALSAQFPSFAEDTPR

SEQ ID NO: 462 - protein, 479 aa, Toxoplasma gondii
MATVPMVSLSAARFTLSFLFFQLCLSRLFRPEGRNELEGPKDVDADVIRALDLASVFAFAEAVNNPPPLEGASVSPENATDPPETGGSRRWRTARYVLRRPFTHIRRVSSAVRRYISRGTSSLASSFAWKRRLRKLIRGMAKDLKQNRVRDAQQKPGSDAVASFVKTPHALLTSLGTPPAELANAVGLLLPVQHPVPMKSKVTGKSLLVSHAATVGVSSYGSVLLRCEGSGESASYFLEAFPVLRGSREASVSVRKQYLAAIKELRAASGVAQVGVVVDLLLLKRVRNTWCPRPHESHFAFPNVFLKRAVEGETLREVLLHIASTAATDTPGTGPAHDARVSLTEQVHKLARSAAELGSRGGKINIDTFFVTLDGIVHLQPVSLVESPPVHRGSAGLESPIAAELEEGEEKPSPEKRMTDDLALAIVLAQIWCPQRRFDDVAYELLLLHRFEREVTEEFFERCADPPEAVQVLVTMLAF

SEQ ID NO: 463 - protein, 226 aa, Toxoplasma gondii
MDLWGRDISRVEALKDEIFSLLQQREKQRGPGGSASSSGRSSALLRGKFYQFCQDVEHLERVMKASEAERSSDMSSADWRRRREQMSRLLAEKSELQLSFSRAFSSTEDDLCGLPESGAVWVDVSGGARALKTREENIIAEQDEQLCFLAGTVSNLKSIGHAVGDEVDVHRKLLDDLDVDVVRAQTRLEKNKELLKKIVDRQSTACLLFTALALLVVLIFLVVATA

SEQ ID NO: 464 - protein, 823 aa, Toxoplasma gondii
MSAHTETMTLGIPLSPTGELVDAVPHATAATEHLHEHAIVMIIASISFIYLLSAVLAGLVGLLPKFRPPITVVLFLAGMSLQPLLEWMQNRVLLQGIRLIGNVDPYLIFFALLPMCLYESSAFVNYHMFKQVLPSSLLLAIPGVAVNIGLVGVFLRYGVSRVYDWPAALMTASIVSATDPVAVIACLRALGAPEKLSSLIDGESLLNDGSAVVFFEVFRSIVIGTYTGVGSSVVLFSQLSFGALGYGLAVAIVLYLWLLTVREFEIVQVTGTIAAVFTVFFTADHFLHVSGVLAVVTLGIFMAAKGSTALQRSIQKLHHESVELLSTLSVQAIFVCGGVIASRLLIQYADTWQEWVELLLLFAVLQTARFAVVFGSWPFITWMGLPLSWKECFIISYGGLRGVICLALGLVVEADPLISPTLREHVGICVAGTVIFTLLINGTTAELAYTRLRLYPISKYRREYLDSVLASIDVSFNRKKNELKDYWLFRGTDVVQAANEALPQFSKGHLDVNGNLHIPTKSFREVLRNPPSCENWNVQAQVTGLAKLESRDFGVPSQLGDWTHGLVSTIKNVKQLTSRQQRSPESRDDQHNPEEVTLVDKEAGQLEKEVHVLHIMFSAMREFYSGMYKRSNIGGTACLLLTSTVDKCHSHLDAQLHDMTTNKKSRKNANNTNVFSFEWEVLLASLRTRYGLWKCLNAMPCDAFDLLKSYLISIIETLYAVVEAHEFVNQSNRKEMEELISQATLMPSDDVVTSAKELLEKLRNTFPVAFSQCLVIIAAHMLLNAKQKVLDEEIERGLVFPEDADKLNEALIEQRMMLERIIR

SEQ ID NO: 465 - protein, 1300 aa, Toxoplasma gondii
MARRRPSAIATCFRMILAFFLSFTFSSGADSLLAPSTTQARRLQARSGDNALSNGGRLPNGEHNQFRALRRGDQKVEKDAFGAVNAEQRTAVSGSKFEREKWTPISFTEKGLFDVINPTIAGDEKDELNWSTHQRIEGRGTEPTRSDSQQRDQAKPRALERREEAGQPPRDEHQDTDVEQAPLIKEDESDSPSVEEPRAQPPENKEDAITKPWDADWNPWKFLDENPLPIYRDDWDEEEDNRDDADHDPGFAEPPNSPPAGGVPKREDDNAPDYPGDDTASSPPYDMRPNPEDHSRTQPGEYGGGVDDEGELPDEDTAKGMPRSSTPPPNEESIPAVPTESEWSGSGVYEGIAITVNARWIDTRTIGEGGIQLQHQPTVFPAPPVLRKVGLKSKWKHTIKIFVRTTGAKFVPARRQVFVPLDETPTSSSTLLPWWANWSISAVKAASATTSSVAAFLFGTGRAVDGGEGISEGKGPTITSIKNMLKQYKRFKRKHPGKPGELVIDLCKDEEDASSAARTPSPSSASESSSDGGVWESLESPAPAPMPSLTSSSPSGSSPFVVKQSPEGDLKTESEGPARLTTPSEKRPAKAKPQNTKKKTKRRKRTVANAYNILQTQEGLALVNKIRDTMAEIFSSPSTSVQVLTSTGHLVITLPSEGVDRYKLKGFLQTVQETFGDNIQQWSFSEIVQLRSEVPEPHIPPRAQMAAKMESLSGKSTKTSKKLNGRSLPASMSETTSKKTPFEASMPTDSALESKLYGMHMITATHAWIHGEAGDGTVVAVVDSGISRHHDLDCNLWQNPHEQQDGRDDDGNGLIDDNHGYDFQENKSEPEDENGHGTHVAGIIGACVNGGGVVGGAPKTQLMALRFIDKGGQGSMANSIRALNYAIDHEVQVINNSWGGPQSTTVLRRLVHMSAVARNGKGILLINAAGNESSNNDVNPSYPANWDQDNTISVAAIDINGDLADFSNYGKSSVDMAAPGVKIYSTKPGGDYQHMSGTSMATPHVSAVAALVFGAFLRNGYDAPAAEVKDIIRITASPVEQLQGVTRWGSIPHARDAVLMARMGGMFLQAKCEDMVFELDAGSAHVVDLHLMPYRQGNYTADLTFDVFTEDGYRLDQIKVPVKLAISAEPRQGNSDSLAAAAFSSVVSTFAAHPTEGFEELCRLQAKIHVVQEMSTAMIVIICLGVIAAISVLVLVYCCSRNGQRRSDAAKRRRESVRDSAGEERRNQLTETHRARKHADTSAEANKEFLNCSSRAEDDANDRSETHTNPTDPLCRKEHVFLPATTLEQFALSTPNENES

SEQ ID NO: 466 - protein, 243 aa, Toxoplasma gondii
MAQYKSRPLAAVLLLITVGSLLTASESVQLSEGMKRLSMRGRSPSPKTGRFESGDEGTSTMSPSVAARQQELGLLRPEERLIAGQAKAAALQTVHQLGAVVLTPEQAKAALLDEILRATQNLDLKKYENLNTEQQKAYEQVQKDLSLLSPETKALLIENHRKEKSLLEQAKRLFRKRHYHVTRQAALAGQILNEQRDASGALQSGAVKAAIRKANEQYNVAEEDKNFNEEQHAAQLKKVGAMP

SEQ ID NO: 467 - DNA, 3262 bp, Toxoplasma gondii
  source 1..3262: mol_type = genomic DNA
tttcggaaaccagcccttgcatgttgcgtcacttgttcgattagccttcgcatatccttttcgtcactgtgcggtgcagtcattccaccgtgaagggcgtacactttcaataagacacatcttctgaatgccagaaggagcctctggtttccctgtgcattagttagcgaattccgtatctgtccggcaaggcttaccctgtcatcattcgacagaagatccgaatcggacacgatcgccttgagaagtgcatgtttctcctcaagagtcaaccgcgcaggctgcaagaaaaccaaaccttgcatttgttcccggggttgatacggcgaattcaactcactggcatcatgcttttctccttcgcaagagccgctagacagcttgacattactgaactgtgtgtgttagaccagcactgggacttgtgggtctaggggcacgtacgcatttctccatttttcagttctttcatgactgtggtggatcgctgacgatccgctagagacccacccaaagtggcacagaggtaattgtctttggaggccatcgccatcatcaaagcatcaacgccctttctcagactgcaaccacgttatataagtggtgcgctgagagattatcacttgtgttagaaactcacttcgtgatatgatgaagggatgcgcaagtgagaccggccttcatccacgtatttgcgaaaactagttcctaaaagtaacatggagcttttgcctgtcatgctgctcaaatgtttgtgtacccgcttgcggctcaaagctttgtgtagtcgctcccgagtgccactggttttttccgcttgaagttcactctcagctgccttccgtctcgcatctgcctccaaacgtgagagtaactgctggaggaggagctttctggtgctgagttccttcactcgttcgtccagtttttcattggtcgttcttagaagctgtagctggatcgagaggggattataccaccggggccatggtggagactggtcttcgtggcatcgtacctgctcccgcgaatcctgtccttgggatgacaacgcttcgagcttcccactaatgtgcccccactggttgccgatggttcccacgctagccataatatcgattcaattttactcgctagcagagtggtcaattagatttgcgccgttggtatatgcggagatttgattctgccactggccgatgcgccttcgctaaccactgcgtatggcaaaaccagtggctgttcaaaatgattcagtgtacatacacctgataggaccactactcccaatgtcgttttacttgttccgttaagctgagactcatgctctgcgtgcgttttggttttaaggtggtttttgccgccgatctacgcgagagacacattcgcgcgggaatttgactcgagccatacgttttacgcagaggcaaagcaacatccttgttccatctcgtttaggttcccaccagcaattttggtctccattttttaccttcccgggtacaggcccctgacggatattttcgggcgaacgccctcgtaatttgaaccggacaggaccaaagaaaatgtgtaacgatttcgtggcgaaaagcattctccctctttgtcggatggtaaatagaggaatctatagggtcctcgtccaaatcgatcgttcggcctgttgtcatacgagaaagaggttccctagcgcgcgatctctgtaaaaacgttttcgacggaattgaatcttctttccagatgactggtgtagcatgtggctcgtctctgccctttcgtaggcttgcattttgctgtttgtgttagtcgatcattcaacgggcgtctctgtagtgttttttctggggtgacgactgacatgccctctggtcgctgtcagtaccacatccccttgagaggcgtgtgctcaactaaggggtttgttacagactgtcagttccggtgacacaagtgaaccgtgaagaaattcatcctatatcttgtcagtgccagacgcctttctcccattttccctcccacgcttttttgcgtctgtttagcggttcttcatcgatgtggaaccttgtcaaacgtgtaatccttcgctggccgtcaagggacccctgtggaccgcagtgaggtgcatcgtctctctggagctgattgatgccaagtagcatcaggaaagaggtttgatttttgcccccgatcttccgtggtccgttgtcgtccacatgcatgcacaccctacggaggcgtgtaaagtggcggcagcgacgcacacaaatgcttctgctcttctgagttgggtctccaggaaggctctggaaggaacgcacacagaaaataccttcgtcgagagagctaggaaatcgtttgtcccttttcattaaatgagtgactgatgaattgagatcagtgaaatgcagtctactatgaagactgcttctgcgcatcagcttcagctaatccttcaggaatacatgactgattgtgttgtggaatcacagggatccgtgcgctgtggatacacttttgctctaattgatgagaggaggcagtagctgctcctcaagcacgagcacgtgttctccacaatcctgccgtacacatcttctcaccatctgctcaatctacggagcgcctttcgtagcgtccatgacggaaattcgcggggctgaatccacccgctcagctgactggcacaaagtgcatgtggcggccgcttcgatgcggaacccttgtttgaaaattggtcatcagagaagtccctatgttgctactcgagtgcctcgggctgagggtggaacgcagtcatggcatggtagtccggtttcccgccgtccatgggaagacaatagtgttcctaagagctgcgggatcggcctacacggactggacagtgtgatgtgccgacaagggatgctagaagaaattccagcacagtcagccgaccatcaaaattcggagactgtacctccagatctgaacgtgtgcatgatggtacatgtggaaaaaacctctggcaattctgtccactctatctcgccaacaactcgggaagggcactctgagtatcttgaagtttgtccacccagcagagagcccggaacaacgaaacccgcaactaatgacgcgatcggttccagtgacccgttgacagcccttcagcagcgtttcccgagcgctgacaatgaagctgctgatgtgctcaggaagtgcgcccgccaaagtctggatacaacgtggagaaggtctaattcgtgccgatccacagtga

SEQ ID NO: 468 - DNA, 1849 bp, Toxoplasma gondii
  source 1..1849: mol_type = genomic DNA
gaaagaaaagtcccgtgaaaaacgccatcaggattcctctcaggagccacgcggtccgaacgactgtcagttagccctttatttggacggatatttagcaaagcaccgagaatacgttttcttgacccaagcagatgatatctttcctgctggttgagcaaagctaagcgctgcaggaactctgcagaggttgcatgtcgaccttttgcagagagagagtcggcaacggaagggcctgcagccgcaggcttaggcaaaggagacgaggagtgagacagccagctgttcctggttaggtcagagaacaagacagaggatagtggagacaaaagagcctgacacctcaagaaagacaaaaggaaataaaacaaccacgcggtagccggacaccctcctggtgggggagaaaaacggacccgaatcgtcatcgtcgtccgtccatagtgtctcactcctgggaggcaactctccggctggaacagaggctaagttgggcgcatgaaagaaaccccattttggaaaagacgaagctcgtcgaagtgtcgggtcgcccacgtgtcaaccccctcacaacaaatcaaaaggaaaagcaggagagggccgccacacaaggtaaatcggacccgaagcttggttgaaaggaggggcgaagcgacaccaggcgatcagtgcgtatagtggatcggatgtgacgggaatggatttggaaggaaaggagtcttggttgcagaaagtactcttgcaggcgtcgatagtgtgttcatggctgactttggagtctcggtggtgaaacgtctttactctttccgcggtgaaacacagtgttgcaacgattgagaaacaaagcaggaacctgacaacatttgggctgtacaccgcggaagtacatgcatgtagcggcgggtcagaacaactggataacagacaatttttgcggaacctacgaacgagacaaagagcctctcccgatcatgtttgctctatcaggagatggtctcagaggaaacgaaaggtctgctactaacaatagcccttacgatgcgtgagaatgagactcttgccctgcaagacaaggtttactcctgaagtaaaacaaggaataaccggccacgcgcatgcaaaatcgacacccaactccaaggcaacaacgcactgcggccgaaaaacggtactcgaaccggtagacacacgctagccttttgacgtgagctaggcgcaccttgaccatctgattcaaagtttgggtggagattttctaccacctctcgccatcgatattttgtggcattctaacggaaagactaagaacgcctgctccggcaccccccactaacggaacacgcctcgacagaggcgcgtcgctaccgacgctatcgcttccgcagctgttcactctgccggcaagtcacggtgaacagcaattaagagatttgaatgcgacacccactccaacttaggaaagatatgtgaatgcgctacttgttttctgcagttaagccatctgctgcataaacgctgcctaaaattctggcgttgctgtcaagtcaaaggctctctagggtgacggcaccatcctcaggtggacaacaggtatttcggcgtctcctcaaacagtctagtacacgcttctccggtcactctctatcaaaaagttctgggttggaatcgtgtacttgtgagccactcacttgttagaatccagtgcacatgcttgaaagaaagcgttgcgttgtattccagcccctgagcgttaagtctgagtgtgactacagaagctagactgagtcgaactgagggagagtaattttttgtctgtgtgtgcctctgtatttcacacaggtagacatta

SEQ ID NO: 469 - DNA, 4139 bp, Toxoplasma gondii
  source 1..4139: mol_type = genomic DNA
aatccgcgaaactcttttcagcagcaagacggtgcacaaagcgatgccagactcgcttttcttcaagagccgcgccgacactctcgcctccgccagcagcgacggggtcgtcgcggtcggatcccatccagtcgcggtgtgcctggggcatcgttggaattcgcccgtctgcatgcgcagcctcgcgccgctcttcgcgcgtcatctgcatgtcagcctctagatctgagccaatcgctgcggactctgaacttccgcgtcgacgccgcaggtcgtctgccgcggctcgacgcgtgagccatgcggcgaggtaggccggcgcattgaaggaggcggcaatcgtgagggcgtctcgactgacgaagaggagagtagacaccatagggaacttccgagaggtcgccttcaccgcgttttcaacagcgccgaccgctgaagctcctcgcccagcaactccgtggcatggcgacggagaagacgcggacggcgaggcgtttgcggcgccgaacagctgggcaaagatgatatcctttcgaatgcaaagatacatgttggctgcggtggtcgacaagaacttgaaaagttccgccgtcgcttccgggagcagcaactcgcggcctagggtcgctgcactgttcgcgacaaagtaggtccccgcgtagacaccaaagacgatacgaaaatcgcgtcctgagagcacatgcagaggcctcaccgccaagtcccgaaggcccgagcctatggcgtcccacaggcggcgcctgcccgcggcaccctggacgatggagcgatcgatcaccgtcacaaagggagacaccccgaaagaggcgagacatgctgcggccgcgtccacgcccaactgctgagagactcgcgaagaaaacaacgcagaggtcctcgcagaagtcgccggctcgacttccgaagaagaaggtgaggaggagggagaaggagaagacgcctgctgcgtggctgcacagagggctggagggagagggatagcgctaaggggggaccaggagaaccgggaagacgacagagaagaaaaaaaagtggaagaaagagaggaaaacggtttaggctttggggcgcgatgcgccgctgggaacggcgaagcagtgaacctgttgttctccattgtagcagtcggtctgtaagtcgggagatgaatcgtctaaacggtgggcgaagacaagtgcaagtgtgaagtttcgtttacagagtctgtgtgtttcgcttgtttctcccgaaactcttctctgcagagagaaaaggcgagacaggggtgctgtggtgcatgactacgcaagaaaaaagtcaccacgagagtctgtacaaaatctcactgccgttcgcaccagcgtgcttctggaacggcaccttctggctgtctctcccctctcttcctcgcgtccgcctttccaccagtttaccgcagtattctcagagccgttgaatcctttgtttctccctgtcgtctccacgtctccctttgtcctggactttctcccccttgcgtcgttctccccgctgccccgcttctccccgtgccctttccctcggatttaccctccggtgtccgggcctctggggacgagtcttttagcagacttcaggtcgaagcgcagaaaagagtcacgaggaagaggctcaaatgctcagaaacgcaagagacgtgaagtgcaggaaggacgacaaccctgccgctactgcgtatttcaaagaagcatcgactcaagaggcgcttcaagcaagctcagtttgagcaactgaaactctgagtcctccgcagtgcgagaaaggccgcctgctcagttcccgggctaagggcaggagaagttctttttcaaagtgcgcactaacgaaaagaaaagccacatgccagcgattgggttgccacacaaaaaccaagctacgggagggacaccgaagcgtgattaggtctccaatctttcgccttgaacggacgggcttttgatggagaaaaaaataaactgacagttgatgagagagacgaagaaatgcgaggcctttaacaggcctcgggggacctgaacaacgtcgaaagaagcctacgggagctagtcgacccaccccaagtctcgttgtttgttcatggagtttgccagcacgggaaagcgctccctttccgagtttgaacaaaaatctgaacttcgagggggcaggcgctctggaaaaacgctttttttactcgccttcgacttccctggttgctgcctgacgacccgcgggagaaaggctgccgaggagggcgggggtttgaggccacccaggcacgatgaaaacagaaattgacagatactgcatctggacaaaaaccaagttgaaacgtctactttttgtggagttttatgcgaagtgtgtgtactgacacgacgcactttccacgcctgcgggggagccaggaacgctgtctcatcgagtgacccgcggaaacgaagcggaaatacatggctgcaaaaatgtcaaattgagcttcgattccggagcaccctaccccacgttttgctggattttctgcctttaagaggcgagttcagcggcaactccaccgtgggtggcgcagaggacgccgtctcactgtccctgcagagagacacgcgaggtttgaggtgactttgctaggtgtgggctcggaactcggagaaaagagtggagatgcgcagaaatgagacgcttcctgcatttgtattcctgaagtccttctatatgcattcgcagatgtgttgccttcctctgaaagctccaacgaacgcccccttttcaccgtctttcatctctggggcttcgaactcgagcgccgtcacaagcggacaggaacatgtttctatgtgagttccagcaagattgtctgtttcctgaggctccgtcaccgaagaagaactggggactcaccagtcctctgcgaatatacacgcgcaacactccaagcacatccatatcgctcggacatcgctctctctgttcctttccacgcggagcgtttcacgacctgtaacttcactcacaccggctgtcgcaacgcgaaaggcgcacccgcacagaagcgtctgctgggttgcttgcgctgacgttgtcactttgttcattttataagccgtcgcaagcggtggtaatcaagtgtgtttgaggatcatccgcgagaaaggcgctgtcgggtcgcgtagacaggataggatgtgggcagaccaccctcggtgttgctatagacaggaacgctccagcgcagcggaaagggtagtgctagagcgttctcgggtgttgagaacacaaacccaagtacagtttgcacattcgggaggctgcgagaaaggggaatcacgcatgtttggtcacttaagaaaaccctggggtttttccttgcacctgcgtacgggctatcgactccgggtgcactgtcttttggcgacttttgctcgcggcaaaggggtgctttggactgtctgcgtcttgtgtgaaggtgttcatttgtcttttctgttcatgtgaccctttctgctacggctggccggcttccttcttgcgcgtcgggggggtctttttggtcgcgtgcaaatatcgcgtcttcctctgcccgtcccttccagtttttccccgtgaaaaagctttgtcggccgctccgccctgccgtctccctcgcgtttccacttcctcactgcctcggcttcttatcggtggcgtcacgtcagcacaagaatccaaaaacttgccctccccccccccactcaacttcaggggtttgtctcggcgtcttccgtccagcaagtcgctgcgttcttctttctaacatcatccaacctagatcctaccgcaaaaaaattgcccttccctcctttcctcccagccaaggtcctccgttctcccctcgttcctctgaactgtctccccttcgctcccgtgtctcctgtcccttgttttctgccaggtcacccacggctgtttccttccgcgccctgcgtcactgtcgtctctcgcttgtcttcttcgctgctttcttcccggctccttcctgggtcttcgttgtcgtgtctacttgcgcccgcgtatcgaacagcctttttggtcgcgcctccgcaaagccgtccgttgccccgaacctgcctcccctcctttcacta

SEQ ID NO: 470 - DNA, 5019 bp, Toxoplasma gondii
  source 1..5019: mol_type = genomic DNA
gaaaaaggtggtaagtggaataacggaacgtcttaccttccacaggctgcgcagctccctcgacagaagatggttgttcattcccggaaaccaaagaagagggagaagaggaaagagaagacgtaggtgggtggaagcctgttacgttgggagccatgcgagcgtgaggctcttgacacttcagctcgctaatcgactctatcgactttgccgattcgcctgctccgcgaggcctctcgtgaccccctccaagtgccaacgcggaacaggtccaacctgtttctacatcggtgctgagtacagaattgtgttgagggtttcgtgtagcaggatgagagcagaagaaagaggaaatgcgagaagccggcgtctcttgctgataaacctgctgagaaatattcgttttagagatgtccttctctttttcaacatatgtggctcgggcggacgcagccgcagctgaagcagcagctgtagtggagaggaatgaggaaaggcaggagaccaaagagaagcgaagggtgaaagagacaacgaacagacgaagaaaatcccgaggcatgcgaccgaattagataaattcagaaggagagacgatacgagaaagggctggcaaacaaggacatccgcagggcatggggcagaggcgatatgggaaggcaaaccaagggtcgagggagttttacgagttcgttccaggtgcacgctgtgactcctgtggagacggcgttagagaggccgagtgtaaaacgtgttttctattgcaggtaagagcaacgttccccaggctatctaaatgctgggttgttgttctcgaaggacagggaaaacgttcggcagcgaattaacaatctctcagctttccaggcatatccatctaagaggaaaccggaagaggaacgttggggcactctgggaaaagcccgattttcactcattcacctgtgtgctgggggtgctcgtagatccggaggtgtacagagacttcagcatcccatttctcggtcggcaaaagagcagcagcaatgtcgttcttatctacccagcggaggtgtctatccatcacacgaagagatgagggagagaggcacatgtgagtgagtctttgtgtctaacgaactgcccgtacaggcaacgtacaatcacgatgggtgcgtatgttctgggtagtgcatcatgaacacgttttgtcgtttctggtggcttcacaaaacgctcttcgtggctcagtcctctccacgcgactgcagtcaaacataacataatgtagatgcccaaacctttcgttccttttcagcggaacacgaagtcccacgaccctttgcttccctgactatccctctgttttctaatggattttatatagcatccacgtgaacatgattggagtaacggagtgagaagcacgcagccacagcgagcgttcctcgaaccatgagatcgcgttcccctgtttcttccatttccttctacgtttctcagggacctgggatattcgagcaaatcgaaaaagaggcactgaatattatgccagatttccgaacaggctttcatcttctgtttttctgaccctctttcgaggaaagctgccctctgtttaacgtgctcgacatgctgcatcctcggcgtcaggatatccaaattcgccgtgataactcatgcgcagagataacacgcattcgcatttcgagaaatggaaatgttcatgtgtaacgagctcgaaaatctgaccgttttattctgtcgcggtgaatgtagacttcctcgagcatttggtctaggggcacgctgcatgacactcgcacgtaaaaccatgtcggcggcatctgatcggagaacatgacgacggcaaggaagagagtctagacaacgaaaaagcaacaagtagagaaaacggcttcgtgtgtgccctaaaggtccttgcaaaacactgaatgattgcctaagtcagtatgtctttggtatgtttctcctgcattctgcctcatcctctgttttcactgatacgtcattgcataaaggaaggtgctgctgaattttagttctcactgttccctggaaaggtttcgtttatggcattcgactaaccgtaaacctcagtgccttacgcacctgcttaccatgagggagagacatttcgctggaagctagcagcctcgaggtcctccagtgacacacgaccgtctctgtctctgcggaaagttcagcagcaacacccacctatgtgtcttggataccatgaatttcacagggtatacggactgatgaagacacaaagtacgtctgttacacggactggcacagcctcaggggaacctcagatgcgcgtgtgcatctccgtttggcagtcaaacagcatacaagcgattttggcgaccgaaaggaaaatctttgtactccttggcatctcagaagtggcagtgaaaccggcactaacaacaagcgaaaaaagctggggtagtgtacgcgtgtaaccaacccgctagaaaggtgcaacgcacacacgaatactgtatggtgttttcgattccgtgtattgggagacacgaacaacagcagtttccgtgactgtctcgttgagatcgcccaccggagtatttctcagaaatttcgcgactttcatacatcgtgtggtaggcatgtacaacaggtaaatatttgtactttgcggatgcggcgagtggggttggtggtacagctctacagatgcggcagccatatcgtaggtatggaggttgaatcaccgttgtaagtcctttggcttgtctaaacgtgtaacatttaaagcggtgcttgctcagatgcagcttccggaccaacagtgtccacatggtggaaactatgtcaagtgcagatatttttcaatgctgctgtgcggttactgaggaacttcgataggaagaccgacgatgacacaatgtcattcggtgccttttccactcgcgatgccaaccacattgccgtttgttttagcccacggaggccgtcttaaccgtcgtagatgaagatttcaattgaaatgtgtttttggactcaagaagggctagtacctactgggactcctagaaggcccacactctacaacggaagcgcttcttaagatattcagatgcttgagaaaacggcttttttcccaggtggcaaaggagagccccgtctaatctcgcctacaaacaggacgactaaaggcgaaatggcctcaccggtcgaccccgcgaaaaaacgtatcgatcgcgcgggcgactcgagcctctagatctgcttttctgcaggcgaacacatgggaattcgtcagccgtttctggtggcgttgtgctgtttagaagtcgtctctcctaccacttcagaacagcggataaaagggtgatggatactgaagacgatgagacacatcatcagacacgcagatatgggtgcgagttgtttcttccaaggcattccgtgaccgacacgaagactctacagagcgatctgcgtcctcgtaattacacagtggattcttttgatgtactgcgataccaatcggtggagtcaccacaactgagcagcttctgttttcaagcaacatccccagtgtactgtgtcggaatcagaagcatatgcttaacgagcaaacggctgcaggcagaggtgaagagagggccgaatgcttacagggcaagagtgtactggaagatacgaaggagtgttttagactcgttactccctttatttccctttcttcctttgcctctggttaggttgatggtccccgccgtcttctggctacgtctttcctccatgccattgttctgtgccgacatcatatgggcagaccgtttcgagcgtatctcttgttcttgcctgttttatgagaatcactggaaggagcataccgtttctgtttctcttctcgcgacctgtcgaaacaaccctcatgccgtcgcttcagcgcctcacatagcctgatgcgtctttcttcttgtctgtcgtggctcacgtcctcctccatcgttggacaaagcttacgaatacctgaggttttctgctacattcgagattgcccagcataccctgagggagaacgcggaggcctttgtgtgtgtgtgtgcggcagtttctagtgtcttccacggaggcgaaggcaaaaacgtttgaggcacactgggctgcagaaacaatcgattggtaggtatatccggttctggataaagatgctccgtattggacagcaattcatcgaaggagacacgcgacctcgctgtgtgagacgtaaacaacagtcccagcctcgtccgtttcacgtccgaccattaaccaccgggcaaggatgaatatcatgagttgcgtgtgggttttgtgattcaaacaaggatacagtttagggacttgctgatattgggaaaagctgaagaggccaggaacaacaagagtgagacagggagggttgatttacacaactatgtggggcgctggcccacaactcaccgtcgaaaatggattctcgtaaatgtgacaaaagtacgccacaatggatatagctacaaattcttgtaagacatacacttaatgacgacccacctttctagagccgcacttggaaatgcagaacaccggaatgtcaagtgcgaattccctttaataaaaaccagctggtgctgccgcacactcgaagtttgctaaactcactcgaatgtggcccgctagccctgcatcgtcttatgaatcgatcatcggtttcaatttgaagtctggcaaagagtggtctatgcgttgagttccatttggtctttgtaactcgtagatgctctactgtactgatactcacgccaacgtcttttgatatgaagcgccacactgagtctgaaggttgttctttgtgtccaccacacaagggtgcgcagcttccgtcaaggccggtttctatactcaggttctgggatggaatgtatgaaaacagtcacggaagtcgcaccatatgcttttcctgttcccttccatttccaaagctgtatctttacggttcacagtgaacaacaa

SEQ ID NO: 471 - DNA, 3369 bp, Toxoplasma gondii
  source 1..3369: mol_type = genomic DNA
cctctttctcccttggtcttcgcgacttaggaaagagaagaccagtagccgtcttcatcttatttcacttcaaagaggtaggcaatctgttgtgtggctttgtccgcttccgtcctttttttctcttgaaggagtcaggtgcagtttcgtggggctctttgcatcgccatggagagctggagacgtcttgatacttttcttgtaactctgttcacggaaatcagaagaatgcttacatggtttataacgccccttgcatcttgggcactctcgccagaggaggaagcggatgacgaacgagatttacgcgcatgctttcaagcattagacgtctttacacgttccttggtttggaacaagcattttatctagatgcgtcttgagattactcagcttcacatgaacaccatccagacgaacatccgtgagggttctgcgtcattttttcacttctcgtttctcatttaaacaagaaagtcctgtttcgccgctccctgtctttccactttcctagactcgggtgggcttttctttccatctcgtttcgttccacatcccctgctcttcagttggttctcaaactcttttctgctgcatgccttcccctatctctgcgacttgtgtcacttcagacgacccttttcccgcgttcctcttcgccgttcttctcatcgagtcgccttccctttctcttgaatccatcgagtcctgttatcacgcatatcgacagaattcagtagacggaacctgcgctagacaggtacgttcatttgtgtctctcgtgtctacccgtcctttctgcattctccggctgagaaacttccacatttccgcgctctcctcttgctctcttatgtcttcgtacgtgtctcttttccttttctgcacggtgtttcgctctcgcgtccccggtttctctgtcctcgccttctgcgcccctgaagcctacaaagtgcccgatgcgcagtcacgttgttgggatgtcgcacatgcgtaactccgaccctggtcgttgccttagaacgttcagtggagttccgttgtccggtctgttcctcgccttcccgtctcctgcctcccgttttcgaagtctcctgtcgtcaccgcaacgtaaggccctttccgacgcactgtgctttctagccaccgtctgaagagcgctatggaggtcgcgcctctcacttggagccgcggtgaacgagaagcggagagccaggataaatggcggaagaatggcggggaaatccgttaataaatgactgaaaaaagggacctgcgacgggaggcggccgttggacaagccggcacgaatgcaagcacaagagcacttggacacagtgaacgacgtccctcaaaatctaagcaggagtcgaactggtagggtctacaatctcagaaaatgtctgcaaaaagccagtctcagagcggccttttccaggacgatgggaccggcacctgagcgacttccgtccagagttgagtcaaaggtcacagcgggcagcatgtctcaactgaaaggaagaaaggaagtgccgccccctttgaaagcccttagatgagacgaatgagaccggaaatggaaccgcgcttccaatccgtttctaagtagagagaacagatctgtcttcaccgatgttctgccaccttgaacgcaagtccaccgcgcacgcgagcaagctgtcctcgcggtgggtttgaccgacaagtctgcccgcgtaatgtaggttttctttgtgtttgctctcaacgtcgctcgcacagagtctctctttctctctcgatgcgtcgtttgcaactcggatctgttttcccttgtctcctcaccgcgcgttggccgctgtgtctaggcggcgccgacactcctctcgattgtccacgagctgcaggctgtgggcgcgtatttctggagtgccttttcgacgaaaaggaaacctggaggagacacgccggagagaatgacctttaccctttctcttctgaccaaagactttatttttacctttctcgtctcccctaagcctctcacactaacatgtgtacgaggactcgcaggcacacgcctagcggactgactcggcttccgcatcaacacacgcagacagaaagaagcaaagagcgaaggtactccacaacaccgcgagaagaaggacgaagagggattgggaggacaggcgctcgcacaattgtggtcatctggaaaggaagagcattcttcggaaacagctttctccgttgcatggggaaacagctggctacatggcccctcgtgagtcgagggcgccgccaatcctctgctgggggaggggttggccatttctgtcgtgaaggattggctctgttgtagaggcgctctttgcatgcagtggaaaacctctttctcattggacagttaactccccgatggcgaaacggaagggatattttctcttgtcatatgcgtgggcaggtttctctcttggggaatgccccgaaggaagaaacgacatgcgtgacctcgatgctctttgagagggcgtagaggagaccgtcgcggtcccgctgtttctctccccgggggtcaagccggggagatcttttgttctcaaacaacagacactttcgcctttcttctcgcgcgttttatcaaggattccggccaccgtccacagtgtacgctcaaaatccgtccgccggggtccctcgtttcctccgcctcacatttgaggggaaatgcattgatttgtcgcagcactctctgcttactcggatcgtctttcgaggcctttgtttttctcatcttcctcaaatctgtgtcatttctgcgctgtcctgccatcttcccctgcccgtcgttgtcgcagccaccgccccccaagctgtccacacctggggttgttccgggagttcgatgcagggaaaacttccttgtcttctcttccttcgttgtttccgttattcgtctccacttctgctgtgctctggtccttcttccttcgctccacgcatcgtcagtgcagtctcgtcgatcgacaggctcgagaagcagcgcaaaaaccccgggtgtgtgtcacgctccgccactttgcctgtgctgttcgttttccccatttttttctccgtctagcgtcgaacgagtcctgcagaaacatctggcgcttggcgcaggagcaaggggatggcggctgtgctgagtgaggcaaggactggctactgacttctctcttcagcagctatgtacacacgtaatacgaaaactaccagtcaggcggggaaggaaaaggaaagtagaaagtccgcggtgcaagagggagcgctccaaagtcgagcgcggagggtggaaggctgattttttttttccgaaatttctcggtttttaagtgctctctaaaa

SEQ ID NO: 472 - DNA, 2047 bp, Toxoplasma gondii
  source 1..2047: mol_type = genomic DNA
atgactgtcgttcatcagaaatttccagctgtttctggaagcagaaacgcggtgcgtctctcccgcacatggaacacactctgaagctgtcgccgcctacgcatgcgttttttttgagcttcttagagacaggggatagcttgacagaacaatcattcagaggcagacgattgctcgaccaagcaaaagatttgggacacaaagagaggcttcctcgtcgctaataagaaacgaagtggccagatgaagacacaaacagttcatgtgtgacatccagcgacggccttacagacacaaggaaaaagagtgttgaggcggatcagagaggaatatatatatatatatatatatatctgagatagagagaaagaggaaacatgtagagagaggcattggagaatgtatatatatatatatatatatatatatatatatttgtccggtagagacaagtagaggtagatatatgtatatgtactgtatatatgtcgtatatctagagaaaagcggatagagatagaaaggaatatccgtttttcagacatatagagagccgggtggagagagatgggcaagagaggtagaaatgtgacatcagacagagacggagagctggacagacaagtcgagagagagagagatggacatagagacgaagagagaccacgacaacactctattgagagttcctgggcgccagagaggtagagggaaggcgatgttaagacgaggtgttttcaattagttcgaaggaaagcctttttctagagatgcatgcagtttggaattacagcgctaaagcgtcaccctcctcctccgtagttcaaccttctctggagaggaagacgttgtgagattcgaaagaattctcctctctgtctcatcacacgcagagaagagaagaaacggcgaagccggaagacttacttcacttcaactttagaaaccagaagtggatggctgcttttcgtcaacacaaagggcagtcgcacattgccctccttctccgtagatctacctacaccgatcgatcgccatcgacgcacacatttaaagtccgtaactagctaccaaatcgctctccctatataaacgaactgaaaatacgttgtgagtatgcgtgtgtctctcattttctcattatacttgtccgcgcttctctctctctcggtgcttcctatctgccctctctcttctcgttccggtttttctgcttgtctttgggcctccgcgctgctatctaggcttccgcaggagggcgcagaaggaggcgggagaggcggacagtggaggacgagtaaagacgactgtttggtactgttttttctcactctctgaacttcacaagatccccgaagaaccgctttcacgtctcgtccagcacgaggtgaagaggaccgttcctgggagacgttcagggaacggagagagagctgcgggaagaaaagatgcccgacagcgtagacgcttcttccccgaatgtgcgattttccggtatatgtttcaagagtctgttctttgttttttaatttcctggaacgttggctcgaaaaacggtgtgcgacggcctcgcctttcttctctccttttcggtgttcttctctctttgtccctttctcgtcccccagtttctccttctctcgcttttttgagtatcgatcgactgaagtgtgtaaggtgtatatacagctcagagtcgcgtgaattttcaccaagtttctgcccccaaagtttcgtttcctcgtccctcttccgcctcccctgcgtgcgactcacctccacacagagagacctctcctcgcagattcacgcggcaccacagcgggaacgtcttgtgtgtcgagcctgcaaacgaggctctttcgattgcatgcagttccacggaaaccacagacagcgaagagaaggttcccgacatgtgcagctcctctgaaggctgacttgaaggcagacagaccctcttctctgcaagacagaacgaagcggctctcgagatctgaacgatatcagcagaaggaagacagaggacagagcctcgtgaggaaaa

SEQ ID NO: 473 - DNA, 3941 bp, Toxoplasma gondii
  source 1..3941: mol_type = genomic DNA
gaaaaagaagccagccgcgccagcagtctcgcagttgaacgtggaagaagactttccttcgattcgcgcgcatgccgaaggctgtggggcttgggatgattctccagactttcgccttctctctcggtctggacactgggcggacttctcgtgtctgtcttccctgtctcgctgtctccttccctccgaaaaagagcgaaaagaagagagagacccccgggagtgagcatgcgtcctcgccggcgccggaggtcgcgagcggatgcgcgggaggccgtctagtgaacagacactgcggcggccggtgactctaagcgaactgaccgcgaaaggcaagacgacaagcgagaggaggaagaagcagagcacggcaaacaacacagaagacagcacaagtctcgtttttaaagggtgaacaggagcatggcgacacgctgcctccgagacggaagggcgccttcggcagccgcccgctggtctttcgaaaggtggaagcgtccttgacggggacgaagagaaaacatgaaagtaggagagacagcacggacacacgcatgccatccatgctcccttgaaagggatttgccatgttcgtctacacccttgctttctcatcgtgttgactttctgacaacctacacagctgccgtcgccagcccgtcggaaaagcgccctccagattctcccacagttttcatccttgttatcattttatagagtgctaggccattcgtttaacttttgcctttttcctcccgtgaagccgctgtacacgtaccccgaaggcgcggtctctgctcggcgtgacttcagtcgggaaggctgccgccaaaacagcccattgttccgcacagagacccgagagatgcaccggatggttattgggaagaaacgaccctccagttctactccaaaaatctggggaaatgcaccctgtttagtcgaaaaaacgcgatgtgacggcgggtcgcgtctgtcggatggtgacgagacggagcgtatgcgccatttcgaacgacagtccagtcaagacggaacgcgaaaaaacggtgttcagagattcgttccgttcaaaaggacagacacaccggtctctacatttcccgactcttttggaagtggtatgggtcgggaagttcaagattgagatggagctctgctttccggcgttcctaggttcgcgcgtcaaagcagtggacccgtccgttctctgctagcgagtgaaaggcgctcttttcacttccagaagcgatctggaagaggttgaagtgaaagcaaacttgtggcttttctcgtaaggatatcgcggccaactagcgggagacatttgatctatggtcacacactgacgggacactgcgcgttcgagggtcctgcaagcggcgcagtccagccgtttaaacacgactttctccggcagagagtggattatgttctaggcattgaggttcctctctgaggggaagcttcttcagagatgcagacactttctgaaaccctcctccttgtcgaccaatgcatgcagggacagtgtgcatgcatgtacctggaagacccaacgcgtcgatgacgcataccgttctgcgcagtcagtcgtaacgggtgttcttattttcgacgaggatccttctgtagagttcctctacatagctcactcgttcagttctccgttagcgagcctccgggacgacttctactttcagaacgtcaactggaatacctgcttcaagcgttttccgtcgtgatacagatcagaaatgtgttgagtatcctcgacatgaaggttattccacatcggttatgttctaggctaaatgatcacctaaagcttaatagcgatgccatcttctagtgtccgaagagaatacaggaagacgaacgcatgtaaacgaggctcaagcgcacggatcgtcacgtcacaagcagacatcacgattctagacttgaatttcttcgtcagacaacagtggttctttcatgtcttttcttttgattaagctcctcaagcatccttctttcagtgagcagaccgtcgctactttttctagtggtcttcactctacaagaggcaacaacgtgtgcgacttcgttattgaactggcaacgaaaaaaaagaaccgcacaccgatctcggaggcgctgagctgaaggcattaccgtgcggtcgacatggcttttatgaagactggtcagcgtccacttcagcgagaagcgatgccatgtgctggcttcggttcttttgctgtagtccagcaaatccccgactgatctctacaggattttggtgtcgccatcttaggccaactgcgccgctcaagcgttctctatgtatgctggagacgatgttcgctctttctccggtccaggaactgaaaaaacatggtagtctccagaacgtgagtagagactgtacggggttgtttacggacctaaagcacatgatactttcatggtttccgctgttcttcggagtccttttctgtaagaactggcgactcacgactttgatggcacatgcagatgaatttgccgaagaatcgaggagtcaggttcccagaagcaagaaggcatcctgccgaagaatcccaactcgggctttccgtcctgcatctgatgagcatcagcgatggagcacaactttcacggttgcagtttccaggaatgggaagaggtgttgtcatgtctctcgatgtccagtaagaaaaacgtgcatcgatcttgaaagaggcgaacaaacgggactttccgtttatctgtagagcgggtggaaaggccgacacatgtttccccgacgttctgcttcgacagaaaaaccatgttcacccatttttgggaaagtgcttctctgcgctgccggagaaatccgtctttcccagttgtcttcccccttgtcaccgcggattgtcttgacgtacacaaaacggaccccgtggccggatgggaccgtcttgcgtgggtgctggaaaagcgtactacccagaacgaatacgaggtcctcccggtgtgatcagggagctctgtttgtcgagtccgaagtcctaagatgaacatgtgactctacacagggtcttctactcctctctttggtgaaacacaagaagaagttggccacattctcctcgttgcatgcccgatttagccagaccacgtactgttcgtatcacactgcaaacatatagggtccctaccacacagacgatccacgatccagaactgcgtgactcagatcgaataagacgggttttcctcaaaaaaactgcccataagccaaatctaatctctgcagctcctcctatggttccttcctctttattgtttctgtgcacgaactctttctgtctttcgatgtaaaacagagccactggtgaggttgccccgacgagaggtctcgggatcggatttgtataatgtttccttctatacctgactacttacttgggatctgaccagaagatttcacagtggcaataggaaacaggaaatcgcgttcattaccgggaaaacgactagccacattctagtggttttcttccgtttcctttctactgcagattcgactggcgacgtctccattttcctgtaaatgctttcagctgttcttgacgagccgcaagaagaaacaggctgcgagctgttgtttgaggtggttccagtgctgcttttttacgaaagcgtttgcatcctgacgtttgtgaacagagacgaggaggcttttatgcttgcgtcgctgtctcggcgacacgtgtactaaagagttctctcacgggaaacatcatcgggcacaagctaaagtttactctcgcggcgagtgattggcggtagagcgtgatcgtgagcgcgaggcgagctgctctgtttctttgggggaatttcgagtgcgcgacatttccggagctagccgttttctccccagcagttttcgaccctttgcggacgcgaca

SEQ ID NO: 474 - DNA, 3926 bp, Toxoplasma gondii
  source 1..3926: mol_type = genomic DNA
ttttgtgaggccacattgcggactcccttccactttgaatgatgtgaaaccgcgacaggacctgttcgcgtttctcgcttctggctctcgccctcgcagtcttccgcgctggacagtgcctccgggggtacagcggactgtcgtccgcctaacgctctttccaacgcagaaaggcatgaaagtggagagggattatatgaccatgggaggagagaggacgaaaaagctggagagacaggagtgacacataaaggagaagctgaacggcaagcagaggcaagacctagattcggggcaacacccgcagggctaagaccagacgaatctgacacctgtggccagggtaaagagcatcctttgccgtgacaaaaaactgccttaggagtgttcagtagtaatagagagtcagcaattcctggtaacgccgaacgacgcagggacagggagtggaaggaagagagagaacgagtgagctgaacaaccgggaaacgcttaggtcttttcggcaagaagtttgaggaagtgagagatagaagtgtgctatggatgaaaagctcaactgaattgtgtatccccgtagaacagtgggcaggcatgcgtgaatatctcttctgacacgcaacagctacaggtgaagcgactgaacacagtgaagaagagggaggaagacaaggggagctatgtatgtgtcgcagattggaggactgtagaaaagatgtccatgatatgatagaaaagatggaaaagctgagagcagtctctaactgtcctacagctgacgcagaccctccaggctcacacccagcgtcgacctgggacagcggtgtgtccggagtcggaggccgccgtggaaaagggaaaaacggctttgatccaaaagcttgtttttgttcagaagaggaatcacgtagacggtggagcggaacatttcgctcgattgctgtgaaggacctggtcaaggtccgcggacacggtcgagaagcggcagggttgctgcagggccagaagacagagagaaaatgagagtcgacaaggagaggaaaaacaatgaagaagacagctccgacggtcggcaagcaccgagcgaaagaacgacccattaaacgccaaatagagatagcccagagggaaaaactgtcagccatcagggcaacaacatatttggtagccatatacgcgtgtgcggcttgtgcatcgcatgtggcagcagtggtcaccgatgcctaaacggcggaggtgaaacagacgaatagtggaagaacctggccttttagaagcaatatgaatcaagaaagcataaatcttatcataaaaaagatgcgtcgtcttattgccaatggatctcgcttggtggagaccaggagacaccagagacacacaaacggtgtttgctagaaaaccccactctcggtgggcacctgtcggcgctgaagaaatgtgcaggtgaaccgacttcaaaagagatgtgcacgggaacctcactatagtgaaggatacgaaacaggaatatctatgtctttggaagtagacgcacctgtcaccgcaaggatgacaggacaccagtgaatggggggacgagagctggagacacagcccgctggacataggtccagctactaggtggattgtttgtcagaaatgttcgttcacttacaccacaagcttcagttacttctccctttcctgatctagacatcgggaaacaaagaaacgcagtcggccctgcgcatagtccacctgtgaaatcgtgcgacgcggtgggaggctcgcagggcctggtagcggcccgggcgagcatgaagctgcaaacagaggctgactcaaagaatctcagagcatgcttgcgggttctttcattctggacactgtaggcacacttcttcaactgacaatcttgatggagattaaaatatggcgccgccaaagtagacttttccactttcaatgcttagccatcctgcttgatctgtcatgcccagagtcgctgaggccgaaaataccgagacgaagggctaactgtcttacacaggtgtcagacatatcgcgtcagttggtatatgaacacatgaaccacgtccgtgaggagggggaaccccagagggcatcctcggtggcttcgctttaaccgtatacaaccttgccaagagataactccacacgtttggtggtacgttgtgcttctggctctttcattgtgaaccagttagttagcaagcgatgttactacctcgtgcatgctgaagtcgccctgttgctgcacaggccactctgtccgcaaggccggtcccgactgcgaattgtgcctgtactgcctgacctggtcaccatgggaagtgggtatgagaagtcctattgtttctgccatgcggggcgatactgttatcgtcaacactacatttagatcaacgagaactagacttcactaactagcccttcagcagcgcagtaatgctagcgtggcagcagtcggaatgacgtgacggttctcttcggggttttctagctcaaaacgacgatgttaacatttttggttgtaaacagactaaacgtgttcgtgttgacagcgtgacgtcgaatatggtctcttcaggggcaacctctactccctaaaatgtgcaagccgctacgggaaaaaatagttcgagttgcaggtgcgagaagcctgaacactttcgaggacgagatggtaagaaaactaacttctccatggtatctttaactatgtcgaagaaaaacatcaaaacatcgaaccatgtccccacggcgtgtggttcagccagagtcactattggcgtgttcggcctttcagtgactatcatccaggatgctcgctcgttttcactaacggcatcttcgaacagtgatcctcccattcccgaagtctgttgagcagtgctcgtttcttttgtctcttggtgagcttgactcagataaatggaggcgtggcggttagcgtgacggatactctctggatgattagtatggaactctgcatctcgaacaattgcgacgaaggaacaatctgacgaaaaacgagtgtgaagtgtggcctggaagtctctgtgttacacatcatgccataagacaagcgctcaatgtcattttggcattgattatgtgtgtgctcggttactacagtcgactcttttgcgctggcacagaacactttcgttgtttgcagtagtaggtcctccagggacgatatatcgaacgcaacagtaacaacaatgatcactcaggtagtatgaatttcactatttcgcttctgctaggagtgtgagtctacacggcttcacattccacggtttacagggatagatatatgctggtgacgagtccgacctcagagtggatagttgaaaccttgacggttctccacatttctgttgcgacggcaagtacatctcagatatactccactcaagtaacagttttatagggggatttcgggcgcactaccgaaggtagaaactcatgggaaacgaagagtgctgttcgtctccgatcgagaggagctacgcgaaatgtgtgtgcagcgtgcggttctcctgttcgggtgcacccgcttcgttggagggtagcgttgtttgaatattgggacgggtattcttgaaccgacacgtctcgtctttgtttaaggcatggtcccgtttcgcgctcgcaggtaggcgaccaagcgatctccgaagcaagcgatttttcgtgctgagtgaattgaaccacgcagctgtggggcccggaatacgggccggcagctgcaccaggttccttcgggttctcgtctagttcaccgtggacgtacaacacaggtgcatccatctgtagcactacacaactaacattttattctctgcaggaaacgaaggtgcaaacctcgctcgacaattgaatcgacttattgttaccacgacccccatttttcaaga

SEQ ID NO: 475 - DNA, 1949 bp, Toxoplasma gondii
  source 1..1949: mol_type = genomic DNA
aatgcccacgcaatttgcaatgcctgggctctctcctccgggcaaccgcttgccacccttcgttctctcgccagttttcagaagcgattcatatgcttgtgggtggcaactgaatgcgcctgtgctgaccatgacatccattgcctgtttccttgatacgttctgttcgtagtcattcagctgttggtgccgtccttccccttcagttggtacaccttgagctctcaatagcagtgtaactgcgtctctgagggatgatatgacatccaagctggtcaaaaacgcctcctctaaagaagagaaagacgacagagaagatcccagttttgcttcggttgctcgattatccgcttcgtcgtgggcttgaaggcctccttcaggcatgtcttcctcgcacgcgaacggaagggcgtcttcccgcccgccggaactcagaaaattttcatgcttatcattcctctgatttgctatcgcttgttctctcgaccagtctaccatgtcaccggcctccgtacagtgtcctccatcgtgcaccttcgaagaagagcgcgcatgctgctcaggcagtctaccgtcagcctcttccggctgccgaccctctctttccgtgggtatcatggtaatttgaatacctctggatttgctgtagtcgtcagggggccgatcgaaaacatccgtcattgacaggaccagcgcacgcgtgagccttgacggtgagcttattatcaaggctcctgtctacatcattccctttgcagtttcccccaatctagttgtttgtcccgtataaccgtcggcaatctcgctcctttctcggaacggatgtcgtagtgggtaacccctgtatcaccctcctcgtggcttgagagaaactctgcgttcaatgcataggtttgtttgccaacacagccgctttcattgacctgaaggaaagggtttctctgagaactcgtaaaaatgacgttgggcattccacaatgtacacttggtcctggaaaggataccgtctggtaggtcagacacatcgagacaagctatgatttttcggatgcgacattcgtttgacgacggaacttcccgtcacgttggctgcaagcgagtctgtcgaaattctgtagaaagtgcccagagaaaaattgttgccagggcaaccgtataaaccgctggaatttttctttggatgaaaccggagggtaaggaatcgcgcgcttgatcatctgcatgcctgctgatatgtctcccaacagtgtgacgtgcacgaatttgtttgcccactcccgccgggtcggtccggaaaagttacaacgaagccattgattcctactgctcgagtgtttagttaaggacctggcaatgaaggcaatcctctctcgtctgaaaagaaagctcactattgctagaggtaacgaacgcgcatgagcttctcgcgtgcagaccattccgacctctggcatagcgtcgagtcgacctctcaatcgccgccaatcagacttaggaaggcggtgccttccgacagtgcgttttctcgctagcgattaaggttgaaaccacatttcaggttcttaaacgaaaagtaaaacggcgtttgattgtgtccattgaatctatgctgtgtacttgcgggaatgtctgtgaatagcctcgggaaacagtagcatgagactgccgcgcttgggtcgtcattcctcgccgatgaaggacgtccctaccgcgaaagagctggtcacccgctgtgtattactcaaacgaaactgtataagagtacctttatggcgtattgtgagtccctcaacatctcatcgctgttttattagtaactcactctctcgtagtccactttcgtagaccgccgcagcggtttctgtgagacttggttcgtctcgtgtgcggcggttggtgtgcgtctcgattgcgctggctgagagtcacttgtttgagaagtagcaaaa

SEQ ID NO: 476 - DNA, 2846 bp, Toxoplasma gondii
  source 1..2846: mol_type = genomic DNA
gacacacgagttgaggacggaggcctcgcatgcagtcacatatgccactggactcatgtggaccgaggcaccctccacgtccgagttaagttccaaaagctcgcgcaccatgctggctgcgcgtgccttgccgaggtcaccagggctgagcatcgtattgtggaggtcggagcgcgtcacgtgggcatcgtcgataatcacgaaccgccgaatgccgggcaaaacaagattctttagaacctcgccagccacagcggatgatcccaaaacgagaacggatgcggctctgagctcattttggccatgttcaccccaaatacgaatctgacggtcatagcggtccgctgaggtacccgcagaggctgaacgcgtgccactggatttaggcaatccaccaccaacggactccatcttttcgagttccccctttggttcggaataatccgggaaacccattcaaagatgcggccctttacggatcagaggcagcaggctccctccggaagaagcgtgtcttcacagccaaggacgccgcttgcagtgcgtgccttttcgggacgcggtgagtcgcccgaatttgaacgacgtgcaattccccttcttcagacacggacacagcgaaccaatttcttctttaacacagcattatctccgctggtgccaacgcagagctcatccccatcgaagacgttcctgagaatagcacaaactcctgcctgttttcagtttctctacactatcacgcccagagtgtcatgacactggcggaagggggaaccgtccaaggatccgcgcacatcgccaccagctcacagagttccctctcttccaatgcttaggaaagacgagaggacatgagtttctgcatctctcttccggaccccccgaattcgaacgaaatcaactgcgattggtgacagccgccatttttgtggaggcgtcgtggtcagaaattccttctagcccggtatgaggagccacgtgcgtacaccgatggagagaactgctcgatagtgtgcagcaaaagacagttggaataatgcagaagagacactgacagagatgcgtacggtgttttacagagaacactgcagtgcctctgcttctattcacagtaaacttcacgtatccacatcctcagatgacgaggaaggcgatcccaagtggtatcggatgtgtgttgtccagatgatgatcggcgcggggaaggaatggcttaaaacacgaccacgagaacgcgtgttggcgattctacaagcgcagaacggtgacttggcggagaaaagcaactccagtgcacaacgcgtcccaagacactcagtgttcagtattgttcatggatcttctgcgaatctcctcgcgttagcgggattgtctgagacagggacacacatgacaatgaagcacgcgcagaaaaaacgcagcttgcttcgcgtgacttcgaaccacgggcagagcctgcggcttctatcgagtgtgcaagcgtggttcttcttcggtgttcgctgtgtgtagttgccaaatggatttgaagctgaaactttactggcttacacggctacgaccgggcagggccgacactgccgagacttcgatggatgcgtcattcttaagaagaaacagatctccaccacgtgacaaccttcagacgaaaacggtagatgcagagacgcagcccgtgcatgcgaggtgccaggaggcggtgcatcgctcacctggcggttcaggtggggtgtcacggcgaaaagcttggtctcaacagatttccaagaacctgggaaatacgagcccgttcgtcctgtgcctgtccgaaaccctcatctacctttcatacaagctttgaaaggaatgtctctcacagactcatccagcgtggtgaggtgaacttgagcgcaccgcagcagccgagagtctgccaaactgtactcctgctggctgtctgcatcactttttgactggtgtgtcctgctcatctgctcgcttgtacatcggactgcttgctttttttacgctttcccttcgcaagaagagttgaatactggcctgatttttcggcaatctacttcaatgtacgctgcagcgattgtgtgtttctgttacgagttgtctaaaagaaagtgtccgcgggcaagagttccggcggtccgcagagtcgtgagaaagtcgcaacccatgcggtgcgcgtagagacgtaaaacggaagaagcccataccggtgtttcgacgtttttgaaagactcccgattgccagttgtgtattgggatttttggtgggtaagatatgctggacaaacatctgatattttattttcttggacggggctgccggctctgcgggggcatccccttttcaacgtagacgccataacgggaacaccgggtacatcccctgtcagttttttacagctgtatccctcaggccattttactgggttacagtagtcgttgggagtactgtttacggtcttgccggtacattttatccgtcgggaccgtgtgtctctctgccgcaagtgtgtaggacggagacagacggagaccggttttcggcgctccgaacgaggctctctgtatgccggagctggccagttttggtatgctgttttttgcagcaaccgcgcctgtgatcagaagcgtctgctgtgactgggcgatatttgcgtgactcggttgagtcttcgtttcgtgacccgtgcgtggtagcgtattcaccctcgaaattttttcgaacccatccgcgtggccactgtgtttgtgttggactcaccagacagtgaggaacattagggttttggcccctttctcccgccaacttccctttggttgtatgttagtgtgaggaaaca

SEQ ID NO: 477 - DNA, 2000 bp, Toxoplasma gondii
  source 1..2000: mol_type = genomic DNA
ttgtttttctccacctgtttccttcatttctcttctcgttgtattgatttctctgcccgttgaacgctgcttgagttgcttcgattcagagacattcgacactgtttctggtacaatccagagaactgcgttcccggcggtcacacccagacttcttggagaacatctgctctccttttgagagcctcgtcctctgcgcttctctcctttcttctctccgtcgttctctgcgctctttccttcccccctcgtgaagctctgctcacctttcatcgcgaatcacgacggggagtttcttctgttggaagcggtttctgccctgtcgaagctcgaggctcgcgcgcagccggtcgaggcgcgcagagcagtaccttctgtatcgcagaaagtcaccgtgacggagaccattcgcctctctcctctcctccacgtatagcgagagcgagagcgagaaggagcgaaacgcaccctcaggcctctccgcctccagagcctcggccatcttctcgctcggacgagaaatcaaggacgaagaagactgagggaggaagagagaggagacgaagcgagcgaagaggaagacgaagcgaaagaaaagaagaggaaggagaggagaaaaaactgcttttgtgtgaacagagacgcggaagaagagaaggactgcacatgcgcaaggaagacgactaaggccagacacggcgtaaaacaataagagagagacaccagatattagagagttgcgataagaaggcgccctgggcgaacaaagtggagaggaatacgtctcgagacgagaggagaaggcggaaaaagcctccctgtacagacacccccgatgaacaacagcagaagccaagtgaacaaggcgcgtttcttgctctcgaaacttcttccctgtccgctgcagcgcagagagacagcccaggttttgtgctctccccacaaacgcagggactcgctgtctttcttgcctgtttttcgcttctctttgcccgctcacattcttcccccggaaaacacagaaagaagagggcagaggcaattcaacaggatctcctcggctgctccgcgtctgccgctttctggacgacagcgctttccagaatcttttcgcagaaacgagagaagacaggccgctgagcgctgaggaccgcgagagagccttgtcgacgaactcatccctgctcacagttcctttttctcgccttcctacatccccctcgcctccttctggaagtctcgcttaacctttcgctgggagttcgaaacggagaagaacgcgcgggtgcgaagtctcctcgataatctcgagcggagcctcgagttcgctgtcgagcaaacgagaaagaacacaagctgtctcgccccaggcggcacacacggccggtgacgctgcaaggctttgggaggctgcggcgcatgcagtttttttgaaaaatatgagcaagagagtcaaggcgggacgaggtggtgcttcgtgaaagactttctctgcagttcttttctgtccgttttagttgtctcccggcctcttggttgtctccctttctggagaaacgtgactttctcgtcttcgtctctcgggtgtacatacacctcacggcggactgttcccgccccaaattcgcggatttgaaagcttcctcgcattttttccatctgccgcatctcccactcttccccgtcttccgttcttctctctttctcgtcctctgtcgcgcgaatatctctcgcgtttcagaagactcccgcgcctctccccgtacacaccgtaaaacacagacccccccctgtctctaccttctctctccctttcctgctcttccgctcctgtttctttcgttttccgtctttctctttctcctcttcggattccttctctctatctcgacggctcccgttcccatcccgctgttctcgcattcgttccgtcctctcgcgaggccttccctgaacaggcgtccggccgcgttcttctctcgatttccgctcttccacga

SEQ ID NO: 478 - DNA, 2045 bp, Toxoplasma gondii
  source 1..2045: mol_type = genomic DNA
gaggtcgaggcgactgagtctccggaagacacgattggctgcgtataggccgagccgccgacgcttcggcgcgagacgccccaaccacttgcatgcgacgcgtatggagccgccgatgacgcgttgctttgtgcctggagactgttggacctcacaagagtcgcagaggatgcgacaagatgcgcagaagcgactgaggcgagagagactccaggaaaggaggaagaagccgtaggctcgagggaggaaagaaacgcaggatacgcgctttctgccaccaccgtggaggccggctgctcggaagccgccgctgcgtgtgaaacgccggccaccggcaccgtcgacatgtaagctacaggaagcattttgaaaatgaaagggaagagaaggaaggggaggcggacgccgagagaaagacggaaaaacagtagagtggagaaaggcggaaataagagacgggagcagaaggccagatgacagacgtggaagagagaggtgcaaacagcgagatccgaaagggcacttgaaaacaagggagactggaagaaagaaggatgcacacgaggcagagaggagggaagctcaggcgcgaaacaaatggaatatttcttcaggagacagctccagattgacggagtggatggttctggcgaaagattcgccagtaaagttgaggtctcgatggagactgggatgcaaaaaagatcacttggaggcggaaaatgacctttcggtcgatgcagggaccgccactacgtttttagcgcacctcatccagagaaaagcgctccacaaacaaaacctacgctacaagaaaccaggtacaatcacagtataaatcatgacaaaatcgagaagggctcccgccaacacggcggaaaaggacgaggattcattgtggccgcgccggacaacagagtcgctataaagagttgactctcggaaatcactgtgcggcagaagcggcgttggagaacaaatacatgtgtacaaacaaaagtgtcggcacgaagacaccctacaaaagagacggcgataaatgtgttcgatgcgattcacgtggctccacgagcctcactgaattcctgctcttgaaagtcgacgttagttgaccgcaggagcccaggggtgttgcaaaactgcacgacgaaactccacgcggtgaagaatgcgccgcaaacaaaagaagctcgttcaaatgataatgcatgctgagcaactacgaatgcaccccagtttcggtatagaaacgtgctgctactcgaaaaaggatgttgaacacgaacgcgagtcggagctgacacactgcagctgtacatacacctcagacacgactgtgtcagtgagccgcaggactcgccgcaatttcgcccgaaaatgacacgaattccaaatgaaagatcgcggcacactcagggcagactcgggttccatcgactgctccgcggaaaattcgacgaacggagagacaaaacccgaactttcgcgttggaacgcgcgtgcacggagcgcctggcgcgtgcagtgtgacccgcgcacacgcacggacatctgtgactcgttggagaaaggcggaaatcagcctctaaacgcagtgctctgcccgcctttttaaaagaaagaagcactattcaagcccgctaaaatataaaggggtgtgaagagaagattccgcgacgcgaagccgtgaaacccaacgctatttctgctgttgcacagaacgaggtaccgacaccgcgagcaagcgtcgttccagcacctgcgcagctttgagcgctgcggcaccttcgggcaaggtctggcgtggacggagtttttcgacttccccacccgccgacagaaggtgtttgcggattatgttcactgctttctgcctccgttgtttctccacggcgcgaatgcaaagcaagtcgctctctcgggcaaagaaccttcgtgtgggccgcgcgactgcgtgattggtgtagaaagccgtgttggcctcgacttgcgagcgcaacagcagagggacgactgttcctgcgaagcccagaaagaacggaaaa

SEQ ID NO: 479 - DNA, 1932 bp, Toxoplasma gondii
  source 1..1932: mol_type = genomic DNA
ttcctcgcgacatctgcagacttttctttcttctgagggcagacgacagggtggcggttgcctttgggcaccgacttttgaagggattggaaggtcgccgttcgtcaccacgagaaatcttgaacgtaaacttgcagtgaaacacgggcgatgctcccctcagcgacatctggtgtatgtacaccctggcaccgcatgcaattccgtttccctttgaagttcacttgcgcactcgaaggactcctcaaagagtcacatgcagcggaccaaaggactggctgctcctgtcgcctcattcatagtttatgcgaattattttctcttggaaaaatccccgctagagtcaggtgtcgattcacacacagaagatcacgtataaaacacatatatgtatatatatttgtacatgtatgcgtctctgttaatacatgtatatacgtaaatacgcaattgcccttatatatgcgtgcatttgcttaaaatatacatgtatatgtgtatacagctgtatatatatatatatatatatatatatacgcttattcgtatgtagataataaaagaggtgattttccggacagagggctggacggcatttgcactgagacatgcatggtcgatttaatggctgggaccaccgcgttttgggtgtggagaggcgcgcaaaagtgtgtggggaaagaagcgtctaacgggcattttctctttcgcgtgtctcttctccgaaagagagacaagcctttctgtcttggtcagattcttgccctatttgactctcttcgcttgctcgctcgttctcctcaagcacgtggaaaaaaccgacgaaaaggagagaggaaagaagagaaactgacgagaacgaaggagaggcaggacgagaggaagataattcgagagaaaaaggtagagagagtaatgacaaagggagaggggaaggaggtgatggaaggacggggaaggaataaaaagagaggaaaaaggaagaggacagacaatgcacagtcgatgagggaggaagtagagagaccagaaaaagggaatgccaagaaggatcgaagagaatgagaaggcggagtatatctgcagagagaatacgttgttcctcactcagagggcggtgtcttgttgcagcatgcgtcggctgttttcgagtgtatgtacagatcgtgcagtcccggagtttctgaacagtttcgcgaggtttggggagatttttggtgcaaacgaattccgtttttctctcttttctcattttcgagacacatcactttgcgtgcttgcaggtcggattgttcctcctgccctctctcctcccgcctcgtgacagtcgcgagagagaggtctcggcgagaagaaaaggccagcgcgaatggattcctttttctgttgaggaagttccccggccgacaagaacatttcctcgcgggtgaatctcgtctgctgtgctcggagggcggaaatgtcgaagtttcctcttccctctccccccagaaaagcgcagaattccggacagaagctttttcttacgcgactagatctggcaagacaccgcaatccccggccgaaatgtcacccccctctccactccttttccaactgtttggggagtttcgacttttttctctccatttctcctctctttgatcgctcccgtgtcgttccttccgcgattgcccaacttcttccttcgtccccagccgtccacggtttctcttctcgcatttccttctctgctcgcgcgaaacgtttccccaacgcgcctttttcgcaggagaaaccgatgtgaagcggtggagccgctcgaaaggcgcttcgaaagacgccgtagcgtctcctttccttcttctccgcgtctcttcaccttctttccttttctctccgtcatcttctcccccctctcctcttccaaccttggtcttcgctgtgcgaaca

SEQ ID NO: 480 - DNA, 2532 bp, Toxoplasma gondii
  source 1..2532: mol_type = genomic DNA
gagttcagacgagcagtctgaagttaacgaacgggagagggtccacgcgcgactactcccgaactgaggaggacacccttgagtgtgtagcgcagacgaatcaagggggcagaggggcttgtgaaaaacgaggaagagcagaaaggtacagagcgtaggaagaagaggacggcggggacgagcgaatgcaggggagaagcttgaagtcgagagcatcaggagcaaaaagggaggatcactgcgggaagctagagccgcagaccacgaaggcacaggctggagttgtgaaaatggattgggctgcgtttctccccagaatgttaatcttccttgtgacggaaaccgcaatcagtgaagattttcgatctttctcggagaaaccctattaccagacttctataaaagatgtgcgcagacctcttgctgtgtcactgttctctcactcggatggtgatcagatgcctggtttcactgtaggttcttgttggaattgcctagctgtctgccgctttccccaggggaaggtgggactccaaccacaagtgtaaacatatatgcatgcatgcatccatctctattggcgttttactctgcagttttccgtggaattggtgacaagaagttggcgtggcatctgggttcacgcgcacaaattcaggcaaatggcgtagcccaggatcgttgatggcaagcgacattgccggaagcagtcctccgtgaggcaccaaggtaatggttgcgaggccatgcctcttacctggctacagcacaaagtgcatggttagaaaccatcaagcttaaatcgtttgacactgctatatacgccactagccatacgccgttagggaacacgaattccctctcatatgagttccgagggttattcttcgcggatacttcgttgaccgctgcgaatcgaagagtggtttcttcgcgttttctagtgagaatgcgacaaatcacaaaatggcgacgcgtgcttcgaagttgcatatttcgtatgaggcagaattgctgccgaacgccccgtcgtgccagaggtacaccatccagcaggtttctggggacgcttgcatatcctggtgactttcaggggattcacgttgtgtccacacgcttgagtttcaatttgatgcaaaatccctggaaaatacgtcgtgggcatgtcttattcatggtgaagaaccgagaactgcggttcgctggcttcgaaagccgaatgcccacgaaaccgtctcagggatatgtacaccccgtgtcaccagcagggttccctgtcagtcacgttcgcattttacacatattcctcatctgggtttcagatcgagaaaagagcgggggtgtgtgttttctgtctacttcctggcaacgttgtgtcgcacggaagccgcagcagtgggggtggggcttgtgcagagagacaataaagaaagcaccgagtttccccgccctgaaacagaataggtgtgtcgaccattggctggcggtgaaaagtgccttgcgtcgcttgtttgcatgtgaaagagtcgagaaaagagggaaatcgcctgggggtcgttctgtccctttttcgagggtcgtcgcacccgacagctcgccgcggacccctacggcttcgcgtctcatccacaccgaaatatttggggcaactcgttctttttctctcatttttcttgctttccactcgctttccagcctccgaacctggacagagttcctcgactgcctcgctcggggtgtttcccttcgtgcccatgttcgcgccgccggctggcttcccgccctcagtgtaaaaaaggctttttccgcgccgcatgcccgcggtgtgccacgcgcccgacacggagacagggtttttcgagttgaaccttcgctgttctcagaagagacgtggatggctctgacctgcgggactggattagacaagacccttctccgaggcacatagtcggggtcgcagctgttcttcagaagaaaaaacgcagcccgtctgacttccggaaagaggaaacggcgcgcggagacgggcgacaccgggactctgtgcggcgattagccgtggcgagcaagtgacgacgtgtagcgacgacaacgtgtgaggcctccggctctcccctctttctcaaaagtcctgtctttctaattcgcctttctgtatgcccaccttttccaaaaaacaacttgccttcccacctgccccgcgactctcccgccgatacttccgcgcgacgtaaggactgttttcgcctcgagaccgcgccgtcaagacttcgtgttcgtggcgggggccggtgcacccggcggagaagtcgtggacgacttgctgcgctaaaggcgatttcccacggtccagcgcgctctcctacttcccagttccgaccgttaaacggagctagagagtccgttctggagcgtaccaggttgacccagacagtggccgagggtcgcgcctggatctcagctgggtgggcaaaagtggccacaactcattagtggaacgaggtccgtttttgcgagaatttcgtcgaacga

SEQ ID NO: 481 - DNA, 1688 bp, Toxoplasma gondii
  source 1..1688: mol_type = genomic DNA
cgtttattagacctcgtaacaactgagacacacagcgtttgacgcgacggtactcccgacgtccaccgtacgcttcagtttccagatgttggtcttcgtcaggagcacaggacggctcagaatcataccttttcatgattccgttcgctcgcaaaattatcaacacaggagacaaaagagtttttgtaccgccgtagctgctgacggatcgccagggttcaagaagcccccgggcactagcgacgctactctcaagggtggttcccagaactgtggcttacaagtgtagaacacagccaattgttttgcctctatcgtcaccagtcagaaaagatacttctactgtctgtcttacgttcgcgcgatgtactcaacggttcgcttcaggtgccttattgtctgagttgtatgctcgctatcgtgtctaacgatgcgtcggcgcttgtccgacttcgtcaacgtgaaaaagacgggtaatgcgcgtgaccagcacgcagaagctgttatccatgacaacaaagagaaaaatcaggccagagtgaaatgcgtaatcattgcttaggctatattttcggccttgatattagcccctagggagaggccgtgcttgggaaaaaaatgcttctctggcgccaaacggcgacagacgactactcctgcgattgccatgcccgactgaatgtagacgaaacgagtaaaaggagaacataatccgccatttttcggtaaaacccatctatccagtggccgatgactgcgttaatgccgcatgtaccagctggagccaccacgcctcgtaacacaaatcacaaacatactgctcgatgccggtgaacacgagttgtcttctctttctgcatgcttaagcgcttctcgcaaggaacaccatcgcgttagtgcttggagagtttccatgaagcacggaagcgtgcttcaacttgcgtgcctgcctgtgaatcagaagagaagagttactcacctcgggcgtgaaccatacttccgatgaatcgatccggtacgattggcgtgccatatacgcatctcttacttaacacaccaaacaaactcaagatgcagacaataatgttgtcggtaggcctcaagatgcgtaacaggtgagagttccgtaacttaccacaagctgaataaagatatgcttgcgaggagcggccattcttctgttcagaggtcgagtggcatcacctgcagcagaagggaatttcagaaagaaacagaacgacgtctccagtttttcccgcttgtcaaactagcgatgcgctgtctctctcgtttgcattcatctcgcgtagcttagcaagcccccacacagtgaggctaatagacaacaaaacatcccattctgatgaacaggcaaaccaaagacgtgaaattggccatgttgatgtccgtgtgcagctctccaactgctttgctacttgaacagccagttcaggcccgagagattcttattccctctccgtttagcatcgacctttgcatatatgcatgcgcatgccccgtcagcgcatgcatcgaagcgacagagtttgactccgctgcatatttctgcctttcggggtctcccttttattctgtcggagaattcctcgcattttccccgcttcgaattggagaaactgagcaaaatcctaggccgaagccgcttcacgcacccgctctcgccacca

SEQ ID NO: 482 - DNA, 3721 bp, Toxoplasma gondii
  source 1..3721: mol_type = genomic DNA
gaacgttcatcgcctgagaaagcatgaaaagtgagggaccgtgacagagcatggggagttctccgacaccctggaattgatgtggtgattcaaggatacggatacagagtgcggatagagctttgtccatttcgctaaggtgacgcctgcgagttgttggcgacagccaaatgaccaagtcactccgagttcagcactgctcattataccggaaatccactgctgaggcggatgtctacaaatagagttgtctcacatgaagcgcacatccgacagatctgataaacaaagtcagcagtacggctgtttgaggcggatgatacgagttgctgctcttccgacgtgcaccagcgggagaaggccatgcaccggcagaatgggatcgacgcaggaaggaacggcaccacatactcctatagaagagaagacttaaactaaaatagctttttgtgtgaaaatcagtggtccaccacgcactgcgcgcatacacggcgtagccgtaattttctaaattcatggcacgaagctctcggctctacaacaaccctcctggtttaaacagtgacagtccgccccaaaaaaggattcgatattagtcagcaggaataactccaccttaagtggcggcaacgacagtcctacgtgttatcatctgtagtttttatgttctcttgcgaagtcaaacacttccgcagatatcgaaatactgaccgtcagccccccgtgtgtggcgcgtccaccgtagcggtgaagtccggggtcaagaaaaaggcgacacgagcttaaggtcctgctcactaaccttaagaagcttgtgaatcagtgcagaggtcctgtactcattgtacgctgtttctggccactggtgaagagctcgacggacagccacgatccatgcattgaaagaagtttcactggctgcttcaaagagcgtggagaagtcgacaagagatccagagttcgacagagagctcagattcgttggcaccgcaaggaggttctggagctcgccgtccgggatgatatatttgtcgtcacttgcaggtgaactagcggctgccgccagcagaggaaggaaaaagaaagaatatgaacgtaaaaagatgattcctcgattccaaaaggttttcgaagccattttcttgtggccgccgcggggcatgggtttccctccactggtacagggctcactggcgcgctgacttcaagtggacacgaagagaaaggaggaaaacaaaagcgagcagcaatatcactcagaagttactgaaaaaatgacgcattcaaaacacgatgctttgtttctgtaactgaagctcaagatccagtgcactatatttctttcgcgagacacaatcaatcccgcatgcgctatgacatggctacccgcctgcaatctggtagcacaccaatccacctaaccggaggtcgaaataaggctatgatgccgaatgcgttacctcccactgtatcggtccaccacagatgcatcctagtaagttgttaacatagacacacactcaacagcaaaattgaaaggctggtaggtaaagtgttagcgccagcgtatcgatcgtagttgcccgtcatggaaatgatgcggctagaacgtcgaaagttgcaggtgctgcaggcaggatctcacaccactatggcgtggtgttaacgaagaattttcgcgtaaatgtctaaaacatacccatggcaggcgtatttttcgcctgcatgctgagttttaggacagatacttctaaaagtgatgtttcatcgcggcggtctacagacagtcgctgggtgaaccagagcagcactgtggaggcaaagaaagtcctttacatcccagtgttttggcacacaacctatgcgtgatgagcttctgtcagtggcaaacaagagcgttccagtgatacatgatactcttgatagaacatttcgagctccacggtaacatagccttcggtgcgggtctgccgaagccaccacagccgttattagatgaaacttctgccggcggcaccttggtctttgatagcggcagctagtcccgccgtcctaggatagcatcgtgacccaacacttggtggacactactgcgcaacagcgcttcctccctggggtcgtgctcagagtgtcgtctagtgttcttgcgtacggtgcaaaaacatgttgttttacctcatcattggaaagtggttgccctaagactcctccaaacaccacgctcaaaatagaaatgaattccttctattagtaaatgcaccttgacctgatcacgacatcgtcttccgcacggcgccatgatttcctctcttcgaacgatcctcgtgttaccaaaatgagatacgccaacatctgagctctggctagcgtaaaaggagatgaatttcccatcaacagctcaaccatctcgagctttttcgtctgttgagccgagactgggaacggctggttacaaggaacagtcttgctgtgaagagaggagccagcgtgcagcaatcccacggctgcaccagggtgcttctgctaggtcttctaagactattgcatctggctctacacgaggctcacccgcggtgggtttgaaagtctacttatttgataaaatccacaattgctttatgattctgtatttccattcgtgcaattacgatatctacagacagtgtgttgcattgtggaagtgggtacagccgtgagcaggcgatctgcttcggtccgacactggagaggcaagaatcttttgaagttaacgctgtattccttttggattttgctcactctggactttgcggtacgtggcaggctgctgtagcttttgtctctgacctggcagtaagctttcgtcctaaattttcagcacgcgtgtggtctgcgagcggcccgctgcctgcaccagcgtcaaccttgcgacctcgtatttgacgggagatacgggcacgtagatgctcctgaaacctagtgcgttcaggtgtgtatgtcactgttgctgcccatcattgtgcgtttggagggaacatggtttccttcgtgtggatgcagagcgccatagcaacagcgcccctacttgaagccccccatgttaaatttcgagttttcctctccagcgcattcacagtgtatcaatagaattcccaggttctatgtgatgttggccgcgcttagcatggttgtctgcctaggcagtactttgcagcggtctcttggaaaactaatttctgctacgcttgatcccagcatgatgcgtgtgctcatttactgcataatatgtaacccagcagtaccacatccaagagacgatgacatccgttttctcgagaacaagggagttgctaccacaaagtgtatacgcgtagactgccacgcccctcattcatggggctgcggcctgccccacaaaggcaggcttgttaccaagccatatgactgcaacatcggttttcactttttgtgtgctagggagggttggcgtgccccaaggttctgctatagttgaaggccgatacggtttcacgcttcgtgtgtcagtggacccaaaaaatgcatggcgttcattggcttatgtgccaccagtgattaggcacaaaaggaacccgggccggtccattcattccgttttctgcggtccttcacttggctctttttggaattgaaatattcataggcatccactatttctctgatgaattccatgttgtctccaccgactagagacggaaaaaga

SEQ ID NO: 483 - DNA, 1434 bp, Toxoplasma gondii
  source 1..1434: mol_type = genomic DNA
ttcccggatacgtctttttccctgtcgttatctcattacttcgtggagaaatctctacatttctctcctctctcttcatgtcgtcatttctctctgtctcctctctctctcttcaccttcttctcttccttctccttctgtctctcccgctttttctcttttctcttctggtgtgtacctgacgaagtcggacgcgtctttgagctcgcgtattagccgatctgtgggcaggcggaaagggtttcctctgagcatttgggtcatctgtctggtcacgtggaacctcgcctcgaaatcttccccgaatgttttggcgcatgcacgcaagaagtcccgatacggtcgacgaagcgaggggcaaggaagtgtcttctctccgtctttctgtgcgaagcatgcatccgattctctctctctctcccctgaaggcgcggctgtacacgaagaagaaggagcagaaacagcagaagagggtggaggaggagcagagcgttctagggcattcctcgaaatcgcagcagaagcgaagtttcttcggtgtgacgagagagggcgagacaaaacgacgaaagcgtgcgacctaacagcaggaaggagctgtgccatggtggtgtctttcctggaagagcagacgttgattcggagtttcacaacaaaggcaggaaactcgagtttgaacgggcgctggagaagcaagcgacagaggagaaaaaaacgtggccttgaatctggacggcggcttctgtccgcgaggaaatattcagcttatgcacagaagaagtcggtgagggatagaccagcatctgagtagtagttttctctcgctgttaatacgagggataacagtaatccatatattgcgcctaggacataaccgatgtcgaataacctgaaaaattccttcctttcgaaaaaaaaatcatgcaaatcagcagacgaaaggcttccaggagggtcgcccggcaaagcgcatcttcaccttcgcatgcaaagacgtaaaaaaaggaagccgagagacaagcggaaagacacgccccctctccctctgtcctcttcagagaagcctagcgaggttttccaaaggttgggtgtctctttggtctcaaatatgcaaaaacatcttcaagtcccagtcttcgaccagtccttccgctcgtaagatccccgaagacaccggagacgcatcgccctgtggaaggagacagggagaggacgagagagacagcgagtcctgtcattcttctttcttcgcgtcgaggttttttttaaatcgcagacacggctacgtcggtcgggatttctctacagttttttcgcctgtccccgcgattctcttaaaactcttttttctccgtcctcctccgctgcatgcggcgtttaatatagtggctttcagtagagcggtaacattcctcgcctttttctctcctggaa

SEQ ID NO: 484 - DNA, 2969 bp, Toxoplasma gondii
  source 1..2969: mol_type = genomic DNA
aaactcgcgttctcagggttcacaaaagaatgcttcagttttatgtgcaaagtcgaaagtggacatttatgtatatattagtgcattactgaatatatatatatatatatatatatatatactacagagaaatgcccgtggagattccacgtattgcgagtttggggaatccggagtctgcgggcacacaggtggaagtagaaattgaggaaagaaggcttttgccgcacagaggaagctgtcatgtttcttctggacacaaaccgcgtgaagaacgtggaactcaaagacttctcgaggttcgactcgaagttgtcctaaggagtcagttaaagatctttgtgcgcgtaggaagagcaagcggttctccctgtgtagtcttggaagtgcgtagagtctctgttttgtcctattttgtcctctgttgcacagggggcggtggactgttgagaaacgttctttggtcgaccggcacagcagcttccttgcagcgtgtctttttattttgtcttgccttccctagtgtctgtgttggtgtttcacacttcttccaccgttgtactttaaaagttccagcagctctgcggctaggggcgtcttctcgagtccgccgggcttcgctgcggcgacacgagatgccgcgcaagcaagacaaagcaaaaacagtaaatgcactcaaagtgtcggccgtgaagagcaaattcgaacgagggactcgtgataaaaaaccttgaagatcgaatcaggagtcgaacgcgcagtatggactcccccgacaccacagagcacgagagtggcgcacaaagatttcgaaatttgagtccacagcccagctcgcggtctgtactccagataaagaaagtgggttttgattaggatggctttcaacagcgtagtggagagacaatccaccaggtttgttcacgggaagcaagagagcacggcattgaagcccctccacatcggtggcgttgtcggcagattaatcgcgctttttatgcggcaggcatttcgcgtccgccactaacatatggggttaagaaaaactgttgagtgaacgtatccctgcgagagtctgtcacccttccagaacgagggtgctgatcctcgactggcgtctgtgtcacagttctcttaggaggcttgcaggtttctgccctcgatgaggcttcccagttgaaactcttccgccctcttcagtactccctgaggaactcaaatttgtgaatgtctgagcggcatctccttcgcctggaaaaatgtcgctaacggagaaactcctgcactgtcgcagccgatgtgaagaaggcgaaacggccggttgaggaaaatcctgcactgctcgctgtcatgagtgggtgcacaggtcgtcgtctgtcttccccagatcgagccgtttgacagagagagctagggttgcctcctcacaacgtgagagccgacggcgtacctttggcggtgttgtttttttggactgttttgctgctcgagtacactctttttttgtgaggggagcacaccgatgcacacatggcagagaccagtggtaacgaggcgacatcctctgtctttgtttcgggagtggaagctgcagcttcttctggcgctacgactttggctgccgcatccagagatcgttttctctcggaaaagcgaggccgcggccgcagaggagtagtccggaatcctacctccaacgccgcggcgttcactcggaggtcttccgcggggcacggaaacaagctcacgcagaaagccgacgtctgtctctagctcgcgaaccgctgcagcagcgggggatgacgtccgaggcaacacaaatccaaggcaaccggagcgacgtgtagaaagaagaactcagttgatgatcacacagggcctctccgcacccggcgtcgactgcgctagttctttggggtgcatgcaccagagagcacgagtcaacgccgcgctgggggggcgcgaggggaacactcagtggcgcgtttcctgttggagaactccaagtttcttctctctgcatccgttcgagggagttgggctctaccctcttctttttcctcgcgtttcttcccctctgcatgcgcctttgcgcggctccgccttctgcactctgacacccctggccccgcgatttgtgcctgtcttttcgtctggcacatcgacgccgagatctttcttgaaacgcctttttcgacagagcttgcgcgagtcttctttctcgtcttcctcttcgttctctcctttctcttctcgctcgcctttccgtcggttctcgcggtgtgcgcctcgcctctctctgccttccagctcgctctgtgcctctgtgcacccttctctcctcgacgtccagaaacgacgacgtcctgcggtgaacaggcaaacttttggacgcttttctgaatctcacctttcaagcgagagcgaattcatccgcgcgagagaggacgcgcccggagagtcgcagctgcgctcttttctccgccgcgcttgtcgtcgtcaccgtcctcttctctcggggtaacagcctactccgagtggcgtcgtgcgatcgtctctcttcgctcttgtctcctcgatccttcttccaaaaactgtcgcctttgtctccgtctcctctcggccaactctccgcccggtgctcctgttgcgtcttctcccgtctagtcttcgagagagctgctcttctctgcctcctcctgtctcgagttctccttcccttcgtcttacctcgttccttcattcagcgggcagagcacaatcgacgtctaccgctcctctcctcccctcccttactcccaacggaggaagcgtgccgtgaagcttgcatccgtttcctctcgccccgacacacttctgctcgtcttcctcgcctttttctttctgtttcgaacgaacgcgattctcgcttgattctcgctggtcctcttcgcctctggccttcctctcgtcctcttctctgcatccca

SEQ ID NO: 485 - DNA, 1917 bp, Toxoplasma gondii
  source 1..1917: mol_type = genomic DNA
gagaaacaaacgagatgaacatccgactcaggaaggcggcaaaggcctccgcaacggcgaacagggtggaaacatggcggaatcggtcctcaaacacagcgaaaaaaaacgcgttcaccatatgtccatatcttgaataaaagcgtatatacggatctacacatatataaatatatatataaatatatatatatatataaatatagattgatagagatactcatagagagattgatagatattgatagattaaggtgagtacgtagtaaaatgtattttcggaatgaccaaggtgaggagtttgttttcttacggctgctctagggtcacttgggtcgagaatgtccgattccggttcgtggcttgcggccgcagctgcgcgttccacgtcgaagtcatcgattaattcgtcgtctccgaagtcctcgccaaagtcgtctcccaagccaccaggttcccccgcaaacatatggtcgatttcgtcgtctgccattgcgaagtgtggaagaaaacgcacggtagcgaaaggcaagcgtcgctgaggtggaggcaaagcgggagagaagaagtcggagagagggagaaagagaaagagaggagtagagaaaatcgcgccctggcgacgcgccgtcgaggccgcggtacacgcacaaaccaggcagagacaccgctgaggagagtgaagaagagactccactctcgcgtttctgcgtaaagaaaaagagaaaaggggaagggaggccgatgggagaagggaggagaaggcgaaggaggaggccgtgaagagaagaagttttcactctaagagtggagagaggagaacaacacgctgcgacgagaaggcacagcttctcaagaacttgaagaacttcgatcggctgaatttctggcctcgcttttctgtccggatgcctccgcccttgtgcgaccgaacgaactgcagccgcctccaggagaggcagacctacttccctcgttgtggggggaactcgcagcgagaacggggagaagagaaggcgaaaaaacgggcagaagaatcgagagaaagaggagcgagagagaaggagaagaacgcgacaggtgaacagcagaacaagccagagagcggggagaaaaaaggaaaatgcatgcgaagaaaagaactggacgcgtgcgagaggcgagcatgcgtcacgagcgacaaaatagccgacagcggatgcgacgtgactctgtctgaagtgtaaattgtctgcaaaaaaacttgccttcacggcatttcgagttactcaggagaagagactggctgtgtctccacctccctcttctccggcttctcacggcgcgcctgccgagacgacaaagatagaagcgcctgttgcagacaactctggtgtacatacacctcatcccgaggagtctcgactgtccagacacgcgaacgaggtgtacatacacctcatttcgctgtgttggggaggcgaagtcgtcttcttgctctgctgctttctccggaactgcgtttgcgccgcgaggctctctctctctcggattctctcccttctttcatgcgcggcctgcatattctccgtgaacactcccttccttcactttgttttcctgtcggtctgccctcgtacctgttctctcggctctccgcgtgtccctctgttctctcccgtttctcccgtttactcgtcctcccttccacatttcccctctttcttccttcctaaacacctataaaaacgcctctcttctctcctctcttctctccttctcccttccgctactctctccacttccttcttttcttctcttctctctcccgtcttcctccccgtcttcctccccctcttcctccccgtctgtctcccttccactccgttcttcttctcctcctcccttgagccttttttccgtctcgctccgtctcga

SEQ ID NO: 486 - DNA, 4409 bp, Toxoplasma gondii
  source 1..4409: mol_type = genomic DNA
acaacgcgttcgattcgcctcttctccggatccagtggcacttgccacagagttgagcagctccacacctgcggggtatcgtccctgtctctccatccggtgactcctgaacgcaccaaaagagcctgctgccgtccgttcgtgcgcctccggtctgcttttcgactccgacaacggagactccgtcgacgagttccaagtgttcctcctctctgctgtgtagatggaggtgagtctgtgcgattggatcccccgatgtgatgctgcgaggtgccatacttcattccctctgtctcccgccgtcggggccctgggtctagggtacggcgtaggggcgccgtagccgttctgtccgtctcgaattgaagcggcggcactcgctgcggtgttccgtccactgcgtgaatgcactgaggcaaacgcgcacaagagacggagtcttgagcagaagctgggaacttcgctagacggcttttttctgcggaggttgtgtgggtcgactgtgactgttgaccgggctggaatgagggagggaacagctggaaaagtgccacttgcgtcgccgggaggaatgaaaatggaagatgcggcgtaagttggagaatcgacccgaagcagcgcgggagttctgatccacaaggaacgccttggctgcgcggcactcctaatcgacggcggaaaggcgctggactgcatgcgtgtcaggtccttgccagtcaaggttgagaaaggggcccccggagtaaaggactccgcattccgagaaaacgcagagtatgccaaaggcgaagaagttgagaaaaatggatcggaagattgccgtcgaggcacccatgagcccaagacgcgggcagaaactccacacgttccctcatagataggaacgtgtagaaagaaggacaaaagaagagagaagccaagacaagtcggggcacggcggacaaaagcagacttatctctgggaagcataggggacgccagagatggacgcccaacgggccgcccctccaggactacgtgcgcgtgcattcccttcagagatcccttcgatctgcatcgctgagaaactgaaaagttcacacgcattcttacaaaaaaagtagtttgcatgcgcgaattcgcgctcaacccctataccagtgtgcccaagaagtctgtggaattgcccggcaaacgtccactctttcaaggaaacttcacctccattcccgagtcgacgtcgcacgaagagtgcatgttcacagacacaatgaatgggatttccaatacagaagttccctcaactcacgcgaattcccagacagccgaggcggagcacgcgagcacgtggaggtcacacagaacggggttaagcagctggaggcaagcatggaatcttgacacgccttgaaaggcagtttaacctcaaaggaacgcaatgcagagtggcctgctggtcctcgaattacacgggaaacttgcagtgagtaacggcaagaacggtgcttgtcactcctgaccctccacgcggaacagatataccccaaatctcccatacccgtttaggctagttgttttcgagatttaagcgcttgaaagtgccagtgaggctgagaaacctgtagaagaaagttaaaaaacgggaagtcacgtacatggaaggaggaaacgggagaaagaagttggcaagacttccgtatcgcggtaatgtgtgcccgggaattccacgcccgacggcacacgtgctcactctcgttcgaccggatgcacttaacaaagttgaaaaagaccctttccttagtaacaatatttttactgagcatttgactggtgaaaaagagaacaaccgcccctgagaatctcaccccgtctgcgcatctacacaacagaagcgtcaccagacccacgtggagatccacgtaaaacaagcacattcatttttttattcgagtaacatgttcgtcagagtttctttaatgtgttggtgtttctgataaattcctgcttgttttctatcgcccatccacgttcattccacggacgcaggcctgcctctgtgcagctcgtcgtccacagtagcacacccgtcacgcagagcatactcctgggtcacgcagagcatgcctctgcaagccgaacagaacggcatacactttccgacgctgctgtcacattctatgcgcatcggctccgatttcctgctttatttccctctattgccgagggagtgaagagcggacctgacccttcacttggaaactgtggacggtttgttgtttgtgttacagctccggcccccccccccttgttcctccccgtggctggcatttccagccgcgcgaaggcgtcgagattcttgtccttccagaagtacagccacgctgtgtacgggctccagttgctttctttctttcactagtgtctgaaaggattctgaacctcaactgactctcgagaagcaaagatcgctagaaagacgctgtgtatagtttgtagaatgcgtgcccttctccacccatcgcgttcggctgtgagaaattgttcaagagttgaggacgattatgtcggagaagggtgtgcatgagcagaacgatgaattcttcaagtggatctggcgcttcagggatgaccagtttgttgcatcatgcctctggtccatctgcacgcaatgttgatggtgttgcgggtgcctgaaggctcgtattactctcgagtgcaggcgtgtctgtgaacgaaacgagactcatgttcgtcggtctgatccaaagcgaagacacgtttcggtgtatctttttgtagtctcgatttttcaagaacctttcggtatgccaccctgcctcgcagtcagctgttagtccacgcgggtgtgtgcgttcgtagcgcaaggcgttgtcttctgtaatgcagaagtgcttgtatgaaatcggcattggagtctctgtttcttctagtttcacgacttggcacatgaaacagactgtccgttctcatccgcggcggctcgacacaaaggaagtcgtaagcgcgtgtccgtcgagctccagttctcctcagtcccccggtagcgcgctcgtcagcccggtgaacgtttcgttgtcgctcgaaagtcggttcagcgtggaaaaacagtgtcgtggcagtaaaagtggttgcgtgtcttgctgtggggtttcttcgccgggggtttggtgtgagaaagtgcatgcgttccccccagctccgattcggggtggagggtgccacccgacctccacgaggcaaatcgccagacaggcaggtttgctgcagaacttgttcaatccgtttttttgcaacggaagtttgcatgcacatttttggctttttagaatgcctcgacatcgagctccatgcttctctactcctggctgcgcgtagtctgtcgggaaaactgcgatttggggggtcggacggaagatcgaggtggagccgcgcattcttagccactgctccgcctcttgaaactgcgaggaaagtgttgcgaagaggtaagggaaactgcgaaattgtgaattccttagcgctgtccctttgaactcgatccttgctcgcgaacaaacctgacgcagctttggaaaatcttgtcggaaacgcgttcggtgtcgcgtctttgaacgccgaccacctgaaagagcgccgtcttcctattggctgcgtggtctgcgtggacgcggtgctgttccacgtcgtttcttcgtgactcgtggctgtcgtgcggggtttggggaattcggcgaatcgacgcgaacggagtagctcgactgctttcttgacttccggtagccaaaaagtggcgaaaagcgtttccgatcttcgtggtttgagcaagttgtacagttgctgactctgctccgtttttgcgccctccaaccccacggcgtttccccccgaaaatggaagagcagtctcaactctggtgagacatgcttcaggaagaacgcggcatttgctggggtatttaccaacgttttttcctacaagttcttgtcactgatttcgattttttgacgtgaatgacatgaccgagctccgcgagcccgcctaagttcgcttctgcgtctctccgcggggctgcattttattaacatcttgttttgtgactagcatccgttatcgtcgctttttcggcctgattcgtttccacgtcgctgtttccccgcgcttttactctaggtcagagacccgagcggctcttttccggaatgcgcgattgtcgtcgggtatgtcttgcgcagctcgattttttccttgacaccgcgaaagtccaaggtactgtcgtcgttggcgttcatttttctcggacatttgagtcctcattccgctcgcgcgctcagtctgttcccgccgcgtgtttggctgggggttgcgcagaactcgagcccacgttgtcttaccatttctcaaatacacca

SEQ ID NO: 487 - DNA, 3237 bp, Toxoplasma gondii
  source 1..3237: mol_type = genomic DNA
agattcgaagaagcagatcctcgaatgtctctgccttcctctttccttccttctcttcgctcggcttctcttcgctcggcttctcttcgtcttccttctctgtttcgttcctctcgcgcttcgtgggccgcccagcgcgagcggcacgcagctccgctgtctccgaggaaattcgtaggcaccggaaaggcgctcccaggaggcaatgcaggccgcgaggaggcatgcgaagaaagacaaacagcgggaggagaagcatgagatgacacatgaagagcatggggagaagaagcggtcgacaaggaagggttttgaaggggatggaacaacgggtgcgcgttggaatgcgtggctggaggaactgcggggaaggccgcggcgacgcctacgtactgggtgacggagcctgcctgcgatagagcgagaggaggcggctggaagccaagaggcagatcgggtggaagtcccgaaagagaaacgacggcaggcataaaggcggggactgaaggcgggagggcagcgttcagttgcccggcggagggacaacggcggaacgcagcgtctccgcggtgattgaagggctccatgtctcagacgcgagaagaagcgagaagaagcaagaaaagagagaagaaaagagagacgagacagaagaaaagagacgagagagaagacacaacggaagtggagacagaagacaggaggacgaaaagaaagtcgaaagatccgtcaggagaaggtggggaaagacgccagtcggggatgtcctcctagtgagatgacaaaaggagcaagaggagagagcgaccggaaccaaggtcaggcgcacagaagatcagagcagaggtgacgaaacaaggagaaaagacgaaggaagtggaagggacaaccaaagcggagaaaaagacgagagaggaagagaagacgaagagagagaagaggaaaagagtgcaaacgatgcagtcgactgcggactccgtgtgtccctgcggcaaaagcgtcgcgcggggacagcagtcagggcaagtttcgcctttttcatggctccctggaatgtttactgttcaaataaagacgtagaacgcgacgacgcatcgtcttctcgccacacaaaacgcccggtccgccttcgcgagaaatggtgcaggccagaccacggcgagaaccggctcgcaaaacctacgttgacagggatcgaaaccgggtgtacacaccctgcatcgttcgtcgcaggcgtcgctgctcgggtgtacgtacacctcgttctcgcaccctccagcgctcgtcctccagtcgtttttgcgagactgcatgcgtagaaacgcgccgtttcgctcgaaacgttttctgtccttgcgtggacgcgagtgcctggccgcagaactcgactccaagacaagctcaaagcttcacaggcgaggcgcgctacacgcgctagacaggccacaaacaagtacgcgcgcacaagaaggcaaacaactcttcccacataaagagagtcgaatgtagatggaaatacacacacagagccatgcagaagtagatacagaaacacatatacgtacatctacgtatatatatatatatatatgtatatatatatgtagataggaaaccagagagacagagacagagagacagatatagatgaacagaagtcgagttacaagttcagttgggtggcgtctgtcgagagagcgaggcgctctcagcgtttacgcccgcagggagaggaatccccgtggaaggggagccgggggtcgttccgggaggcgcaacgcgaagcaccgccactcgtccgtctactcactcgctgtctgcgtcgcggtttctttttccgcgtcgtcctctttcaagaaagcttggcggctggcggcgtgactgcgtcttcggcgagaagaaaagcaggctagccgcaggctgtgggctcgcctcggtgcccagatcgaggcgtcgagacaccggaaaggagcgcaacagcagattttgaaacgtccatcacagagtcgcgagacagctctccggaaagttttcaggttcgcttgaatgcgggggagctcgtagtctctgaaagcagcagaacgtccgcgaatgcgccagtctgtctcctcgtattttctctccgtctccatccctctcgcgcctccgtcgtttcgtctgccgcgctctccttttttggaagcagttctgcggagggaggctttgaatgcaaacgttccccaggcgctggtcccgaagtttgttgttttcatcgcgagtcaacagcccctgtcgcccctggtctctctcagtcggcctctccgcacactcctgcctacagtttttctcgttcggcgggcgcagggacggcgctcgagagttttgctggagattcattcggtggctcggctcttctgcattcgacttccgcggcaaaacgaaggaaagacgacgcgacaagcgagagcattccgtgaaaaagtgatgcaggtgtgtgtgcggcgaacaagctgggtcttgtcggtcgcggcccggccggggctttgaggagcggccgacgcctccgagaaaacagcggggaaaagagaggaaagagttgcgaaaaaggagctgtttggagacagaccgggccgcttttcctcgccggcaagcacatgcgagaggcagcgtttgcgcgggaagcgaaaaacgcgcgctggtgtgcgagcgcgagctcttgcggtgtgtatatattcaggcgcgctgcttctgccaggcaggtcgagaaaaaaaccgtggaccagcggaaaaaatgacgtctccataagaactcgggccgtcttaaatttcgcgtcgactctagaagaaaggtcacttccggagttcctccgtttcttcctttcgtctgagcctcttgcgtccacccttgtcttgcccccctctcctcgacaaccacaacaacacacgggggagggcgcgagacactgcctttctgtctcctcttgatctccttccttgttctctcctcaggtgcctccttcgaccccattggtctcgtttccttccatcgttcctcgcctcctcctcttctcttcccgctgtcggactatcgccttccaaatcttttctttctccgcccgagagttcgcgtcccctcttcctctttttcctctctctctggtcttcttcttcatgttctccttctcccttccttctctctcccgcccgcttccctgtttcctctgcttctccctccgtcctccgttttcttcctcgaaa

SEQ ID NO: 488 - DNA, 1439 bp, Toxoplasma gondii
  source 1..1439: mol_type = genomic DNA
gaacagtcaaacaaggtctctgagatcgcgttccaagacacaatcgtccccctcaactgattgatgcaactgaaagtgctcgaagtcgaaagcaagcggcaggacaggactcgtctgcgctttactgtctctcttcgagacgcctttctcgcctagagcgaacacccaacagaattaacttacggcggaaggcgcatgaaggcgcgccactcggcgcggttcttgaaggagacagagcgcgaagagacacaagcccagagcctgtctctcccgagtccagagagagcgcccgggagagcgaagacagcagcgagtgaagaagcacagaaagcagacacaacagaccccgcaggaaacgcaggcgagggaggagacgaactggaagaagcaggagaagagcgagaagacgaaggagaagagcgaagaggagaagaagaagaaagagagcgagaagagagcgagaaaggagaggacagggagtgaggtggacaagagagagagtgagaagaagaagaagaaggagaagcggagggaggataggcagagtgagaaggagaagaaagtgaagacagaagagatgaaggaagaaaggatttgtagcaaactggagaggcgacgaaccttctcttcatggtgaggaggcagcgagcctccaggctcttccccgccatctttttacaaagacggagacaagaaagaagagaagagacgggaggagaaaaaagtcggggaagcgaataagacaagacaagaaatagagaagggggggacgataggatagaattgagaacagaaaggagagagaaaaaatgaaagattttacaaagcaagaatagggacgcccctgtttttgacgtaaggagcgacgactccagacacagacgcagaacagaacaacgcgagagaaaaacgaccttaaagaacaggtggtgagacgcacaacatgaaaacctgaaacaagtgagagattcgtttttaacttttcgcctgccgttcgtcggacgaggagttcggatgcatgcttgacaggcagagtacagctttgccgtggcttgcaccagcgtttcagtgcgactcagcgcatctacgcgaattttctcttttctctatttcctcttcatcgtccatatacctactagtgcactcagaatcacgattctccgtaccttcttctctcttctgttccctcctgacagtcgtcgccttcccctttctctttctcaaaaactctcctttctcttttaccatgccgcacctactcctctcttctcacctggaaggtcgccgttgacaaggcctcttgatcttcagtccttcttccttgttgtctctcttcttcgtccttgtcttcgctcctcttcgtccggatctcctcctttgttctcgctttttagtttccgtttcgtcgccattcgaggcgaagagacagtctctgaaga

SEQ ID NO: 489 - DNA, 4299 bp, Toxoplasma gondii
  source 1..4299: mol_type = genomic DNA
tttttcgggagtctgctgtgtgggaacgacctacttttgatagtcttctcgatcttgaatgaggtagcgtcgaagaactttcacctctcggacattctgttccttcttccagttgtagaagtcgacttttttcagcagtcgcttctcatggaacttcagttgcctcattgtggcgcgcggtgttctgaaatgcctcagggaaaagcgcctgcagccgcatgcagagtttcttctctctgtcagtacttgaaccccaatttcacccttcttaacccatgtcccttacacaggcatccgtcacttctcatatacaatatacatacatatatatatatatatatatatatatatacatatatatacatatatatatgtatatacaggggtgatatccttgatatatgtagatctgtggggaaggagaaaaggaagaagagacgtggaagacagaaagcgttttctcttttagttgagggacgagggcctagaaactctttccgacaagagtggtggcgaacggaactctgccgtctcatccggggctgtcgtcgctggagtcgaaaggtcgttttcagttggagaagtactcttgcgactggaaaggagaaggctccacagtgggaactcaatgagtcaagaaatcttaaaaaaagcctttttctcaaacttggaagcgcgcatcgaccatttcgtcgccctgcgtggttcctctctcctcgaatcgcggcggtgcttccgtcgttcttccgtcgcgctccgagaggcacaaacagaagaaagcggagaccccacaaagggcgcttgcgaggaagcggataggagacaggtgctctcgatccaggagagcgacttgagagaaaatgagtcttcgttgcatggagaatcgatctgttggcgatacttttctctccgcctccggggaacgcatgcatgtgccgacgctgagacgaaggcgacttttctcagaaaggaaagagattcggaggacgacggtgtaagcgggagagaaaagaatatcacactttcgtctttatgcgcagtttgtctcgtcttttcttcgctgtccacggccgttgttcctccatttctccagggagtctccccaaagtccgagagctcccctcgcactgagaatacacctcccggtttttctttctgcgaggagaaagcagacttttcaggttgaccgcgtcgcaaaaatgagtaaactcagtgcgttcttcgagaagaagaagaaaaagtctctcaaatcttccacccccgcaggtctcggagagaaatccgtgagtctccacgtcgtccgataacagaaaaagacgctctctacattcatacgggacccattgccttctccttgtctatacagttgtgtatgcacacataattccggtcgttgtgcttttcttcatctacctggatgatttcttttgcgggtgtctcatggttccgtccgtcctcattttgccgcttcctctctcttgagaccttcatttatatacgtgtgtctggttctcttctttttcccctctccgcgtccccgcatttccagctcgcagtttccgccgctctctcctccccttttctgtttcgcctctctctttttctctttctctctgtctctttttcggctctttctcctctcgtgtcttctccgtttctctctgcgtgacgcatcgctgacctcggcgcgcgtcagtctccgctgtgtgccggttttttccatccgcctcgtggagaccccagtggatgttgctaaaagtttttcagtctttttctttcgcaaggtccaccgtgtatcgacgtcgtctccttttttccgcgcatttctcatccacacgtgatgttctctccaccgttcgtttcttcttctcgagacctctcccgcgtcaccgcgttttctcctttcactttctttgcccgtggctgcctcctgcgtctttgtcgacttctctctgtgcgcagcttgcgccgcgttctcgcctggagcctggttgacttctctgcctttgtcctctctcgtgtgttcagaaaaaagatgaagaacctgtgctcgtcgaggaggactcctcggagtgggtggtggatgaccagccggcgaaacctgcgtctccgcaagaggactcactggcgacatggttgaaagtcagcgtcgtggacgcagcgtctgtgaagaaaaaggagcctgagaagacgtggatcgcgtacggagacggagacgtcgaaggtccggagagcgacggcgagagaggccagtctgcatgcagtccagaggactcgccggaggctgcgtcgctctcggcagagaaggctgaggcgcctgccgccaagaagtgggttcccccgagtctgagaggaaaacgcgcgacgggtggaggcgcgggagcttgcatcaacttcgacgacgaccaggacttggcgactgcagctcagctcggcttttattcgggtaaaggtgttcagaagaagaaggcgactccgacgcaggccgcgaaggagacgaagaaggagaaggagaagaagagcggggagggcgaggagaaacaggcggtcgaagaactaccccccgtccccgaattcgacgtctggaagtacgtccagatcgacggtggctctctgggctcgaaggcgccgcaaaacgacgaggcggtccgagcgaaatatcaaaacaggaagaggctcccctcaagatctgcgtaggccgagaggcggaaaaaagtttgctagaaaagatgcaagcgtcgtgtgaggactactggcctgggctggagagagagagtcgccgaacctgcgcggagtgaacggagagagcaggcaagagacaagagagagacagagagggatatgagctctgggtgttctttcgaagggagaaaaacagacatctgtctccctgtttgtggggcgctcgtggaccggcacccttttctctctctcgacgtctctctctctctcgacaactgtgctacaaccgcgtctgcggtttcgtttcttggtgggttagtatgcgtgcgttttgcctgtggggaaccgcgaacaactgtgtcgattctggggggtgaattccactttttttaggatcgagagtgtgtgcgaactcgcgaaagggtgtcggctttgttttcttccgtatcgctccggtgaaaccgaccctctgtgtcttttttccgacggacaaaacgtgaggaaacgcagctccaaaaaaacctttttgtctgtctctccaagtgtgagggtttgatgccatcttcaggctcagagtgtctctgttgcggggacgtcgcatgcatcctcgttgcttcttctctggagaaggaacatattttcgaccgagcacaaagaacatttgtgttcgctctcgtgtctccacgacgtagacaaagtctttttctctggagaacagagagacttctcgctcccacagtcgttccacgtctgccttcttctctcccctcgtatcctcgcacagattccccctctggcgcactccagtggaagccccacacaccaatatgtatttctcttggattgtagctctatatatgtatatgtggtatgcgtgaaggtacgcatctgtgtttgatatatgaagatataagtatatttatgtagatacatcaaggtatatatatgcaaacacttttacgtgtatacatatacatatatgtatatctatgcgtaagtgtgtatgtaacattcgacaaagatggggggaggccgacggctagagagaacaggaggtcgacgggcatgtcaacgctgacccgtagcacaggcctttccttcggtccaactcagaggactccattttctgcaggaagtcgagttgttcagtgtttctgacaagaactgctttttttcagaatcgcgaaaaaccttctcacattgtgacggtgggcgttctcagagaggaaagaagagaaatgtggattcacacaggacacagaccccggagctcccatacgcatacgctaacggcacagataaaacagactggaacattagacagatgctgcagtaccctttcaatatgttcacagatgcatttttgtagaggcatctttgcttctcaagttgtgtgttgattttacgccgctgatgaacggggatgcactcagaagagcctgttctttttgtcgcatgtggtgcctttctgaacagcaaaacgagttttgtgggccttctctttcaaaaaaaagaagaatgtgctgtgtctgcttttcaagaaagaaggatgcatttccgcgcttgtctttaacctggatgaggatcgatttatctgcgtttcaacgtggaaaacaa

SEQ ID NO: 490 - DNA, 4146 bp, Toxoplasma gondii
  source 1..4146: mol_type = genomic DNA
gtgcaagaaacatcagaggcgaaacgccacaagcactccgcacatcgccctccccttcactaccactgcggaacccgcaaacaaattctcctgcagaaggggatgtggcgtttatggagccgcacaagtgtggcgagaaaacacgcgcaaacgagcagggcgacgaatccactagaggcgacagagggtgatctgttgagggtgacgggtctgtggattcaccctccaagtccgccctgtgttgcttaactccactatccgcgacgcggggtgaacgtccagtcgtttgcgagtaatgctcatctgtatgcacatagttatcgacccgcagcgttccctggcctgctactggaacgtaaggggaagttatcggggaagtgtttttgccatcctgtgtctcggttgtctgaatatcagcgcccggtgatattttgcagagcccgcccacgttgcctcccacaaatagagagtgagaatcgcattcctcctctccttcatgccgaaaaacgacgtgcgcaattttttgtggacacgcacacacagatagggatgatgaagacgacaaacagacggaggaaaaaattgggcgaggagaacatggggaagataactcggttgtcgattcacacagactgcccccgcgcatccgggaaaatgacaccgcctcacttgtcgaagcagaagcggtttcttcggtgattgtgccgaccttgccgtgtcccctcggacgccgataagggtgaatcattttggtaggcttccgcaaggtagcacgtgtccgccagtgaaaagcagcgaggcatcagcattgaaacggctttcacactgcactaacaatgccacgactgccgcaggaagaaaatgtttgctaatcttctttaggtagtaggataggcagattaagcaaagacattatattatgattcgcctgagcttgtccactggtatattgagcaggcggacaaattgttctatttcggcgcatgaaacaggaacagagaaccactgttcctacgcagaagttttgcttgtgaacacgcgtcatccggatctttggatacctgggagcccctgctgattgccaagggcagtcgttcgcagtgggacgaattcaatgtgtcggcgctccatcgaatccacagaagcgacaaatataatggcgccgatgtcgaaaaaatcaaaatgatcgactaagaaatgggtgaaatcgtcgccagtacttggcttccagctgtacgtatgtgacaaaagacgagagtcaaagagggagttgaaaaccacattcagcgtctctacgacaaacgggtcacgaaaaaggtcaaaaaacgaggcgcccggagcggctgaggctgctggcaaaccgtcgaagaaagtgtgggaggtatgaaacagcactacagagtgtgtcttattacgcagtcgtattcagcgacgagtgggaaagaggaattgcagaaaaaacgaagactaagtttgtcacgcaggttcgaaaaaacatcctttacagccacggatgtagacaaagctgcgggcgtgctgcgggcaccgtagttgtatgcagtttctgtctagtgggaatacgaaaagtcgagacggttcaaaacaacagcaacatgcaaacgaaaaagtaacagccactgacggggaaggaggccaaacgtctctgtttgccgccacttcaaaagatcacccagagaaagagcacttgcaagtagtttgtgtccaatgtaggactggcaaacaggagggttttccgcggagaaatcggatataaagaactgcctaaagtgaagacttctgtagacttcaagaccatgaaaacgtcggctagacgagtgtatattccgtcaaggcaacctgtgcacgctctcctgtggctcgtgcattgggaccccctcgttagggggccgtctctcagctagtaaggctggaaaacgacgaagcccgtttacagcggcacccaggaccatgaacgcaccaaaacacacaacgggaaaactaggaagaaatttcaaccaattgacctgcacggtcggtgctgctgaatgagcgtagagtttgactcgagattgaggttacgcaaggtcaccaccccaaacatagtatagcgcattgcctctcccggtcgtcgttgagttcggtccaaattacgtaccttgtgcggaaacgctcgctgcaactctcagaaatgaattattcgagaaacatccgcgtgagaagcactgatattagaatctaggccagcgcagcgacgaatctgtatcaattcaacctcccccacggagcaggacaggcctgcgaagttgcggcacacgtagtgtgtctagcgctcaaggacgcgcgcgatcatcatcgcgtccgcgtccgtcgcaggcggaagaagactcgagcaagtcgacagacgccctccttactagttattctaggaaaagaagggaaacagagagaaaaaataaacaagaagccacgcattcctcagtctgcttcgcctcgcgcagtaattcgctcactgtctggaatagaaaaccggtgcggagctgtgccacataagcacggggctcgcgactcgtatgtttttagttcgacaacaatgtcgaccgtttgaagggtgcgggctgtataactgcggaatacttgagagctgcttccgcaatatatgtaaaccatacagcgacgcgagcattaaacggtagatgggggctcgggtgcttcacaacgggcgaatatataatccaggagttgtctgccgtctttccctctcacgaaatgtcagcagcggaggaacacccatttgaggcgtccgcggatgagcgtggctgcgcaacaccaatctcttcggaaacagctggtgacttttgacgcgcacgttcccagagtgagccgtaagggcggcggcagaagatgtgtttgcttcacatttcaaagagaggaaggtgtgctgcgggaacgctgccggcatcatcaaaagccacagaggtaattccggcaaaaaagcattcatgcggccggtagatccaggaacgggcagaaaccattcgaaatgctcgcgtgtgggtgacactttgtgctgaaggacatcttttgatgtcccttctgaagggttcctgccagcctctcttccgtgttaggactggtgcttttcgcggtgacttgctattttaggggaatgcagattaaagcgtgccgcgaaccctgtataaagtaaggtgatttctttggtttccctcgttcgatgtctcagagtcccagacgagaataagcctgtccgtaggcagaaacatgctcattagcagcccatagacacacggctttaaatgtcattacgtacatttttttggttgagttataccatcgactctaccaacgagtataaaaacatctttcggcatacttgtctcctctaaattcatgcacggctgcgtccgtgtgcacgggtgtgtcactcctgcagactgcggactacaggggcacctgcgtccgggcgcagagctagggcgacgggaagcagagtacgcaccgggcttgtagttccctttattgcaaacaggaggcgcagatgctgggtttcagtcctaacctcgacagcacggggatcgaaatcggatctggcgcggatgttgggttttgtactcgtgcgcagggccgaccacaacgaatgtcaactcgcttttgcacccgagacaagaaaagttgcctcatgcccgccagctcacaataacgacggacggggtgcggtcacgaacgcaacaccccgacatctgctctagaacacgcttcctactccttcctccaaggcagttacttgcggcggcagttccctcagatcttttccagaaaagcttccttcgtctgcgtttcgtgtccgaatttcaacaagcgcgttagcatccgttttttacgttgttttttcggcgtctcttgcaactgcggccggctgcggagaaacggcgcagaaactgtcaccagatcctgccttatttgctcagacgtcggctgcttcctttggtttgtcgcgctttcttcacgagtgaccctcgcgaccctgcaggagattcgtcgacgccagcagacgtatgggaccattcgccactgtgcggagacaccccgtgtagacagcagtaaagctgccgcaagtgctttgcaaga

SEQ ID NO: 491 - DNA, 1768 bp, Toxoplasma gondii
  source 1..1768: mol_type = genomic DNA
agacgtaacaaatcaacagagcgggtgacgagaaaaagaaaagcacctgtaggctgtgccgtcgctccatggggctgcaattgagggtgagagaaagctgaagaggacggaggtctgaagtcctttttcgactcctgcgaaggacgctgcacgagcagactgtcgaagaaattcaagcgacgaagctgctgcatggcggcactacagaaggtggagacccgagtgcatgcaggggagacggaagcggcagagagaagagtcgagatgcagacgcttcatagaacggacgcagcctgtggagaacgaaagatgcggaagggagaagaaggaaagaaggaagcagagaaaacggcaggaaaacgtcttgaggagctacacccgagtgcatgcagggggaagagaccgtgcagccgttctaccggcaacgaggtcgaccgggaagacgggatacaggcgctcgaactctgaagagactccccttgagaggagacgcgcgaacaatccccagagggcggagaagagaagagcggaacgaggacgcgcgacgaagagagaagagagaagagggaggcgccggacaagaacaagaaggatggacagcagggaggagaggtgaaagaggaagcgtctctcgcgcagacaaagggcgtttctcctcgtgagcctcgatcattattggcattggacggtccagggaatcgagaaaacaaagcgcgttcgacaactcgaggcagcagggagctggaaactcggtggcgagaacaagacacagggatttcttcggacaagccggttcagcagcaaacgccagcagaagagggtgagaaggaagagaaagaggaagaaagagaaaaagagagaacgatgcgtaccagccgtcagaaaagaggcgtcagacaccagaagagcaactggctacctggtcgccgtatctctcgttcctttgtttttatatcgttgcctcgcgtataggaaactccgaaaagagagcaacgaaagaagagagagaaacggagatacagagagaaagtgtgcaaagtaagaagcatacaagacactgaaactccgcattgaaaacgcagcgagaaaaagcttgtgtcttcctggtccatggttgggtcgtcgcgtctccttaaaaaagtcgatccgtgcatgcaaaaaagcgaagaagaagccacaccgaaaagcgagagaaatactcccaagtgttcttttccccgtgttttttctgctttctggaaataaagaatgctcaagtcttcctcccaatgctcgcagcttccttctctctgaaaggaatctctctttccctcagcttctcccctctccttcgctgtatcgacctgcttgggtttttttctccccttctgctttccgtgaacaaatctccagcttccagtccttcttctgcctctgattcgtctgtctggtttctctgtgcagcgaaaaggaatcatctttgccaaactttttttcgcgccgctcctctttgcagaggtctccgattttcggtttctctccttcctcgctctctctcccgcgcgtccactctgcttgcgtttgttcccaggctccttcgcctctgcgtctttttatcctctgcgtctctctctcctctgcgtctttttctcctctgcgtctttttcttctgcgtctttcatttctgctttttttcaccagtctcctcgtcatctcctgtctccttccacctcctgcgtctccgcttccgttccttctctctcagtctctgcttggcgccccagcgcga

SEQ ID NO: 492 - DNA, 4124 bp, Toxoplasma gondii
  source 1..4124: mol_type = genomic DNA
cgaagttcgttcagtcggttggtgcggaactgggaagaaatgtaatcacgaagagtgatacagtgaacatgcaattttttatggctgcttgtgtacgcgaataccttcggacatcatggtgtacttcaccgtcagtggtgttcttggttcagttgatgactgctaaccgtttaaagtctgtccgtttgcttactcgcagtaacattacagggaccaaaaacgcttgacgggaaacgtcagcgagtcttgacctgagagagaatgctgaaagacgatggtcaggttccttcttccgtcggcagtgaatgagtgcagagcagcagttcagctggagcaacggttcacgaaagatagctgttgtggtgttcaaaggagcgacactggggtcgcggttctgcgcacctggtattgtaaccgacagcaaagcaggcagttttgacggcgtagagcaagtgagagtattcttgctgctgacacacgcaagcacgtcttcacagtgccagtgtctttcgctgcatttttcctcgtgattgattaggacacatcgtagcctcgtttggagcaagaaacaattcgtggaacaagaaaccttcatttccctcaacaaatgtaacgtcccaaccatatggcagggatatatttacgtcccgttcccaccgatggctgccagagtcccgtcaggtctggccaaaaaagcggcaaaattcgacaggccgaggcccccgacaccgtcgctgtaccgggaatttgcgcggctccctctgctattcccgtttccggtggcataaggtgccgcaagaagagcaacaggtgctggggctatcagctgttgaatgccgctaccattcgctggctcttcgaggctgagcagtgcttctgtaggggtcgtggtgacgaccggattcggcgcagtcacggccactggcgccagcgcggctctcccggggacagctacaggtactgccgattgctgtacgacaggaaccgtcgccctctgagaaagggcgatagctggttgcacgacattgatgggcccttgttctgctaccgcttgctgtacaaccggaaatgccgcctggacaggagcagctgccactgtagctgctacagttgggtaataagatgagtacacagccggcgaagtgagtactggagcgcttgcagccgtaccaaaggtcgtataataccacggcaagtaggctgttctgtaccagttcagatacgctccgtatggcgtggctgtcatcccccccgggtaaaagccggctgccaatttacgcggattgggtcttttggtgaatgtgttgtcacgcgccctatcaacagcttcggtctcttgtactgcaatgacattctcatgagacgcgttcacttcacttcccgcgtcgtctctcttgctgcttgatgcccgctggtcgtcgtgttgacgggcacgagacccttggaattctcctgtactcgaagacaagtcagcttgttggttgccttcctcagagggcaaatcgcgacccgacccaccaaacgttcggccgtcagggagtcgatttttctcgacctgtgacacatttggtgagctgccttcctcgtgtccatcgacgtcaccgcttgggttgattctctcgtttttatttggaggagactcatcctcaaccacctggctggcggtaaaacttgaatgggacgccgacgcggcgccacagccactaaccaaagcacataccaaaagaacagcccagaaacgaagatgcccttgcttcatcacagccgacaggttgctgcgacgttgtgccttttgaagctccgtcatagtgctgtggaaatgagaagattttctctgtggggggctgaattttacagatgcctctgtcgttctaacaaatgggttcgcagggagagctgcttgatgaatgaggcaccaggatacacacgagtcgaccgggtgacgcacagattcgttgaggcaaacaaaatgtgaaagaagagccgcttcctttgctgtagtttgcccttcactgaaccaccttgtatcggattgcgacagagcgggctgaaaatagccgttgcccgatcaatctgctcctggagtcactatggcagtggcttgcgcgtcttggctagccgaggtgggggaaaaacagcatctgtcaggaattcgggcaagttatattgctcgtgacgcttctgtcactcataactgacacccgccaccggagggcaggagaaaattccatgcttctccctctctgctgtgaatgacagcgccgatattgacccgatggcgcacgcatatcggtctgtttactcactggggcaggggcgattatgagactaactctctctgttctacgtaaccaacaaagaagaagagaagccacaaccacgggaatgcacatgactctacgagatagctgtcgatctttttttaactttgctgcacaactttctcctcttacgtacagacatttaggagatagggacaatgccttagcaacgttccttacaggagagtgcattcgcggtcctatggaagaagccgcgtctgttggcagtgagcattgcttgtgtatttgtatcgaccgtatgcgtgtcgtttgctctcaccttacatcgtgtcgcagtaaaacatcacataatccttccctgtgcagacagcgactgaggtaagctgagaaattgctggccctgtcgcctccgagaaagtcttagccgttacggaacatgcttgacgagagacacccaaattcagagatacaggaggtcatgcctcgtcctgcccctgagctagtcttctatacaatctttttccagaaacagtagcggggcattgtgtttcagagaagcgtagtcgcctgtagcagatctcgttcgaatggcagcccgaagacttacgaggcttcttgcttagctcttgtttgccacgaggcaggcgacatgcccaaagcagcctactgttacttggttttgcggagtatcaggtttctgagcattcgcttcgcccgtgctggagcggcccgagggctctctagctcctaaggcagcctcttgtggagcttgccagctttccccggaaagacagctgcgtgttttttgcgaattcagtattactgaaggcatcccccggggtgcgtgcaagcgtaaacggtacacttcagatactggaaaatcgcacatggcgggacttgccatcaacgaaataccgtggcaagctgtggtacgtggtcgtgcttctctcctggctttgcttcctttcgataaatatatcatgtctttgcttaattaggtgtcctggaagtaaggcaagagggctgtttgctgaaaaccttccttgacaaacaggaggacaaggtacatcacccttcccccctctttgcctcaggcaagccagaagctctggcatttgccgtcgctctgtcaccaccaggcgcggcgggttcggtgcatccttgatggcacgcaagtgcccctccaaaacgactcttcgctaggaaacccaactgccagggttcgtgccccaccggctgttccttccttgtgttccggccgagcaattccttttcaccagaaatgtgttctccctcgtctagaaaaccaatccatcgagaaacacaagcgctatcagcgaaagaactggtgctgctcggtgaaacagctcactctccggagggtttgaaaagcggtcacgccgtgcaagggcccccgagcatgcgacccgcaagccgaggcaaagttgcaacggctcggtggtttactcaaaggaacgcctccagacttggtccgtaggtttccgaaccttgggacagctcatgtcgtcaccgcaaaacactttctctggagggtgaacagagagttttccagatctggggtggtcagagcgatacgcgcttcgcacaacaccccaccgttccgccggcgcgttcgcgcccagcatctgtcaagttgcaaaacctacgttattcgttgtcttttacaggtttgccgcgcgtgaaaggccgtgctttgtcctctctctgtcacttccgtttgaaccctcgctgacttcggccacgcattcacccggcttcgcgcgtggggtcggcgcatcccctccggtattttttggccgaggccaagccaagttcgcgcca

SEQ ID NO: 493 - DNA, 1221 bp, Toxoplasma gondii
  source 1..1221: mol_type = genomic DNA
gtacgttttccctctgcagatgcgtgttcttacagacccacctatatatatatatatatatagcggtccaacggattttgaacttgtgctacatatatatatatatatatatatagaggtagatccgccagctgaggctttcgaaaaatgagatatattcattgttgtagatctacagatgtacgtacagatgttgacgtataaacatctataataatgtatatatgtatatatatatatatatatatatatatatatatgtaaaccaccaagagcaagcgtctacagatatgaatgtgactgcagtatttttttctggttgtctgtcgggaagcgaagaggcttctaggcgaggtcttcatgttcgtgaggcaggcgttttttttcgtcggagaaggtcgcatcttggaaccggtgtgtttctgtgtgactcggagtcgttttccagaactaacgcgattacctctttccagggaccacagccgcggactctctttcgctctgcttcgacgtccgtagagagccttgaatcgagaaaaaaagttctgttcgacgtaggtgaatcagattcatgtaatgaaactcagtgcttcggaccccgaggaggttgttggttgcacgttgccgtgagagagtgtgacattttgtcgcgcacagtcgcttgtctcccgacgaccgcgagactggagtctccgttgtcgtcgcctgttttctcctcttgacacgctgtgtcgcgccgcctctctatttttccctataaagacgctgcatgcgggagtctcgtttcttctcgcgagttgtgtcgctttttctgttttcctggaaaacgccttttctcggccactgcatcgaagggccagccagggccggaatccgtttggagagctgttctctccgctgttctcttctcgtcgcgcgtttagtctttctctgctggattcccccgtgacttccgatcccgctaatctccttctcggcagcttctcttcgctttttctctcgtggacatccggaggtttcttcgactgcctccagctcctccctctccacgttcttttcgcggcactgctcgtccacctcgcgtctccactctctgcagatcttcatcccttctagccatccagttcgcgaacaaaaaccgctccaaaggcgccttttcggcgaataatgcatgaacgttccgcgaaaaaattccaacgtccttcttccctctcgcaacca

SEQ ID NO: 494 - DNA, 1922 bp, Toxoplasma gondii
  source 1..1922: mol_type = genomic DNA
tttgcagtcgtttcctctccaggaactccactgtctgtcttttccgctcctgtcccttcagtcttcgcctctggcaccgccgaaccgtccgcaggagacgcatatggctcttcccttccttttttctcctctttctcttctctcggggtcttttcagggtgttctgcgggtccacagaggcatgcagcgctctggaaactgcctccggattccccccgctcttctttcgcggggacagctggaaacgctgtctcggattctcccgtccctgcatgcacaggagcagcccgcagagaccctggcgcgggagcggcctcgggtgtacggacagtcccgtcggacggctccatcgctcgtgttcgtgcctacagcggcgtttcgcccggcgaatgcggaagagcgaagaaagctcttccgagagaaaggaaagaaagagactgttgtggagaaggaagaggagaggaggagaggcacagcagcgaggaaacacagcggaaggagaagagagtgctcggactttcacgaagcacgctagcattcacttgatggcgagaaagaggcgaggagacgagaaaaacgcgcgcagaaggagaagagagggaatttttgcagtgtgcacaagaaaagcctcggagacagatggacgaaaggaagaagagagactgcgcgcgacagaagaacgaaaggagaatggtgctcgaaaggaggcccgaagccacaggggaaagaaacctcatacagggggggaggcagagactcagaccagtcgagagactcgtaactcgtgaacgaaagcgagcttgtgacggaaaggaagagtttacacgaactgttgagacacgaaaagtcggagaccagagagatctagaaacgttaacggggacatccgcacaagtgcaagagaagccggagggagaagggaaacagatcgggagagacagcctcgcttgaaaaaactaagggcgtagctcattcacatgccctaaataaaggcctgtcgatacaaggtaatggaaagcgacgcttgcagagaaagtcttcgttgttgactgtcgacagagccacacagaggcacacgggaaaacgggagagacacagttttctgcagcccatgcactttgtgtcgctgtcgttctacgaggactgaggcgaaagaacgacggaagagagaagagtctgaggaaattgttcgtcggcagctccggaggaacagaagcatcgaaggtggtctccatatccaacatgagcatgcatgcacgcgtgagccgggtacgagtccacgagaagaaggtaaaactcttttctttccgctgacaactgcactagtttttcctcgcgcgaccaacgacaaagcagagagaaactctttccctgacggtacacgatgcagctgtctgtcgaacggattcgctcggcataggctctgcagggacacacagtgtttccttttcctcgccgacccttccgacaacccccgtcctctgctcccgtcccttccttcggcctcttctttctcgcttctccttctctcccgtaaacttcgctgcgttctgtggcacaccgagtctagaaaatgccgaagccatttgtctttgctgacatcgagcgctgacctggtcgggtgtacatacacgcccggcggtttggacgaccgacacgcgattcgcttgcacgtccatttctgcagttctggctcttctgaatggattgttgggtctcctgctgagtttcgactgtgcctcgttgtctcctgcgggtctgccgggcggctgcttccctcgttggcgtgttcccttccaatttccgaccgcacggtcgcggaactcacccgagactttgctgtgctgacgcagtcgggcctgcgcgaactggctgccgcgttccgtcgctcttccaccgtttccaaacttctcgaactatca

SEQ ID NO: 495 - DNA, 2979 bp, Toxoplasma gondii
  source 1..2979: mol_type = genomic DNA
ctcctgtatgcctatcggaacagatatccatgaaagtaaggccaacgtacttgacttcctgtactttgggcagcaattcgtcgttgatgcgtttaatgaagcttttgattttctcgcgttgacggagaaagcagaggaagacgccgtacatgtacgcgcggtaaaagcagcatccgtccttgcgtactcttctcatggtccatgtgccctcagctccgtgcagagcatcctcgtgagaatgtccggcttccctctcgttctcttctgcgccttgagctctgtcttctgttggactcgggctgcagcaggcatcccttctctgctgttgttccttgacgaacgtccgcgccttggcacagagcgcagggttcccttcgaaatcccgacacaaacagtccagactctccactttccctacaagtggctggctctcgatttcctgctgccattctggcaacgaattcccttcattctcttgaggtgtccgtggtgcttctgccatcggccctgcagaggtgttagggtctgcaacaggttcgacccctccgtttgaatccgccatgttcaatttgttcacaaggaaggcgagagtaaactgttcgataaacacgctttttcccccgttagacacgatttcggccagaagaagcaaggagggaaggtggcaaggcaaagcaccacgagaagaaaaagggaagtgaacggcagatggacgccagtgccgaagcaggaggccgccacgcgaaatttcgagatacttcgcagcatacaattcgtgcccgtctagataaatacaaggatgtcgtgagacagacgatcaaaggaggtgtggctgagcacggcagccatgtcggtcgaggggctctaggcacacacagtaatgaagttagtgagtttctatgtttcacgataaacacctgcctaaaagaggagaaaacaaacaaaagacgcacagaacagaggggacgcatgcagagaaagaaggtaaaaatgctctcgagcacacctacatgaggaggcgagaacgcagcggagctccggtgaccctcggccgaagatgttccagacggaaaaaccgacaggtcgcacccgcagtgaatacgggcgttgttgcccacgtttatgttggaggtttttttggtgtgcaacgaaatcactggatacagctgcacggaacacaaagcaacgcagaaaggacggtagaagagttttgagtgcatgcgcttttgaaggcgaggtgtcgttgtagtaattccagtaccagggtgaagcagccggctccatactaaaagacctgacacaaacagaggtgtggaccgtaaatggtacccttttcttgttctgatggggtttcatcgcagaatcaaaagtcaaacgacggaagctcaatccctgcctggatggaagcggcgcgcggctctccctatgctggaatacagccacgagtgagatccttcggcgaaaatccgcccatatctaactgaaaggcaaacaaattccctacgaaaagcccaacgtgttagcactagagtcgcttcggatggcagcctgaaatcccgaaccagtctcgttacagacaactgttgcatctattggaaggttgaaccggcggacaagacgcagtttatggcaacacaccccaagaagcccgaacgtcttgaaatgcgaacgacacaaacacaccgacgagatacgctgccttaatgagagatgctaggtatagcacctttttgtacgacggaatgatactggtactaagcatgctcgctcacttttcgtatgtatcagagtcagtttaccactagaacccccaggctttctccccggtttcttggcgggcctttcatcttttagggacctgtaaaggacatggtagtgactcggttgcttaggaggaagcttgtgtcaagacataattttctcgttcgtcaatcttattcgtttccgaacatcgcaaaggcattctacggtgttgcacctcgtccttagaggtactcattatactgtggtactatgtgctcagcacggtgagggaacagcggttgccgataaggtgcattttggccgagaaacaatctagaaaatgtaaatataagcaacggcagagatttcattccatctgcgctagacgtgtggagcgcctccatcagtttcatcctccagcaagttgccagttgcgccacgtggaagtacgagtagtgccacgggtacacgggatagcagacgccaaatgttttacacatttattgttaaatgcgactacgcacatgcagacatacatgtatgcatgcatggatgtgaaaacgctgtgagtggcggtcaaatattttcattcacgactaaatatgctcacagtttgtctcccagttactcggtcacctctctgaactacgattcaccggcgcttctgcttgtctcgtagcctacaccggcgcaccaactcgcccgcttagactctctctggaagtgaaacagaaattaccagaaaaaagtgaaggaaaccgcgcttatatgtgccctcctttatgcggctggtggctccgttgttgtgttaaactttttcaaacaaaaggtcacgacatcaaaatcagggactgaacagcggtggccgcgcgcggtcaccggggacagcggtcactactttcatccacgacaaccttttgtatctcagcgaaaagactctgcccgcgcgccaccccgtatatcgcggtgtcctgataagcagcaggaaggccgcgatgtttctctgtgtgtatttggtcggcgcgtctgttcctcaacttttcatccaagttttcttctctttcccttttctgtgtctcttgtaaacactttccctcgaaaacattagggggaaagttttcgcacgtcattttccggtcactcgttctgctggtcgaggatcgtcgcgaccgcttgctctctttactgtgccggcgcttactcacctggtgtttttcaaacatcttttaggcacaa

SEQ ID NO: 496 - DNA, 1717 bp, Toxoplasma gondii
  source 1..1717: mol_type = genomic DNA
atgtctttgcaccaaggtgcgacacagatgagacgagcaaagaggcgaaagcagcggagaagaccgcacagttggtttcggcgttcgtctgtcagcagacaagaaacgcgatggcaccttcgtggacgaaacagaccaccgaaaggaacgcaaaagtggaaaacgagaggaatctgtcaccgagcgagggacatgcccccatggctcgtgggaggtgtctgcggagacagcgacgcgcagaaaacagagacggacggagaaaaatctgaactgattttgttagacgaaggaatcatcttggccagcgcgagacagtgggagagggaccgataaagaatcgaaggagaggagcgaggacgggggcagaaaaacgaaacagacagagagaaggcaagttgcctacaaaacacgaaagcagtctggacaaccggctttgagtcctgaaaaccgactttgaagttgcagacgaattgcaacggcatgacacagtggcgactgaagatttacagctatcggcgatgagacttgtgtccctggacggtgcaggtagaacggttggtagtcggatcgggaccagcaaaggcgagaacgggaattctcgatctcaattcaccgcacgcttgccacccgcacaagagaaaaacgagacagaaggagaggttgacaaagccaccctggaaaacaatgggacttgccagcgtgagagaaatctgtgccacgagcgagccgaaggaaaagcgaagaagacacaaaggcttttcatgacagtatctccgtcgcaggaaagagagaaagacataaacggcgctgcaaactacgtgcagacaagccgaaagacaaaccaagaggtttttcggttaaagtgaaaatcggagacgtaaacctgtacaactgcgaaggggcgtcccgcacgaacaacgaggcagccacgggaaaacggaaccgttcccggcgcaggtgtacatacattcgaccacttcacgtgggacccgggctagccttcaaatgcacaaacgttccctgaagctgatgagggtttgtgttcatcaatgtgtggaaaccagcgagcagagcaaagggaacggaagcaggcaaaaaaccggctgggagtctgagccccgggtcgactcggaggcagagtgcggaaatcttgcccccttgcagcgcgcggaccgaggaaatgagacaaaattcgaagtcccccttcaacctgggagactgacaagacacgtgggtttcccagaactccttaggaaagaaaaactctgttcgattttaggcgttttccagatcggcaactgaaaaacgagttccgcaacgggcttgtaagacacaccagccaaggtctaggcatcagcgtgcggaaaagcagacaagggccacgagtgcctcctcttaccggtttcctcgcgcctggctgcctcaaaaacaggagaataaaactcgaagcagagccagacacaaagaagatacccggctagagtgtccttcgttgggtaaacatccctcccatcaccgcatagatgttgactcacaccccgcctgctttctgaaaaacagctagtcgagtagttcggcttatattcggggtctcgagtttcgagacacggtacatacacttattttccccaacctatcggcttatatgtggcgcgcgcgacctgcccagccgtcgcccttgggcgtgcgtgcaccgctacgtcggactatattcgaa

SEQ ID NO: 497 - DNA, 2471 bp, Toxoplasma gondii
  source 1..2471: mol_type = genomic DNA
ggaaggcatgactgagaaatcccggctctggagttccggtgtcttcgctggcagcatagtcgggactctgttttgcgcgatattttttccggttgcaccgcttgtgattctctgtctgataattcagtggcttgcatatatttggtactctcttagctacataccttatgggcgcgagagtgtcttgtggtgtttcagatggataagttcgaggttataattgaactaatcgagtaatagacaggcctcgtgtctggcactgcttgtaccatttgtgtgcgcgaggcgtgcattttcagccttagctcctgttacgcgtttctccccggacgcatgtgataatctgaacaagaattccccgtctagcacagacgagatagtcgctttcgggaatatttcgggagggagtatcactgacgaggagacccatggcagtcgagtctccgagatcaaaagactattcggactgcgtgtgcagtagtaatctgcgcatgccatacgtactttagattcactgtcggttctccgatttcgacaacgaagaacgccgcagtattcgaggagcgttcgcgaagtggcaagacctttgcgtggtgagacagcagaggatgcgatcaatgttatagcgtactcctcgaccaccgcaaagctgaacctcaattttgaaactgttccttgctgttattttgaacacttcgttgaagttccctgcgttgagcctttctgatagtgcacccgaaactagacatggtgaatggagacatgtctctggtagttcatgcggagtctcgccgtgatgatgtggtgctattatgtttagtggctagataacaggaactgaccgacagtagcacactaacacctgcttcttactgtgtgacagtctcgctaccgctccttaactcaacgatgacctgggatataactggggggcagcagtcaacctcaaaaccaaacggggaatgaaagcctacaccagagaagactccggtgccagtgatcacactaggcaggcagacatgggtgtcggacatacattaccttttgaagacgtagatgaaaatatcggtcgtctgaattgagtgacgctgagaacctgttgttgtgtggggtgctccggagaaagcggcaggactgccacataagcaggtactcagtgggaccatttcggttgtatggtgggacgttcacggaaaaagcatttaccgacaggcctaagcttaccttttgtgacgcagaggtgaactcattcctctctaaaggcgtaccagtttcccttctcgaaaggaacgggtgtcttttggatccatcgtgaccacatttgcaacgagcggaagtggtagaggcgactgtgtcggtcgctgcctttcaacggagaacccttgcagtacgccagggagataaaggcaacaaggatactctgcgcatcctgcggtaatacgtttacaggttccatccgggtacaccatggaaaaagtgacacttgatcacgcaggtgattattcacgccaagatggaaaacgccctacaggcaagatacaacactcgccgctaacgctcacctgttccaccagggagacgatgatgcacctggagtcttggacgtctaaactgttttgagttcttgtcattgaagaaaacacgccgagtggatgtgcgagaaccgcgggaccatgtgtggctttggatagttctatcacgtgaaatcgcggtcgaccccacttcatccttcgtactccacgacgacccgagaacgtgcctgcctacagctcgcctcccagcgcactactttctgcgacagcacgggcagtacaagcgctctccttccgggtacgacagtccgtcacagatgtttcggacttaccctgagctctggccttgcatcattctccctttgcaaacagcagctgtcgccctgcccccctgttttacttgtgcctcgccagcaggcaagtgtcttttggaactgttcgctcacgaggtctcacggaggaagacctcatgcggaactgtgtcgtacacttatgttccaaaaaagttttcctcgcatcgaaataacaaataacatcccggcagcaatcgtaaggtggcgtatttctctccttatcccctcacactcgtcagcctccaccgcgagtcttccattgtcgctgatatgcatgttggcgtttcaatgtgtatcgtgttgcagtgagctaccacgggccagaatcccaatgacagtgtacttgcgctccacaaaaaacgcgaagtaaatggccgagagcttcgatagtagagtgtgctccttcagagatgcggcggctgaaacagatttctccgcgaaagaccttcgttcgcactgtgtcaatggtcaaatggaaattcgctgttcgtcatcgcgtcgtgtctgtgcgaagtgtggattgacctccgcattatcccaggctgcaatcggagagcgacacagggtggtggcgagtcgcgcaaca

SEQ ID NO: 498 - DNA, 5008 bp, Toxoplasma gondii
  source 1..5008: mol_type = genomic DNA
tggcagttgccgacgaagtaagaggcgaatataaaacactgttggcggtagtgggggaaaggtcagcctcgtcggaggcccgaagcgaggagacaaccgaatggggggaagactgagacgcgcacgttgacggcgtacaggcggccgcggctggcaatccagtacggtcgctgttgttgattgggcttggagtggcagaaggaggtgacgctgcagttgagagagatgcgacagggttaccagacgggaagagagagaggagtgcactagaagacgctgatgatgtgggggtctggagagccgggcagaccgtcggaaaacaaactgaagctatttcggcatcggaagtcagcaatttccctaaccggtgcttcactattgccggtttatcgacgggagattcctctccaccagccaggaacaactgaatgttgtcttcgttgctcggtaagccaggagcctccattggctttacaggttctgaagtatatactgcatccgcaagcgaatcagaggatgactataaagaggcacaaactaagggtacgcggtcatcaaacgccaccagggtcattcgggcccctcatgaatcacagctgcacacggttctaaagattccccactggcgtcctgtgagtggcaagaaatcgcatctccgccaccaacccgatttccctgccgactctgaattcagaggacaaaaagtctcgtgttggaaggaatttctgtgagaagtcggctccagcaccgcagagaggcttctccaggtgcttgcgccattagccggatatcagaggagtcgaaggcgttgccaaacaaaatctgcgagagtatgcggaaaaagtgcccaagcaggacgagcattcataggcgcggcgaaaacttgaccgagtgttgcaaacaccaacgccggcatctgcttcacactcggcttgtgtgatacggtcccctcaaaaaacgtgacgggagacttgtgattcgagagaggaaacaaaacagatgcagcgcagaaaagggagtacctcgagaaaaggtaggaatggagaagaacagacgagcaagcgatgcggatttcctccagatacatcgcagttccactgtatgacgtttgtttctgatgtgtgctcgcactgagacagcagaacggactgtaaggaaactggcaacacgaatttggagggaagagtcgagaggcaagttcggcccggtgcgttacacgtcgtacaagccttgcagatcgacaactacacaactgcaaagcaaagagatgcagagatcatgcatggaaaagacaaagacgcttgggttgcaaatgtcagaagcggcgacaaagcgcatcgcagagcaggcgttctcttctcagtgcgagcgagacgcaaaaacgtggggcccgaatacgcggcgtggctcgatactctcagactcagttttgataccttaagcgaggaattgacctcgtttacgggaaaataaaatgcaaatttgaccaggagaagcacgatcaatccgcgtttccaagcagcgaactcacacttgctgggccgacgtcagacgcacggcagacgcaacgaagaagcagaggtggtagatgagggtgagggtgccttgtgcggccatgcgcaagcgatgaccaaaatgacgacgggcagcgccttcgctttgctcactggcggggccactctcgtctcatgtgcagtgcgctgctgcggtagtggaggaagaaacggggggacacagcggccgaaaagaaaaggaatcctcaggagacgcacggcatgtcccggcctttctccacctttcaggcagcaaacaagcctttacagaaaggtacagcggctaggcacgtttggggtcgtaaaagaaagacaagttgcgagtgaaaccacgccaagaagtgaccgccagacgagagaagcgtgcggcccgtgcaacacacggacggtcccaagaattcgagaaaggactcagaagcagaagaggcttagaggggtgccgttgcttccggggacacaacgggaaacttgaaacacaataggaacctgagaagtatcccaaggaaacaaataaatttaactgttcggtttacactacatataagccaacccttcagaaaatgaagaagacaaaggcagtcgcgaggggcgtgcagtcaggggtaaccagacttccggcctgcttagaagtcaaggccggacgttaatgctgaccagggatgtagagccaagaagcgacaaggtacgtttaggtggaagccttcagcttgttccgatgcattaatcacaagaaatggctatgggccagtcgaagccacacatcagtccgacaccgcggccacagtttgttccgcaccggtcgtggagcgacttctggaagcgcgagtaagtccgtttcacatgccgcgatgattgacgagactccggcgtcccggacatgactcctctgtttatgaaagaacgctccagagggtaacagaacgaaggctctgacaggaccagagaaaattagtttcaaaggagcttggtacaagccaagagcaggcggcaggcgggtggaccaccgtggacttcctgtctcgtccttcttcgaatcgctgtacgtcatcgttgccagttgcgcgggcggcactatctcatagcacctgcgccgtaggctgctacgcctactaatgtgtcgtcccatcgatatcattatgggggctgacatattccaaagtggtaacgtgccaaagattcacctaccggcggggcgcgccatgctgattctgttttagagatgcatctagagtcacagcaatgcgatcggcgagtatagaggtgtccgggagtccaacccttcgctccaatatatgtggtcactgtttctgcgacacttgaggtgatcccagtcgcggaagcagacctgtcgcgcgcacagatggtgtcaactgctgtgtggaggtgcgacatttacttaactctttagcacacacgggagaaatagtgatagagtgctgctgcagaccgtgcatctggtgacggctttaccaccagcgaaactgtcgactcggctgtgggttcgatctctctcccgggagggccctccttggcagtgctccccaaagcaggcattcatcagaagagacttacaaccgtaccctgcttagatatattcaggatccaatgcgtcgcccgacacgtgttgtggtccataaggtctggattcgcatgctgtatccttcgtcccagatcagctaggttggccgctttgcgtccctgatatattttctgatttcacttgttgaaacattgttgtccccccgctgttgtcgtgcgctctgaatgaggagcagggcgcgttcgtcattctgtactaagcaacgctatgcgaaccagatagtttaaccgtgtgtttctgccggctccgtctggaaataattgttaccgttagcacggatgccgccggtaacccagcaaccgcagctcactgtagagattaacctcgaggtgacgctcgcctcagggaccacacatttctcccatatgcagaatgcgactgtgccgtcagtggcttcaatgggggaaaggctgtcgagttcttctgtgtaaacacagcggagcaagctcatctgcagacacaacgttgtggtgaagatcacttacaaaaacggcgtcgcactcacctcatctggaccaaaaattatcttcatgtcaacgctacgactgtttgtgagggtgcttccaccgctgcgtcgtgttccaaatgaaactgagaatcagcttgggtaaaaattcccacaccagacgaaggtaaagacgaatgccgccggtcatctttttttctgtcattctccacacactacacatggtgcgtttttgggccaaggttgcgttgcgaaggctgcgcgtgtgcgaaaggcgatgcgttaaagaaattgtcaacagctctcgcccatttcactccgcagcatgtgcttccagaatctcccagggtgctacggacttgtgtttgtccttagccagtatgaagggtgtcggttttagaactaacggcgacagatgcccgaccacctcatttcgaaagtcgctgcaacattccatgagctttgcggtataagaagctgctgaagacacccacgagcttccgagagggcttcctgtcgtatattatgtgaccacgtcgtcagattctcgttacacaaaaccgaatgtaggcttgaacggtggtggtgttacttacagtagaagaccaccaacccggacacggagtcaaaaggccacatttacgcttaatgcacgccaacgcaggtccgcactcccatcccatgcgtccttgggacttcgccaaccacccagttctctcttactgagcttagaatggcgcggggaaatttgtctccctcagaaggatctgcaaggtgttgcgctcgaagttttttgtggttatgcgcagggcgtagccagacacgcagtaccctctgaaagttagcgtctcaggtctcggcaggacgttgcggcaccgaaatcagttgactgttgagtgcgataggagcaccaccacgagcaacccgatcccttctgcgttgcaagcctgtttcctctgagcagcgttttcgagagtacatgtttctgcctacctcaccgccgagcaacgggagctgtcacagtgaatggaaacagaaacacttgtccctcaagggcctaagattggcagtcgtatgatccctcccagccttggtgggtcctgttttgatgctctgttgcgaaaagatctagtgcgttgggtcagtgaagccaagttcatgaaacacttttctattgctgctgagttcttgtgggcagataaagatgtcgcatcacatgagttgtggtccgacgcttcgctttttctgatacatgtatttgacgtctgatcttttcccgaatgaaaaaggggttgcttcaagtgcatgtctgctgtcggaagcacaccggcccggtttggatcgcatgatgctacagagtgtctcccggaaaaatcgtctcagcgacca

SEQ ID NO: 499 - DNA, 3516 bp, Toxoplasma gondii
  source 1..3516: mol_type = genomic DNA
gggtttcgaggttgctggaggccactgaaaacgaggaaggaaggttgccgagcgctgcggggacaggtgcggtccaaacgcttgcttcggaactagctgctgggtcgggggtacgaggctgcaaggaaaagccaaacggcgtgggagctgcagacggaaaatccaccctatccagaatggcggagatgaacgcgattattcagtgtatgcaaccggaaagaggcatcgtggcgtgggaactgcgaaacccccctcgtgttgtgacagcaaggggaagaggcctccgcggacaccatcagggtcgttggcgcgagggagtagagcaccggcttggggagaacgcacatgataggtctggcgggattcccggcatgtttgcgcgtcttcgtattctgaagaagtcagatgctgcagagtcccggagagaaaacagcaatgaagaacacgctgggcataccttgcagagcagcgtgaacggagagagtgagacaattacagccaccgtggcgggaaaaaaggaacgttttatggttcaggtcggtgctacttagactggtgttcttagccgtataaccagagagtttccaacacgggaaggatagtgactgcgttccagcgacaggcatagtgacttctgatcactcagtgttcagttgccgtctcgtttggtgctgggagagtttcttttcaaagaaaggatcgggccataaaagtgcgcagctggtgaaatccaaccaagcgctgaataaaggaccgtcaggggtgcctgcagatcagactgtcttttcccccattgtcctgtgcaacggtcacatatgctatagacaccgagtttagtcaacaaaaggttaagtactttcggtggtgtgttccaaggttgcaaaaccccgacggaacccccgacactacacccagttgattctccataatttctgtgatgcgcactctgcggctggtgaaccaggaatacgaatgcatcggtcattgtgcgcatgtcaagagactgagcgatgactagaggcagtctcgtgagggactcattcggtgctgaactcccgctgcacagccggaggaatgaaactgtctcctatcaccgttaatctacagtagtacgcaggaacagcgatacccatgatttggagctaagcaaaaacgaaatccttgtaggggttcgaaatgacacttccctgtcgcagcccatccactctcacgatttcaattcatcgcagcggatcacccggaaaggtttgcgtgcattgctctatattgtcggtgaacatatctcgctccgacataggttacggaaataactcggattgtgtacgaagcgctaactgtatggttggaacgctaggcggccgtagattgataccgtaccacatcgtgtatccactttcctgtaactgcccccacacctgattgcagggcctctattcaccgtgttaggatgacttctgtcaaacatctagtcacatctatctctcacggggatgcgcagcacacacgcgctgagtgccgggattcacggagcgatgcacacttcggtgtaacatttgtcggcgttttgacccataccggcaatgcagaaagcgatggaggagaaacattcacagggggacagactgtcaattggcaaatgtcctgcggggctgcagcgctgggctaattctctggtacaccttgtacctacagctgtagggaacatgagtaagacctgtggtattgtggacgcatcggaaacgcatcctgctgctgttcccgcttgacgctcccacatctagtgctgcacgtgagtgttcctctgtgtttagcaaggggcttactctgtgttggtttgctatgagcatagaaccaatccggtagtaaggtataagatggtaggtggtacatcctatgccctccgtggtttgttcttcttatgtgaacatactctttaaagtggactcagggataaacgtagtgattatcctctcactctttacaactgaaactcttcgggtacttcgtgtaagcaagcggcgcagcgagcagcagggaaaacgattggttcttcgtggcttctgatctactgctctgtcgaagcctcttaagaaggatccttgtgaagacaccaagtctacacaaacgtttcctcctgagtccactcgtacgtcgaaacattttttcggctttgttgaccacacagtctccgagaaaccccacagacttgagtctgcagactgcagcccatcacggcggtgacgaatttgtttcgtcgtggaagtagcacataactggaaggagtatgtgtttacagaaaagcaaatgctcaactgaagttctggaatgggtcccgtgcctgtgatagcagatggggatggggctccatcgctcacacaacgggacttgcgcgctggacgtctcagccccgacacagttagacactgaacgctgccaacggcgttcaataaatttcatgtcccgatgagatgatgtacgaatacgctttcgcagaaggcggtgatcagtaccttctccgacttttttgtctcaataggagcatagttctgccgtttggttgtttttgtagactcaagtatcgtcggtagtaacgcggttgaagccacccggtagccgggcgcttgtcaacccgatagtttttgtgaccagtaccggcacttagcgggtttgcgtcgcggaaacctgacacactttggaaatcgcgaaaatgtgcagtggttaggagagtgagatatcattgttacacaccaagacacactcacctcaatagtcgctattggaaaacggcttccacgacagaagtcgggaggtccagggggaaaatcgtgtggctgggggtacgggtggcgccggcggtgcagcgagcttttgctggtacgccttgccggaacgggaaaatttcgtgacggaacatgtggctttgcatacttgtggagtaatgacggggcgtttttgaggtccgcgaaccgagccaaagttgcaagtgtctccctacttcctcccctccctacttttgagctggtagcggaatgccggtggctttgtcatgcatccgattgtgaatctcgccgcatatttgcgcctcatttgtgcctttccatagttcgatactcgagtgttgcgggccagtcataccaagggtgtcttatctagcccagggaattgtccgaatttcctcatcaggctatgcggagatggccgacggcgaaagcgcatacatgacaaattttgtgagcagcttccgcaaatggcgttactcggagctccacctgatttttgagtctgtatagtttacaatgtgcgtgtctgattcgtttggtgagataaagtttctccgtagagacgggctgctggagccttttcccaagttatcgatccagacttctgctgctagtcgaaaataatggtggaaacgtgaaacgcagctgcagttgagaaacagtcgttctctccaagctagtccttaggctcgccaggagagtaccgttctattacctcttcagttgtaacaagcaa

SEQ ID NO: 500 - DNA, 4293 bp, Toxoplasma gondii
  source 1..4293: mol_type = genomic DNA
atgcaccttcactaggagtatatcgtgatgcgatcttgcaactacttgctcgatactctaatggtagaggactacactcatccgactgctcggtaggccccctaggtatttccgaagaacaagtctgtttatctgcaagctggtaaactacagcagtggcttcatcagtgtctttcacaccttcaccctgactgctgtaagagctgcacgcttccgtacgattcgattctgtgggtggctgctgacaagatgggatgccgttggctccagcagcgtcataattcaactggctagcagtcctctgcgaaaccctagtgtctgacacatgtggcacgggagacgacgccttctcttgcaacttgaatggatcgtgaaggagacggtccattccctcagaacaggggaagatagtttccatactatctttgctgggagcggttcgccccttgacggaggcggaaacaatctttggcaagcggcgggcctcgtttcgaacagcaagcaggtaggcttccgcgagcggttgaagcaactcacaactagcttcagcatctccgcatgcatccactgcactggaagctgctgcaacaacttcggttgcgtcacagaaggcgtccaaggcggcgctggaactggccaccggcagaacctgctggggaaggagcgagtcctcccacccgtcatcggggactgagactcctggtacttgctctgatgcattcatctttactattgatgaagacagcacgaaatgatgttgagtaaaatggctacataggaagaccaaaattgccagcaactttcgagggacacgattgtagagccacgactgagggaccaacaccggctagtagacaaatggaacaggcaccttccgcggaaatgccagtatcgcgactaccatacagctgtgttctgtgctttgggagtgggaagaacagaagcactccatgatcctgtgaaatggcttgagagtggactccaatgcgggcctctgaaaactttcagctcgcatgcaccggacggccttcgcgtaggctcgcgtgctttttgacagtgctgaggaacatcactgccttgctgaaggttccgccccatccgatagggcatatgaatcaaattttatcaccgaaactgcccatcaagtttccacgcgtgacattcttgttgtttttaaaaaccgctgaagtgcgtacggtctgaatgattgcatgcccggttgcatgcacgccatccagcagggtccgagcactgctgaacgctaccctcgccaacaggtgcgatgttttcagcgttaataattgaaaagatctccatatgaatgcaattcggaagggacaggtttacgtgggtggtttcctggtactcggcgtctccgtagacttgaggtcggccgctgcgtggctgttgaacacttcatttccataggacgctgtaaatggtatacttcttctgccttggacacactatcccatccactacgtgcggcgcagtggataagttctggcgatgggacatctactcagtagagcggattcaatgtgtgcagcacgtccgctgctccttaacacagtagctatgcctttctagctccgtcgtatcatgtggcacactacgacgtgtgaaagttacaccatgcaacaccttgaaacaacccgattttcgagcttctttgaaattatatagcgacatagtgtcgtatacaacctgaacggaacttaagacagatcagcaggggcttttgaaatagcataggagacggcggtagcatctaaacgaaaatcgttgttcttggacgtagatgcaccggtgcacgaaccgacagcttcagaatttgcagtcgcaggggaaataggcgttgcgacagcagaagtgtctcgtaggaaatctcgactcatcattgatttcattggaacattgagttatcaagcactagctcctgacatctacacgatgtgcgaccggtgttctagcggtggttcacgacagtctgtcagaggttcaaacacctgaggtggcagaaccgagacttctccgacattttgtcactctctcgctgtggcgaaagatggctactgacttttagagcatgcgacgcaccagcgggattttccagctggtatcaacagaaaagatgaaatgcagttagttgttaatatacggaaatccataaatgtgttgcataccaagtatgtagacacctgcctccagtgtacggattacatgcaggtattcctctatactcacacagacgcttatcctgtaggttgccccgatgagaaaccctttattctccgtttagtatgttgtgtttacaaacacgcggtaaacattgctttgcagcttggttgagacgatggcctgtacttgcgttgggggcatttcacttcatatagttgagtctgaagcacttcgatgaggcactatatcgcccgcggttcgtcctggtaccccctttacagtgcgctgtggtcatcctgtgccgcacccgtcgctggtttcgacgtcagcacgcattagactgcgagcctgcgagtgaatctgtggtctacataatctatcatagtggaagccttttggcaaaggcaggcgatctacaaaatcaaccgcttgtgatgcagtgcgttctgaaaacgatattatctgtggcatgtataaaacatggacgtagtctgaattgcatgcgaaaataacagtatgagggtgtacaggacgcctagtgaactgctaagcaacatgcatagagcacccaaccctctgctatgatccaactgaaatgctgcatggatcggtgctacagcaatcgtgctgaacgtaattagaccacgagagcttcgtgtgaaaaccgcaccggagtgtccctacaatgtttgaccgtcattaagcgatgaatcttatttttcgtcgaccaacacatccgatttttgaatgtcatgccggaggagttacgcggtaaagccttgtcagtcgagaacacggctccagtgaatctgttccatctcctgttcttgtcatatttggttccacagtgtcgatgaatctcccaatgtacgtcattcgttgtagttcgcgccgaaaatgatgtacagttttctggccgcgacgctcctcctcccagagcgcgcatgttcggagcaggtcggggatcacctgtcccctttttctgcttgctccaccttattgtttcggaatgaaaagacactgcccattgttgcgtcaataatctgctttgtttccattttccccgccgtggtttgtgcccatccttttcttcctccctgcagaaaatggcgttgtgaaagatcgccttttgaactggcagcgtacggggcgcgatttgctcatgctgcggaggtgtaatgctggcttacacagagcgtattgaatacgaaatgtgcctgtacacggacttggaaaagtcagccggtaaagatgagtcgtaataaaaagaaaggggtctcctctagtcagagacctccgtgtcgctgtttccactcgacaattataccacagtagacggtttggaccaaaggagcagcggaaagcagaggtttctctgtcaaccactgttttttggtgccccagtttgatacaagcagcaagaaaaatagtagctgaaggtggatcttgagtgagggtttccttcaagcaacttcccccaatgtctgcaagtgcgtgcatctgtgttctagctcccccattcttagcgagaattgcatagtcttgcaaggccaaccgccgccaaccgctgtcaatgaaacggattattcagccagctggtgtaccttttgcccctgttgacaagatcacctccgagctgaacccgccggtgccagtcgataggtggtcaagcatgatggcagttgttttcctgtttttttcactcgtacatccatagatcgatgctgaggagcgaagtatccccctctcgtcttttgtgcagttccggcatcacatactagggagcacttagggctcttcattcttgcaaacgaatgcatgctttggctgaccaggtctcttttatgcaggcagttattgtatagcatgaggaccaaggattgtcctttgttgtcagtacaattggaccaatttgtttctactttgttttcaatgccagtgaaaaccctgtgaagttgaaatcaagggcgcgtcttgcgaaatatactatgtatttgcaaaggaccgcgtaaacactgattttggacattattacgaagcgatactaatgccgctcaaacccatcatcatctgcgcctactaagccaagtgtgttttgtggctctgcaacca

SEQ ID NO: 501 - DNA, 1826 bp, Toxoplasma gondii
  source 1..1826: mol_type = genomic DNA
tacatcctctgcttctcccagtatttccgattttgctatctcctgtgtcagtgagcctcaactcgaccgtggcgggagacgagccggaggcaaagggatggagttttggacagcgactactcatgcggctgtggcgatgaattctgtcctgattgtcaaaatatgtaccatgaagtttttctggaatcatcaggacaatgagaagctggtgttcaaaggggcatacatcggttggcgtaggtgttttccaccacacgccgatgccagagcacgtgaaaatgccgacggcgttcgcagacagcggcgttgcaaagggcatgcagccagtggtaacacctcgcgactagacgttttgtgcatggagacacagcttggacgcaaagtgacgcgaagtagcgaggcaagggtgcttttccaacagagaaaccacctgtagtataggtcgtgcgacttcttgcaattagctttggtggtttcacgccggaaaccgtttgcgagcgctgcggtggagaaccaggggacatttagtttggggtttcgttgaaggaagccgacatgatagctgcatcgttgcgacgcttttgctcctgagttgtgtacgaaaaacggatacagttgcgtgagtcaaatcgaatgcgtgctgaagacgacacacacgttctgtagttccgcagctctcactgctcgcccatccgaacctaattgttgattccactgcaaacaccatacacaggcgacagaagtctatcagctgctccatgcgataagttggctgttgcggagacggccgggaacttggaaaagccatccccaacgctctttactgccgccggctctctaacagagttgcgcccagctaggtgtctgacaatacgagctctgaagtgctacaactcgtcaacaggagtacgcttgtggacgacgccagagggtgaaacaaagtctgtccttgctgccatttcctagtgccacattcatgccctttcttctttggtcaacagtgtgttccatgctccctctgttctgtcgagatcgcgccgttttaagttcttctggccgtagcacaatcgtccgagtgtgggctggagttccgcatcgcatgcatgcacgacagcgttgaactccgaatttttttctagaactcgagttttccttccttttttctttcggtcctctccgttgcttgatcgcattccaagatccttgcagcttgggagcggtcgttttcctgtgaagggttctgccttctcatactgcactgcttgtttccttgagtgcaacacctcgcgaaacagctcctgcatgcaatttcttctttgctgtcgacgactggtgcttacctttcgcttccacttgagtttcccaggagctcctcagcgttttccagttgtcagaagagcttgaactcagcgactggcagtcacggacgaacctttctgctggccgagaagtgttgcacggagtctggtgcgttccaagaaccggcgttactagagtttccttgcggcggtgtctggcaaacacaagtcttgtgcaagttgaggatttaaacttcattagctgtttgccgtactctttttccgaatccgccgctgacagcggcgtttcggcgccgtcactgacatgccccctgccaacctcctccacggcgcaattgtcagtgaatcctcttcgccgcgacagctggcaaaatcgacggtaactgagtctttttcccaccctgttgtctgatgcaacgcggttttcgaagagtactgcttttctgcaaaactgacggcgcactgttgcgctccgtccgttttccgctgggagttttccttccacaa

SEQ ID NO: 502 - DNA, 2488 bp, Toxoplasma gondii
  source 1..2488: mol_type = genomic DNA
gaaaacacaaagctgctttttctaacgaggaagcggatctaccgcggcgcaagaccggagcgaccatgcatgcaagtgcgaacgtgtggaacagccaaggggtggaactagaaacccgatatgttttgcgtgcgaaaaaatatgaacggcgaccaaccctggcgtgtcagcaccttcagagtccgtatttgcatctatcatctcgttgacatcagctgcggccgtcaataaagtagcgtagacagttacttatatataaacgtatttatgtatagtatttgtgtacgtacgtatgcgtgtgtatgtatgtttgtatgtatgtaaagtcaatgcgaatgtgtaggcgggcatgtacagagccggcagcatgtggcggggtcaccagattcgcagcacgtgagaatcgcgggttaaccgaagagaaaggcttctgacacagcttaaggagtaggatgtaaccgccagatccgccacctcctccctatattccatgcagattttggagtaggaaggcagcggcatacacccagcgacgggaggcgttctccttttacaataaacgagcgacaccagcgtcgaagcggaggcttggggattcacctccagaagttcacgggggtggactcgttgccgcagaaatgctcgagctaatcttcaaatgctcctctcgacgagaagaaacgagctgcattttgactgggtgcgctcaagaggctgcttctcattgtcttggtacatgggaatccccaccaggtttctacttcgctgcttgcaacaaggcaatgctgcgctattctcaatgcgtgtgcactgcctatgacaccgcttattcccccacacagtttggcagttcatcatttccctaactccggcgaaaaacgataagagcgacctggacactttagcagaagaaaagccgaaaagcagctgctcattacatcgggctgaggttccgatttacccccagttcacaagggatacttgtttgcttgaaacatggtacgcagttcaggcagacagctgaaaggtgtctatcaattctcttgttgaaatccttgaggataaccccgttttacaaggaacaccgcattctcccctagtctcgaatagtggaagaactagaaactgggaagcgagtgcgctcatgaaaacagtacgcagtgtgcggaacactcgattgatgtgtttctcttgcttctccattcgaaataacagttgttccccgaaactggctttcttgagctctctgaatgttccgtgtttttcatttcctcgggtggcccagcttctctgcatttcttctgacagctccaggccgctgagaagggttgcgcaacgagaagcattctctgcgtttctccccgtcgctgtttagccctctaaaacagcgcacaagccaaagtcggacacggggttttagcgtttcttttgtttcgcgaaaatctaatccccgcaagcaatcttcatgaccaatctgggaatttcgtgtaagttctgcaagtagcgtaatccagcaagccgtcggagtcttgctcaacaagtcattttgccgctaaacaacagcgtaaataaaagccacaccttccggttttctggactgcgtttcgtggagcaatgaccagccaacagaaacgcggcagggaattctgggtggtctgtagttctcggctgtttgtgccacggtctcaacagagctggtcacagcacaccgtttccaaaagccctccatcgtcgaaaaccttctgaaggtgagagctttgcgcgagttcctcgcggtaaaaatgctgttctgttcgagtgcttctttttcgcagtctgttttcagtctctccttcgtttcttgtttccgactccgtctgctgtctgtttccctctacagaagtgcccttcattgcggacaaagcgcgtctagagttctattcctttccgtcggagtgcgagtctcctctcatgtttgtgggtagctgagtgtgtagtacgctcccccgtgagtgagagcttcccttcgtctgcctcgtgtatgtccggggttttcgtgcccgtttactcttctttctgatttcggtcttccacgtcgtccgagttgcagttcccttgttttctcagttgttgagcgttcgcctctacccacattttcaccgtctcgtctccgcgcgcgcgggcaccggcctgtctcgtctcctgttcgccgtcgcggatgctcccctcgtgggcttggacttttgctatgttttgctgtcgctgagcctccttcgccgctcccggatcctcttgtttttctccttgttcaggtttttcgcgcggcgcctcttctgtttctctcggcatccgtggccgttcgcttgccggttgtccagaggtcaccgcgcccgggccgcgtttccgtggacgatcgggtcactgctgcggcgactgtgcttttccaccacttttccctccgcaatttctctctcttccccgtttctcttcttcagcctgcgaactgcga

SEQ ID NO: 503 - DNA, 2220 bp, Toxoplasma gondii
  source 1..2220: mol_type = genomic DNA
ctttctctcgactcacgtcttctcaagtagaatctctgagctagggtggcgtccttcagtctggcacaccggcctccctgtatacatccggaagtgaatgtgagcagacttgtttcgctagtggacagaggcaattgtgcacatttgcgcattcaaaaagttgaaataaaatggtggggacaagaggtgcgggataccccatttgttgtttatctgctgtctgccttgccggtgaacgtgtttcgagcttcctcggttcgtcccctctcgttttccctgggtgcacgcgttccactttccactggactccgaacagagacatttcactcctagtttccggaggaacgcagcccaactccacatccgcatttctcctgaaaagtgcgtgtgttaggctatcagtctttgaacaggagtcggacgcctcgcctgcgcgttgggagcctcattaaacgggtcatcgatgccaaactaggtttcgtcgtatgacacagcggtatatctgcccagtaatcagagacagtgtagcgtttgggctactgagtaggactccagtggtgagaactaactgtagttatgcagcgcgacaaagtgcacttggacaacgagaacgacacgaactggcaacgtcctggcgagatacgcgttctctgcagcttttcttcccgcgttgaaggccatctcagaatgcttggtgtcgacgtcagtgctctgtgtggggtattgcaacccacagttcacccctgtggacgatttgcctcagttcagtctctggggattggtgttctgtgtcagcacatgtagcagacgcagcgaaactctccggtggacgagttcctgccttcgtagcacacgctgcggagatctcttggcaattcatcccgatgtctttaatgcacttcttcaatagcaagacagtttatttttccgtgccaagccatcattttgctctgtttatagtgtattctccacagttagagaaatgtaggttagatgaaagctatatagagtgaaagtcgatctttctgtcgcttctatatccatgcggaacgggaggcgtctcaggcaactttgatttctctttccttgccctctgtcctagacccaaaactttattccacgactttctgtagagaggctctgtcagtcagaagcatccaagggacttctttctcgttttctctccctgtaaaatctcacataaatgcagtagccagcagaaacccgcttctttcctctcttgctagcgctcgtggtgcttatttctctcgacaactcgaggccggaaatcacggccagacaaccgggggtgaagttcagcaaaggagacacaaccacttcttctgtcgccttgtagccttccaagtcctcatcacagaggccaaaaaaggcgatgttctttgggtcagcggaaaacaccggaagggtcacgttcggggagccacgaattttgtctcgcgtggaccgaaaagaagatctgaacgatgaacttgtccaaggagaaccgaaatctcaaaaatccatttgaacggaaaagaactcccacgcctgcgtcgctatgtcactgctcaccgaaggagcacagcttcagatgtacacgctgttttggcaagaacgacacgaaagtggatacgcttgtgatcgagtgtgtacaaaagatcggcttacgtgtcaggcacacattataacggaaatttcagcttgttttcaccgccgattctgtaactgtatgtgtctctgtttgagttcaccaggaaatgcgaaactcgtgaccgtttcgctgtcttgcgggctgttttctacactttccctcgacagtgacttcaccagagacaccctgccgcgagttaccgcttccctttctgtttagaagagaagacactggcggcaaaaaagcaagaaaagatgtcgaaattcccagacgaaatacaaagtgaaacgtgctgtctgggagtcggggcttggcgtctttttgacgacaaacgcagagcacgacgtgcctggtttctacaggaaggcaaaggacagaactaagcgaaacacgtagttttgaagttgttaggatttccacttcgctcatcttggccccctcccagaagctgcaattccctcgctacctagatttccattttcacggtagtgcacagcaacagaagctccgccacacgacctagatcgaaaggccgagagaagctgttttcagtctcaagaccgaaatca

SEQ ID NO: 504 - DNA, 2108 bp, Toxoplasma gondii
  source 1..2108: mol_type = genomic DNA
tgtttgcgtgaatataaggtctccgactaggcacacattttggtgtttctcagataaaaagtgatacacactggagccccagacatatctgcacagaaaaagtgacgtctgtgtggagcctcactgtgtggtttcgtttttctaagaagccttcctgctcggagtggcgctgagtgagtccacttatattttgcgcttctcacacagaatgcatctcctccctcctgtcgtgcatgtaagccgcgaacgctcttcttaactgcatcttttccctctccctagcttaccatttctacacacatatatacttgcatgaatctctatctttacataaacacaggtatcataatatatatacgtgtatatatcttgatgcccatgtggcttcttcccggagaggaacatgcgcggcgactttctggcggctgagcaacgcgtttgtctccacgaggttcatatccaaggagagcactggctgtagcgcgaacttgtgagagacttgtgactatacgagacgaaagtagacacacaggttcacggtacctccagctggactgtcctcgcgagtcgtgagagctgacatacagcagcacaaggaagaggtcggagcgaccgcactgtcgaagtgccacaggtcttcaactgtgtgtctgtttcgcctctccgtttggttgcctttgcgttctgttcttggctcggcaccgagagccactgaaaacgagatggtgaggagagaagctaacactgggaaggaagtactctcgactgcacagatactcaggggcgcggggactcgctggagtctaagcagcgctttgcgtcagtcgcggagaatcatctgtgtcgctcgcgaggcatgcgttctcctggtctgcctttgctccttcttcgagactcggcctagcgtcgcatcgtctcttcctcagcaaagagcaagcgaacgccggagacagccgtcgcgtgctcgtgggctgtctcgtcctgggatggagaaaggcgtctccaggtcggcgattcttcagaagtctgcggccttcaggcgtgccctccctattctcctcaacacttcatttttctgctgtgaacgcgctactggcctgggcagcacagccttgcaccctcgcttgactagcaacgcgccggctgtgtggcgagtcctgctgaggctgtctagagtacaagctgtccgtcacaacatttactgcaggcgcgaacataagagaagcggaaagcgcgatgccggtcggaagcactggccgccttcgaggcgccgattcagtccgaaggcgacaaccactccgttgcgttctaggcgcaatatctggaatgtcgttcccttctcgcttcgaaaagaggaacgtcgtcgcgagtctcggccgccatcgtccttccgcctgaaccaaatccagtccgccgtgtgcagctggcactcgtcgcgaactttcctgtcgtctacgatcgagaaaaggctcttttctctgccaggaaagcgagacaacggaactcgccacgagcgcggttgcacatctcgagcccgcgtgttccaggtggacgtacagcccggcacttcgccagattcagcgattccgttgttgggtttccttttcagtctcggtggtgtctcctaaggaagagtgagcgttttcgcaatttgctaggaactggaactctgctgttggaagcgcaaagcaagccgtagcggcagaacagctctttttgagcagaggcgtcacgcgtctgcgaaaagcttcgaaattcccaaactctccagagggcgccgcgtgtgtctcgctctccctcttctttcgcgacttttgacagcactggcctggcggcctttatacacgtcagcaccttcgccttttctcgtccatgtagaagccgcgcatgcttggttctcttcttgtttccaaacgcctcctctgcatctgtttctctaaaccttcttacgaaaaaaaaattctctctactcttgccgcctcctgcatctccgcgccgcctcgcgctttgtgcagaactcgacgaggtggagcgctggcagcagcggaagctgacacatgcttttttctgatttttcggttttctcccttccgaagcgcaaggcagga

SEQ ID NO: 505 - DNA, 2729 bp, Toxoplasma gondii
  source 1..2729: mol_type = genomic DNA
tttccttttgagcctcttctccgctcttccaaactgcgagcaacaggctgcgaggaacgctggggaagcgcgctgtcttgctcagtggagtcctcatccctgttctccccccttcgctctctctcgttctcccccttcgtctctctctcgttctccgttcccctggtctgcgatgtcacagaggctgcgagaggcgtatgcttggaagaaggctttacatcgggatctgagtctccagaaaagagcgaagccacagtagactccgcgaaaccttggaattctgctccttcgctcaggtgtagctccagcgcgatgtcttgagagctttggagagacaggaaggcttcgagtgtcacacacggattctcgactgttccttcctccacttcgcttccctccacgttttccacctggtccgccccgcgtctctcagacgcttgtttttcatgttttggcgacttcgcccacctggcgtctcctcctgcttctccctgtctctccggacggagcgcgagccaagtgacaggcacatcgtctggcagcaggtagcagccgttctgcgcgctggggaacgggcgcccggttcgggtgtatatacaccgcgcgcggaggagtgcaatgtactcgcgggaagcctcgccgaggctgctgcaggcctgctcgctcggcagactctgcagaaggttgatttccttcaacaccgccgcccagcaactcttgagcgcgccgcttctgctcccgcccaatatctcctctgcatctttccagagagcctcgaactctgcgcggcccttcgcagcagccgccggtggaagaacgggagcggctgcgagaggcgcagcaaaagacggaggagcagagccttgagccgaaggcgagaaagcagagaaagacgacgaaacacggaaggaagacgaaggagaggaggaagcggcggaagaggcgaaaggagagccagagatggccgaaaaggaagcgtcggaaatcgtgcgcttcagagatggagaagaagggaaggaagcggcgagagcaagcaagggcgcgcagaccaagagggagagacaggcgcgacgacagaggcaaggccggaggattggagaagaccgggaaagcgcaggtcgtgtcagaggagaaggcgaggtccccaggaatagcagatgtgacagcagtggaaagagagtgagagagaaagcgagacgagaacgagaagctgccattctcgcagagagcgtggcacatcgttacttcgaggggaaagtcgaagacgtttttcctttaaaccagaaagctgcgtgcttttcatgttgtccagtaatcttacatgaagtgtatgcatgtgccgtggatacgaatcggtgtctgatttcctctgttgtgtgtcagtgtcggtctctgccttcctccatctaagagaggacactgcggcctcacgtctggtacggctgtcacgacatctcccggctatccttcgctctgacttccttcccgtccattttcgtctttcgcgaatgcgctgctttccagcgtccggttccccgaccttctttttccctcttttcctggccccctgtctctttccattcattacacacagtgagaagagtcgcgggttgtgttctgagcgttgcagtgcggtgagcatgcgcgcgagctagagaaaattcagagactctcgagcggcaggcgaggccttctgctgtcgagccaccgcagtgcagagaggcgaggaagggcgccggcctcgaacggaggatgcaacaacttgtttgcggcagtccccgttgggtggaaggtcgtttttccaggaagcaacgcgtccgcctgtttgccccagggccagtagtgaactccggtggtgtggtcctaagtgcggagcgaacgagaaagctacaaggaactttgacaagcaggacgagatttatgtaaacgacagagaggacgaagagaatgtgacagacacgcaggaagagagtctagcggagcttaacaactagcgggaagagcaagagcgggcaggggaaaacgcagaaaccaggggcatctccagactctccgggagccccaagggaagcggaaactcgagacctgtctgcaagagagcgagaaaaaatttataagatatagaaccttggaagcgagaacaacggggtagggacaggagacacgtggtgcttgttcgtcggtcagagaaagaatgacttgcaaagagggaagcgaagggtctgcgaaaaaaagaagcggcacggacttttgactttcaccctgacactgcgagaatccgcaagttctgattttcctttgttctttctccaacagactaccaaaagtgtttctccgttcgcgcagaaaagcctggagacaaacttggaaacaggaaacaatttccagctttcttccttgtcacttgctgtctcaacttacgccctcctgcattccgaccaccacgactctccccgcgggcagagaggcgccgcatgaaaaaaaccatttcttctgcgagaggaagaaggctttcaccgcagagagtcacgaagacacttgtggacatctaaagcctatctttgcgctgtttcgaggtgaatctgtttgagtgtggcagtacaaacgttttaacttgacgctgctctcactcgtgtgtctgtgcacacctagacaagatgcttcttccgcgaacacgaggatgggtgtcgggaaatagttgattcaattctcataagccacaccgtgta

SEQ ID NO: 506 - DNA, 1723 bp, Toxoplasma gondii
  source 1..1723: mol_type = genomic DNA
atacgacagaggattccaacccacatatgtgtgcgacagagcttatttaaatcttatccggttcttatgcgcataaaaggggacatgataggccaggggaatcaatacgtggttcactgtctcgtcttcccatccattgcaacaggggtactgctttttttccttcattgacgctgatgtctgcctcgttcattcagatcatccagaaatttttgctacgtgggtatcataaatacactgggatcacagtgacgcaaaaggagttattactgggttgaatgtacaaagcactgcaccaaccataaacgctccacacatatccgcatgtccctgcctgaattgggtgagatgagcctagtgcactctgataggtttactgacactgcttacttggagtcgttcttttaactgagacagcgactgttgcaggcccgaaagtcggctggccacactcgcgacctgtaggcaatgagtcacaaactcgcggcaatccaggccttgtatggtcggccacacgacaccggactcttcctgtcaacaaactgcgggcgtttatctcagtgcatgcacaactgagatttcaccctatctcagtggtacagttgacgtacatcgccttccacataggtcagacaccgcgatgaagataacagaacactgcagttgtccaccaccgcctcctccagcgcgccattgagatcttcaagtttaagctgtagaactgcctggataaaatgatgcgcataaaggaaaaaaaaaacgacacgttgtgattgtggagcctgtatgtttaaacatcggtgctggtagtcgaaagaaaaaagacacacgaagggggctcctttggatatccacgcctcaccggctccttagccaagcggtccagcggtaattgtgagaggcttttaatcatgatgaaaaacgcggagatcagacgatgtccttgctttgagagcgaaaagcgtcattatctcttggagttcatgctgcgcgataagcttaccgtcaccaatcgtggcaacaggaagcaacagacgacaccatgccaccgttcttcacatttccaacagcaacttatttcttcttccgagtggtcatgtgtaacaatttgtattacagttcgctgagtgtcatagtgtgaaacacacaggcgactgtatctttgcaaattaagaagcgacgtctcgtcgattctgcctgcggcttagaaaccgtcgctgtgtatcgcaaaccgacgagttgtttacgaataccttgagaggatgcagtgagttgagaacatatgtatatttcacggtgctcgcaacgaaggccgtcgttctccaaaacccggtgaggcaacatcagtttcagatgcacactctgtcgctctgatcaggctgcgctgagaaatttcccagcatgcagcatgcaacgtaactcgccggccgtcccaaacatcagtaacccatctctgcggcaattaatacagtttcctaggtatctaagggacacacaaatatttgaatactgaggcgagttctgtatgaggtcactttcccttacaaatacggtcttgtactgtagacaggtgtcaacgctccccccttcgcatctcggacaactgcagccgacattctatacctgcacgttgacgccgatgcgtgcaggctgtctttttgcataaacaaactgtatccgaagattactatttgcaagtgacgttttttcgctacatccacca

SEQ ID NO: 507 - DNA, 4932 bp, Toxoplasma gondii
  source 1..4932: mol_type = genomic DNA
acaaatgagaagacagtgattgtgcatgagtcaaagagatgctgcactggaggttcttcgctttcgctgttgctcacctgcctggctttatgagatcccggacgagcttcagcagagaatttctctggttcacgaactcgacaaggtaaacatgctggttctcctcttcacagacgcttctgatggtgtccatccactgctcctttacctccctgccccgtcccccgcacttctgcttcttcactttcgtcaaagaaaccaccttgcttcgctttgagaccggcatctttgcgcccaacaagggtgataaaaaaatcctggagaaggccggaaacacggcggcgaccgcggaactggtgcacttttttgcaaagagcttttgttctgagaaacccgagaaagtgcggtacggggaagcgcctatacatgcgtacccttggaactggcggcttcgagtgtgcgtctctcaagccgcatcgacacctcagcaggatctccagttaaatatcgtcagaataagaacccaagccaagaatgtgacggcgcaatgtgagatttctttattcctccaaacactgggaaacggtgatcaacgaacaacaagtgaaccggagtggaattcgccctgcgttgtccagtttagacttttggaacctgagtgtttgtatgacagagaggcaacacgacaagacttctgtcagatgaagaaagaaattcagtaggtatgggacgtatcgtcgttactcaggacaacgatgcagcttttccacagcggagtctcatttacgagccgagttggcggaccatacggaactatagaaccgcgtagacacctcaaagcgaacgattcacccttttgtgagaaatctgaagaagtaggaaagaaaagctggtcaatggaaaaacagagactggaatctgaatatctctagcccgcacgtctcgaagttgagagacaacgcagctacgaccaaaggattggcctcccgcctctcaccaattctcgcagcagtggagtccacaaccctgtccctctaagagattcaggaggcgcttggaaattaatgatttaacccagtggcgattttttttcgggcggaagtccgaaaacttggctcccgatgccctcaatcagatgtggggccatgcatgcatgcaggccgacaggacagctgggaacctctctcctttcgtcatacgcatgctggttgtctaaaaacattcgtccacctcgacgtactgtttttgcaggcagtaagattggttgtaatttctactttacgattagatgttttttcctaagagcaaatagatgcgtttgcagaggaaaatctcgcaagtgttggaagtgtgccgcgaaagtcacagcggtgcttccactgcaagcactccagcctgttgttgtccttaatttttagtactgaagtacgcttacgtaggattagtcgacgacttgacctccagattgtgtttctactctgtctctcgggcccaaacatcactcttttcttcggggatctttactcatttcaacaacggagtgtaactgggaccttcgtggaccggtcttcagtgtttttgcagcatccccgacctcaaaaccaatcacgaacagctgtaattttctgcaagcgtggctctttttttctcgctcgtccagttgtctgcgatgcagcgcaatatatggcaagtagactgcgcaggcttgcagggatggtttttttgcggtggacgcacagaacgcttaggcgaggaaaacaactggttgtacccgactagcgagcttcttttccacgagtttgacatcgaaaacgaaaactcactgcactgcattttggtgtctggtcctcagggaatggtggtataaaagcgcggattcgtgtaaggcagggaccttgtgctacttcaagccatacgaatgtgtgcgccgctgatgactagccattcgagaaaaggtccacactatgttccggacgcgtatacgttatcgtttactcatacaagtggcagcaaacactgaacgactgcgatctcaatgtgtggaatgtcataggggtgtcgcacagtgcttaattagtagcgaagacaatacaggaagcattcgtcacgatagaattcacaggtaacttcattcctcacggtgcggatagcatcgaaacaccaaaacatcgtaagtaacggaagatggaaactatagtattcatgcttcttcggcgtctttgatacaatcggagcgactatccaggcaggaagcacggagggaaaaaggctttgatgtggttttcacgggtcgcggaaccatggttgaccaggaattgacaaatgtccaaggtcaccagccatggagtgcgtggtgaccttccgtactcttggcacgaaatagcttgcctctgccgcaacgtaggtgttcatactttgggggatacttttaacgtacgtgcatggtgattggcgctaaacaacaacacaagtgtgtagaaggcaagcgggctcgacagtcaatctgaactagttcaaaccgggccgtgagcttcgtgggagtgttcgctaaaagcacgtggtcatcggagacagatttccaaagggatgggactaccaccgtcttgcaagttacaggatcaaacgcgccgaaatcatattattttactcggggccaccaggtgttagatgcgccactttggtgtcaccgctacaacttcatcctgggtgaaatccgccgatgaagtcattgcaaaagctgtaaccggtatcttcaagaattaggggctcctcatacttttccctggaatttaatgctacgcgtttgacaactggttgaggttgcgaatgcctttgtttaacggatccaagttctgtttcgctacagggggtatgtttttatagctgtaactgtagacggcctcggcagcacctcatccacacacattcacaacagtagcaagcgcgcagtgagaactgatcgtagatagccaatatgattggagacgcgggtcagttgttcgtccccggcacgtgtgtgtgatgcagaatggtggctcccgcggggtcattgcaacgtgctgttcatcctcgtgtacatatcacataatatcgaactacgaagacgttttccattttcttacatcggagaagtaacctgtgtactgtcgcagctccggtcgcccaaaatcggctgcctcgctcctggtgaaaatgtcagaattgctcctgagctgcgacgatatctctgaaagcgtggttaaacaaaactgtcttatcgggggtttggcgaggtgctcctaaatagccacggccacaagcatttctggaccgctgtggccgccaaactatgttcttgacttgagacagatctgcagggttttctgggaactaccatacgacagttgccacgtttacttctccagcgctcaaaagccccaccatgcgagcagggagaaccgcgtttcacctcatggaggttcggaggactggggcggagcgattggcccgctggaagttgccttgatttccgctgttgtgtctcttcgtagtgaagcaaaatacggcgcttcttcgacccagatccaaccgcagaatgaaattgctccgctgcaccgaacagcgagtggatagccatcggctctgcgttctgttcttcagtcacagctcggcgtcgagtttctgtgtgacctgcgttgggaggcggcctttctgccgccgcccaccttcatctcagccacgagacacaacacattctcaggtgacacaaagccttcctccagcgatgaacagtactgttgcctacgagagagaatctcgtttttctgtagggcttgcccccgttacgtaattgtcacagccgcccaccgttcgtaagtatgctcttcgtccttctcctcaagtacgccgttacgggtaagaaacggtgttgaaaaggagacttctgatcgctccactttgttgccctatttgtaagaggagctacaaggacaacagactgcacttgtgcgtgtgacaggaagagacatttttcgcgctgaagattggagacatttcgtgtcgcgcgacaggcagagagccttcacagccccgcacagaaggagctgtggtgttgctgggagcagtcctgcgcgggacatctttcgagttgaggctcatcgctggatattttgaacctcttcgattttttctgtatcgcttgttcttttcaagtgtcaattgtatatggcggccgccattgctgccaggcaaaccccgcaacctgcgtttcctcgactacccctcccccaacagagccagctggccccacacaatcgtcgacccagacgaattccagtttgttaagaagtatttgtgcattgtatgcatcgaaaatacgcagtggcggttttcctgggccatttatttctgagaagagtcgttttatttcaagttcacttgccatttttacacgcgagtcgcaggccatctgccgcctgtcccgttctggctactccgagcgcgaaggaactccctcagccgcaacgaagctgctctcatcgaagcgtcttgacgttattcaccacgtagttgttccggtcttcacgttctcagcgcttgatctttacggcgaactgggaggttctccgaacattgcggtcagcaacagtccaccgcttggacgcgccggcgagttcgtcacgttcgtggtcccgtactagtgtttttgtcgttacagagacgatgtgggttgtaaagacacggtagttttggtcaccttcattctctgagggaacgcgccatcaccttaaccttgcacatttttgtctcacggtctcttggctatcgccgtcctagcaacggcaggcacttgcctcaaatccaggcatactcccaccttccccccgatgcttcgttccacaacgcaaaagactctcggcacccctcgccgccttctttgataaagtccgaaga

SEQ ID NO: 508 - DNA, 4036 bp, Toxoplasma gondii
  source 1..4036: mol_type = genomic DNA
gttcacgtccacaccagccgatacaggataggatccaaaacgagatacacggcgtgtcgcccgtctgtacagtgccaagatttcctctctgcattctatctaggagggatcgacggggttctagaatgcaggcaagtgaacttgcggagcagcttttcgaaacgcgcattcgccgagaccttccggtcgaggtccgtggtcattgataaaagtaacggggatctcggcagagaggtggctgcgtgttccctagcgttggggactctcaaggaacagaacgaaatcactgtgcgattaccatctcgtgctcatgtgcatccagtggtgtgcaaatataagaaaacatgcgtacgcatccatctatgtagagccgcgcgggtgcacaccgggggtctactgcgggtcttgaaaaggagctaacggagtcgtttcggagagaagcaaacaagtgagggctgagcacacctcgggtggaattgcgtgctgcaaagcacttgcaggcagaagaccgctgacgaatactcgttctttatcgggctttttctgcaggaatggaaggtgcccgacatgtcgccaggcggtgaagggagtggtggaactccaggacgagtcgtgtcaagtggaggaagaacggaattctcaaaagcgagacggagaccggccgtgggagaaaaggggagacagacgggcagtcgtcactgcaacagtgaaagatgtgaaaaagtcttaagggtctgcatcctagtgtgaaagcgagctcctcgaatccttttgtctagaaacggtggacaaatgatggggaaaaggtggcaaggagacaggagccgtcaacggctggggttcattttcgcatgctgccgttgcgagattcgcaagcttttttcgacagggatgtttcgtaactattgctttggcgcggaggggggggcacacacacgcgtacggtctaggaattctgttctttatcacgtctccagagttggcagcgtgcgggatggaacgagctgagcacaccggaaaaaacagatggacagaacggagtgcgtggcgacgtcgcaagagaactggacaggcagagcgagggacatgaagaagaaggaactcagcacagtgaaaatggtgtggatggaggccagagcttcgtcttcgtgcagaagacgtttctgttgtactttgaaaacttctgaaactcctcggcatcggctaaacatgcctgacaagacgaagtagaggagcagagatgcaaacatgtgtctctttctctcgcagtttgtccccgtttcagagattgaaaaagaactcttacggcaaacatgtgcgcgtctggctgtcggttcgcagcgagaaaccagccctctttccttttcttgatgcgtatgcgctcacacgcatgcgcacacattttggtgtcaaggtacaactagggtagcaacatagttgagtaggcagcagagtcgcttatacctctccgtggttctcttgcccaatccattaatgaaaataaaagtccacgaaggtccacgagcaacgcgcagtccgggggaagaacacaaactcgcgtggccgccgcgcgtcgtcagagttaacgggaaagggcaaggaaagtcaacttccggaagcgcatgcgtcttcttctcgacagtgcacatcgtccttacccttctgtggtctcttaacgagggaaccacatggcgtttcaaatctcggcagtctacgttgactgtatacgcaggcagatctctgtataccttgaataagggaaagggctgtgtgctctcatggaatgatctagagatgagtcgagtattatccgcacatgccacgtgcaagaaaacctgaactaacacggaacccagtagtactcggcaatcgaagatcccatccgttcttcgggaaacagcttccgaattgagaatagagaatcggacagacaagctaccctaaccttggtgcacagccggtattcggaccatgacgattttgcttatatttcttcacatatatatgggtgcgtagatctgagtagcttgagaagaaggcttctgcggatctggaaatccaacacttgtcgctggatagcggggacagcccacaagcgttttcctcacttgtgtcttgccctcaactggagccttcccagcattctccgttccaccttccctatagaatttctttcaattcgcaacttcaaggcgctgtctggcagcatcatcgcttcccgtcattcgaactgcctcctccaaagaagcggagaaaccgtgtgtcgcttcttgcccactttttcctccttcccttcgcgtgagagtggagttgatgaacctccacagccgccgaagggaagtgttctttgcttgccgccaccacatttgcgtgctcgactcactgtgagacgagattcaaaccagtagtccaactcgtagtatatactgccgagaaaaaaataatttatagagtcgtaggagtcccatgttggtccgactcttcacatgttatctaaagctgttttaaaaagtacaatcttcgaatatgagaatcgagacggcgcgacggttacggaggtgaacgcgtttacattcctgatgtggtaaacagaatcaaatcttccttgagcgacacgacagacaccagaggcagcgtgaaagttgctctgagttacatgaacgaatttacatcctcgccttgccaggtcctcagcctacctcgggaagccgcttcagagtcaccattcccgtgaaagccgaacaacgcggaacgaacagaaaaccgtttcttcgttttgatggcgtctgcgccctgcggcggttctgccgacgggagaaactgggaactgacttttgttctgccacgagagaagcattttctggcagtgccttcagtttgacaagccatcggacgcaacagattagccacgagaacggtgtccttttctgtatctttgtgcgcaggagtgcaggggcccttgctgtttgtctctgggtgtgtgtctgaccaccctcttcgtcgcgtgtgcgctaggcgccgtttctccttattttttatgttgccttcatgcgacatcgaaagaaaagctgtctgccggctttttctgcaagccacggcgtggtggcctttactccgcggcccaggaaagaaaagttccttctgaactcgtcgcagcatcggttccatgtgtggcggggagacgaagaggagcggcgatccctcgtaccccactctctgcctctcgctgtttccacgaagttgcacgtcgaaataatctgcttttcaagggcaactttcccgtttcctcttctttgttcaatgcatcacacgctcaatcttctcgtccctcgcctttcgtcggagtcctttccttcccggccaaaaaccgagagggcgagtcgacaacacgcagtgaaaaggtaggcagtcaacatttcccttttctacttttttacgagcagagccgctgttgtggcattttttcccgtttctcttttttacttgtgcgcgacgcgggcttttcgctccgtgtggtcccctccaactgacgaatttcgccctcaactcgcggttttaggatttttcatctcaagggaaggtgacgttttacgcctgaatcttctcccgcctgttttcctcttcatacatctggtccccggtggtgctttcccgccctctgtctgttttccccgccctaagatcgggcagtgagggaaacctttcagaccgctttttctgtccacctttcgtcctactccgacacttcccccccgccaccctctcgcttctcctttcacgcgccttttctcctcgcttgtttctcagctcctttccgattctctcgtgtacgaattccgcatctattcccaatctctgacttttctataccgtcaccccccccctccctccgagcacctcgcctcttctttgcctctctgtgttgtgcgcctgcctcgtgtccgtctctcgctctcttttttcattttttcctcctctccttcgctcgcttccgctctcgctctctcgggcgcagtgcaagcgtctccgtctgcga

SEQ ID NO: 509 - DNA, 4719 bp, Toxoplasma gondii
  source 1..4719: mol_type = genomic DNA
tgattcacttgttctcgtcgcctgctagcactcggcgagcgtctgcgccacagcctcccaaacgtgttcgctccacgaaggcgctctacaacggagatgtgggcggcattcaccaaatgtgtttgccttgtatgtgcttgtgtgatcacagctcggaaccatgcagggcacggtcgaagttatggcgcaacagggatacccgacaatgcccgtgccacagggatgggacggagctgcgcccccggctggctgggaaggctggtccaaggaacacattcccaccgcccttcgatctgaccagcactcgagcggcgccatgactcccgtcagtgccggcgctgccgttggatccgcgcctgcttctccggcgcgtggccccgaggataatcaaggtcagcaggcgccgcatcaccaggctggtggcgaaggaccattcgtgcaggtctctgtcacccctcttgctccgggacaacagacccaagtcaatatcaactaggaaaacggacagggcaattaatatccgtgcgtgaagcgtcagccgtgcgcatgtggaaagcgggaagacaaacgcattttccaggacctcgattggcttcgttgaccctggcgctgttttttcttattgtgcactgttgggagggccgttgaacaccggcgtttatgtaaaaaagggacgggattgtcgccgccaccatggagtgtgctgtgacaccttgaagattcacgtgctacatttgttcgttgtaacatctggagcgtgctgacgtgggggcctggcttgttggaagcgaaacgggttatgcacaggctggttgaatgtttttttccttccacgtaaacgctcccagaacgcgacggtgtcttcacagcgaactcacgaactgattttgtcagtcgcttcttctgagaaggctgaggcttcccactcgaactggatccgtgcccttccgcaactgcttacgccgttatgtgcggatgtgcctcaaagccagccagcgatgatacttcattactgcgagtcagggttaggtccagcatggacggtaaagataactggtcatacacatgtgcgtctattcctggtacactgcctcgcgctagtaaccttgaacagctgcacctcaggtaatgccttgggtacaaacggctgaaagctgccatccgtgcatgcttatgacatgcatcacagattagaggtgcagctatcgggaagctaatgattcgatcatgacctcacgtactgcgtttgtttgatgccatcttccctcgcgcctttagagggcacgcaagtggtagatcatattttcagagaaacgtccgctcacaaatgccatatggccatagaggttcagttcccattatggaagagccggggtctgctcacagcgccacagccagaattatcaatgaagatagacgctaatcaaacagcagtcaggtgttggcatacgttggagtccgattgaagcacacggtaggcgagtaaatgcatacactcagtcgccattagtcttgacaaatgataaccagaacaacatccttgcacattagtccccgtcaggaggcgaacgaatatagagttgtgagagtcacacttggccacaaatccagactaggacatgcagttatccgcgcgaatagtagggtggccaaacggtgcggccccgggtgtgctgtggccggattctcccacaagcaagaagctgttcacgcggcttactggggtgaacaacaggacggtgcgtcacttcccatataagcatgtgcagagacgggaccggttaggcatttcaggtgctatctcctcgtacctatgagtccctcatctttacggcaaaatgccgcatgccactttacgggctgtttcagcatcaggcacgcttgcatcattaattcagcgctcagttgcacctctacgggaatgtcttccgggtcaggttagcccagaaccggcggtgatgtttccgagacttgattagccagaaattgaatcccctgaagagcccgacacttaaaagagtcgtcggattgccgtttcatgcatacctactcaggtatacgacgaacaactttgatatgacagacgcacaaatggcagtgtccatccttggcatgcggcgctttacaaatggccgccgtactgagatggggcatccagcaaaacgttgtccacccatcatcaccacttctgatcgtttcacgcaacacataaaacgctgatcgcggattgcacaactgaaggtaacgccgcgtgttcatggtgcagcagttggacgcctgatgcatattaattgtagctactctactgaatgacaaccaaaatactagcagtgaaccagagagtttgcttaacaagaagttacacgaaaccctcccgacctcacgctcattgcgaggtgggggcattgtcgacaagccgaaaggtggactttgtccccatgcttcagctgcaaacaaaggaatccaaattgagcagttcctttcgaccttgttaaatcagacgaaagctccggtcaagaggaggttaacggccggtagcaaatccttcagaagctctgtgtatgtcatacccaagctttgctgtacgtcttgggattctgggagataacgcgtgtcagatagggggctcagacgcaacttccactgacaacgtaatagaactgcactaacgggaatcactagcacgtgaatgaacggctgacgggcaaaagtgtccaacaaggggcttgtgtgtcggtggcaacgagagtatcccgacctttcagaggtacgattggctaaccttcaagagtctggcatccctgtttaggtgcaggatatcgactctacgcataagcgtaaggaaatctcctgttgccatataattatttcccactgcgttgggtttcttcaaaccgttcgtcggtgatgaaaattccgagcaaggacagaggtacgccgttttcggtgagctgtgcacacgtatcgtcccgttcaatactgacgaaaggtatatgctgcctccgaaaccaactcccattgtccacttctaccttgattcagtatccggagcagctgaacaatggctcttccactattataagcttcgagttatgtgggtgtgtgttatatatactgcctcgggtgatgatacagaacgaaggaagtggtcgccgcgccttgctgagtaacgaccgattctactgagccatatatttgtttgccattgtcttgattcggagctattgtgcgcgtccacagatgcttgggtaacaaagaaaggcaaatcgattaagtggacgtctgtgcgaagcaggactctcaaagaagcacctaatgcgtccagttgccgtttcggtcacaaaaaaaagtataacaaaaaaacagggaccgcagcgagatgaaagtggccttttgctcattgtggtgcagtgcttgcaacgacgctatatttcgaataaatttaaaggtatcttgttcttacgcgtttcgctcccagcgttttacaccccttcataagaagaactatgtgtacattaatagcgacccttgattctagccaatgaaggcctagaagtgaaaaggctgggaatctgtcatctgtgactgccacagggggggggaacaagtgcctataccatgtgctcaagcgcttcacgggacgtaccggtcacaaacggggcggctgagaggtgttacgatgttagcaatcacagccatagggccttcggttgctcaacagacaggacagcatacggacctgggaatgctgcatcactttccgttcttgaatgttaaagctggaatgtgggactccaacaaacaactcttccgttaatcacacgtagttcagtaaaatcgaatttaacgctgaagcatcgcccggctatgacaagcactgccatccgacaccacgttcaattcccgttagacgaggctgcgagctctcatacctgccactgactcatctcgaaatgccagcctttcttcgattggtgtttaaaaaggatggccactcgaaccatgtgcttccattacctctttagggccaacagcctcactcacgcagacgctgcaaatgctttacatcacacaataaaggctattatttgctgtcttctaccgtggctactgcccccaccaaactggcggtgtgaatggctcgcctgcccggtcggtaaaagcccggctctttgtcagcgtttactacatgcttcccgaagtattcttgagcaatccgctgatagaagcgcgagtaatttcacggacaccatgtatttcaccattttgtatttctcttctcgatctcttcaagatgacccatccgtcacgaaaagtcgcgttcatgacgcgggggtcagctcgtctgtcaattccggctcgacaggacggccgcgataaaaaaatgagtagacaaactcacagaaagacagtttcacgcacaaccgaagtgatttgagtgtcgccgtttctcctgcattcgaaattcaacccacaatgacctctagggctgcgcaagtggcatgaggaggcgaaagcattgtttggccagacgaggagacgtagcgatctgtgactgtagcttacaccgctatacaccgcttgctggactgttgcttcgtaccatttgccaatcttaaagacatctcaatgcacgggttttccgcttcacctgttcggcgactgtctgtagccgtcagtcactgactggcggcatttgactctcgactggctgacgaa

SEQ ID NO: 510 - DNA, 4719 bp, Toxoplasma gondii
  source 1..4719: mol_type = genomic DNA
ctgagcaacacttttcacaggctgaggcgctacgtcttttctacggaacagtgcggatcgaatcccctttcgtcctgggaaaaaacatgctgaatgaattcatttcgcagaatgtgcccctgcgtggcaatcacattacgctggaaacggagagcggctattcacggattagtgtaaatcagttttcagaagcagatgcaggtcgcgacactgacaaaggcgtactctcatggaagcacgaacgcatacgacagttctaggtttagcacggcagtgggttgatggtcactactgtagcacgtacacccttctcccgtcctattctttcaatcttccggtcgtatcttccgcactggtagacctgccttatttctgcccccgtcttctcgacacacgaggacacgcgcatcggtgagacggcactccacaacactagttgctctccatcgtgtccagtgtgaaacggaatgacattcgttcatcgagtggccttatgcggccctctcaacggcggttttgccgcttcgatgaatgccaacccttcacaagcaacgatggccactacacttacacaaggaccgcaaacgtaatcatcatgtagccagtcgagaggatcccgacaaggcacaaagtgagtatgagcttgttgaggaatcccattttttggtagaagggcccgcgtttcaggatggtcaaaggtgagactgttctgccataggcttcaagtgcccaggactcgactgcggctcaggtacctacttttttggagcggcacaagatagagtagaattcagtgaggtctctgcagaagacgaaataaaggcagtgacaccaccacagagagaactgacagctctctatcgggtgtgctgaacgaagtcgtgggctacacaaggtgatgcctccagccaccgtataccgacatcaacacattactctttagtgcatacaacgaggcccataatcatcacataacatgccatgctgacagctccgctgaggaaaaacatttccgcaaggcccagcattttgcagcgcctgcagatggggtccttgcatgcaactttcccagcaccgaggtagaaccgcccgggcagattcgactggcacgtgttaaaccctggcctgcacgtttgttggttgaccgcgccacgaagaaaacagagaaaccgtcttgggccagatatccaaaaacaggttgtggcaaagaataaaacgctggtcgagaagcagtcctgacgctttcgtggatttgttggctacgcagctgctggcgccgggtggaacgctattgacaggagtcggctgcggcaggcgggccttccgcgagcagctagctgcatagcagatctggtgtgccatgtagcaaaatggtagagaatgtgtttcttttcccaaggttggttttttgaagggagcgcgaattgcttttgactactccatacgacgtgcacactgaccaccgggctgggtccgcgaaacaccattagctgatttcttccacatcgtatatgagcggcggaaggcttactaggtctagcaatggcacagcagtcacgcggcgaagtgactctggtgtgataccccgtatggagtgaggtagccgagtatgagtgctgggacaagagaccaactcgttttatagcacctgctactgcctgtttacggtttctctttgtcgttgttcacttaaggggccaatcgtcagcgaaaggagtcagaatgtgacgatgaacctacttattaaagcatgcttccaggggttgcgagacggacccggggattggtgtcatagcttcaagttgttcgttcgtcatcggataaagtagcacatgtgccttgaggcgctgcgaggaccagccctggcgtcagatgcggaacacaagtgaagcatgcagcgcctttatccggcgtcttgtgtttagttttggcccgtgaaccgctgcaggagccgaaggtaaaaatgccatgcatttggtccacgaagtgctacaacaaatcgggctgttcacgcggtagattagggggagttatcaataactgattcttggatggattcaccggcacaaaacattacacctgacgggtaggtcaggtcatatattacagggttccagtgcctacttctaaacggccagaactcgtcgctatttcagcgtacaccgatcagagacagtagagtaatcgttattccttaattcggtgagcgttgcgttgaaacaccatcatctgctccacaccccgcatgacagaaaactgtgccacgcggctgcggaaatgcattcgtcaaggcacggtgatgctgcccacctaatgatgcacacgcattaggccaactatcggtgagaacacttcaccttcgcgctgccagcaagagaacctggccaaatgaggccgcacaaaccggacgagcaaatgagctcggggaggcagcatctgcaaggtggatagacgataattcgcctcgctccgcgtttcgccacattaaggaacaccatgggacgacgggggttttgaaaggtgtctcatcgtttcacagaaaggagaggcaaactggacgaaaaaaagctcaatttctgtgttcaatacattatgttgcaccgttgactgttgcgcaacaacgtggtactgacatctgcatcgaaaaggatgggtaaaggacgaacagttcgacggcagtagccctactggtagcatttcgatcacgcagagcgtgcgcgcagggatgagctatggacgaagaacaggagttcagagtcacagcacaattcgcaagccgaaagtgtgtatttgcatgtggtgccctaaataggaatctattacaagaagtggctacaagttcggagaacgaacttctggtgactagcagtaccgccacggaaaacatcattcttccttgtctatgacacgattggtgaatgcccctgaagcgaaggcagtaatggggaaaccgagttactgtgtcatagttactgcatcgaactacaccaaaatggggacaagaatttacgctagcaacgccaaccacacaggaaatcagagacctcaaccttgaaacgttgctggcgcacgggcagccactcagcccacggggtggccatgcgtatgccgactatgcgtgttgtgccgtctcatcccataaccgtaccgctgaaccaacacaatagagaaaagtgcatgttatcagctgccgacggtatagataaaatttcagggaaagcaaaggagttaagcactttggtggactacgagtctgcaggccgcctatgcctgcgacctcaacctgatcactatattggtgcaggctcgcattcgggcagttgccagacgaaatcggacaaatcacagaaagaaaaacggtggcatcagtacgctgacatactgctgttccgagcatactaggagccggtgatgcagcctcatatacttttttaccaagcacgattttgcatgctttggccttaaccgatatcttctactgttcgggaaagactttctaggcactgcgatcgttcctatacaagaacacagcagctcaagactgcatttcttggtattgttcggttacacggcattgctgatgtaaaggagtagagcctcaggagggaagccctggttgttggttggagcgactcttgatgacccatcagaaggcatcactttccaaatggttgcttaataaacggcatacactcatacatgtgtgaaaatgatggtcccctgcaaaatagggcagctgttttgtttgcgggcaacccggttacaaattatcacacttacaggttcgagcacggagaacgggtaaatgacctgttcgaacttttcatccattttgccgggtgtacagaagggcgctcgtaagatgattttatttctactggtatggttttgagtctggtactcgtttaatcccaccacgctggcaagactaccggttggaggacaaggggcaggacacgcgcaacgattgaaagggacaagacgggtctcgcaacgaagcgggacgggtgacttcgctgcagtcgcctgagcagagaggtcaaccgggagaagggggccattttctcctgcgctatatactgtccttgtttttggctttcgctggagacactttgctgtgtgcaggagattttgtacctcaagtctgagtggaaaacaatgaaagcgacgaaaacatgagctgatgtgtgggagtttccgacgtcagcaacttggccaggcgctgatcttctgcgaatcgccgaggagtcgtttttggcttggtagttccggattcttcaggaaagacctgtgcgtcaaggtaagtggagacaagtttctgaaacaacggcacggagctgctagctcaaatagctgttcttgcttccagtagccgaactctaaacaaacgtccttcctgacaccctgattctcattattcgcggttgcggttgtacctggaatcaatgccgccgcccgcgatcgcttaggatgtaatacagtttgcgatagctgtatcctccacctttatttatcgcgcattgaaacggaaagacagacttccttcccagcatgcgatttgccttgtggtaagcgactgtggttaattttttcctcatttgtttgtgcccaggtagggtcattttgggccgggcagtaaaattctgtggttcatccgtatccgtcaaaagagggacgatttctttctctgcatctgacccccaataactggggacgaga

SEQ ID NO: 511 - DNA, 2125 bp, Toxoplasma gondii
  source 1..2125: mol_type = genomic DNA
tgcgttcgacaagagcgcgtagtttgcggatggcttcgctctcttcctcggcctgggtttcaccgtcgaggaagagaacgagggcctcatccgtcttgtcgaattctgcgtctgtcacaagagagaatccttcgaggggatctcgccgcacaaggaaggcgaaggacgaacgcgtctccttcccccctgtctccgacttcctgtctcctgtctcctcaggagtctccttcccacccagcgcggcctgcagcgcggcctgcagcgcggacccaaccggcacgtttttcaggtccagaggcaccgacggaaaggcgaagaagagaaacgcagcgccgcctccaacgaggagaacgcacgagtagaacagccgcgaaaacacgcgccgcagaccgcttcggtggaccgcttcccccgcccccacagactcagactttccacgactcccctccgtctctttctccttcttcttcccttcattctccggcgcgctcgcctgctcggtctccttcatttctacgtcgttggggtgagacgcgctgtcgagcgcggcgtctcgaccttcgccggctctggagctgaagaatttcttctcgcggctgctgggactcgcggcagagccgactgcatgcacaacttctcggcggagaggcgcgagcagagcgccgagacgcacatcgcgtttgagggcgcgttctgcggagtttcgatcggcagtggaaaccggattcgagacccgtctgtcactcgagagccgcgaggtccacagggaaaccgcatgcgagcgcagcgcagaatttgcacaagacgatgataaggcgctgcagaaagcagcaaagccgcggaatctgcaaggcgcctgcgagagagaagcggcgcggacagcgaccgcctgagaggcgaagaaactgcgaggcggaaggcggcgcgacatggtgtacgtacacctgaaacgagagaggtgaagaggaaagagaaggaggaacagaggagaggacagaggtgaagaagagagaagttgaacgaagggagagaggagcggggaagtggagaagaaggcagagagagtggagagataagaagcagaacttctgcgtcctccgcgacagcacagagaaggggaaagcgtgagagtgagactggaccgtcaagaagagggaggaactcgagggaaagagacaggacgagagagaagggaggcgaagagaaaaaggaagaaagaacagacagcgacagaccggagacgcgacagcagcccaaaagcgtccaggaagatcggcagccttcacgcacgctcttctccttctttctctcttctttctgctcttctttctcttttctttctgctcttctttctcttttctttctgctcgtcttccccagtgtctctctgcctccgcgtctgcgctctttttcgcggcgaatcgacgggagagaagcggcaggcttcgaagggcttctcggttcttccctggacgccaaggcagtccacaaactgaggacgggggaaactgtgcgaaggaaatgcgagacgcgagcaagcagaaaaaaggagagaaaggagaaatccggagaggttctcgcagcgccaagatcgtcgaggagaaaccgaggagaatccgctggacggcttctcgagaaaagtcacacacgcgacgcttctcgacgacccactttgcttctgaaggccattatttcgttcttttttggaaaactcttctttccaaagttttccttttttctccttcttcacatgttttctcacgtcgcctctctcttcgccttcttcccttcttcaccgctctcgctgtgtctccgctccctccgcgcgaccttcgacgccatgtgtaaccggagaccagccaggaggccgatcgagagaaagaccggcaatcgaccttctgctgtttgaggggagtttggaagcgtcatctctctccgcagtctcaggttccgcagaaacgaggcggacaatttacattttctttcctccctctcttgcctccccgtcctcttcttcctcctctcatctcctaacgcagctgtcggaggcttttgagtcttcggttcccgttttccacgttctctctttttccaattctgtctcctctgtttctcttttcgtgca

SEQ ID NO: 512 - DNA, 2283 bp, Toxoplasma gondii
  source 1..2283: mol_type = genomic DNA
gttgtaaatctaccgtggcgatgggagggaggcagtctccttcagaaacccaggtcagatttctgtgtaaaatatgcttgccccgctacacgtagcggacccatcctatgagaaaacgtctgtggctccgttaaaacaagatccaccgcgttccacaagtctgctggtcagcctttgataacatttgattcagattcgcctacctctggaccgtcataatacagccgcagttaaaaaaactgtcccacatggggttcaactttcaagttggcttcgacagtatcctacatcacatctgtgtgggtccaaagctgccatacatccacttggccgcccaaattcttgatgtcgatatcctggtaactacatgatttgatgcactacatcgacactgttcgcaggactttggagaccacgaacggattcgccacaaaaaactggggaaaagggaactaccatatggaggacccacttaaaaaacatattcctgcttttatgatcctggtccacgccgctcccccttggttacgggtggaacaagacgaagcgcctgcaaacttgctacgatatttgccaccgaaggatcagaacctcccctcacctgctgccgcattaaggacagagtcgccgtagcgagaaagcgtgcatttgctgattcattctggaaaaatacacgctgtcgttcagcccgtcggttcgcgctgcggatatactgctctttccgcagcgttgaacgcctcgatctttcttgaaccaaatccgcttcttctcttcgctgacaattcgtctctctctcacacctcctcctctcaaagtccagccttttttcgacgactgccgtgtgccttcttctcagttcctttaattccgatgcaagctgctgtgactgtctcgtctccgtgcccccagcaccacctgtatctttctgttgggtcgatttccaaaaatcagattccttcctgtgcaacgcttgtaacagacggctttcctctcgacgtctctcttgttcttcctgtacatcccttgcaatgtcggcttctagcttcgcacattctggacacgttttatggggctcaggcgaaacctccctcttcggccgccgacgacgaaagaacacagtgtatagtcggcgaaagagagagggtgagctacctgaatcacctggtgcatcgattcctgataaaccccttgactcatttccatggccttcgtaagaaccacggcgttcaccggctccatcgcgtgacagaacctcttcagcagctttagcgggagagacggagggggccagttcgtggcctattctgggactatactgcagcgccgtcacaacgcacgccattaccgggaataaaggtatccccaagtccctgcttgccctcatccctactttgtttcccactcttatgagcatgtacaggacacattccccacttttcagaggcgtagagtagcgcacgccaccacctggctcgtgtccagaccgcgacgctgccgggcaccgtcgattttcctaacttgcttgcttgaatccgacgtaaccctccttgatcctttcgcaggcaaggcagacggttttttagtagatgttttctagcttgaatcacccaaggacgacacggtgacagaaaatggacagacaagtgcatgtcttgttcgctggtcagggcaagcgaccaccatttgctggcatagcgtgatccggaagctcgttgtctcactttccggtgaccttcctccgacacagcaaagccaggacccacatccgggattgcatgatgttgcggtgtcatttctaggtttcacgaaacgatgacttgcaacaatcaatcatacaactgcctcaaacggcgctgctccacggacgagaaagccggttgggagggccccgtgtctaccgttgaggcatgcaactgtggcgtcaatctagcgtacgagcgagcttttctgttcgactgcatgcaaacttgacaacacttccgtgagttgagacgtgtgggagagatatgcttgcacgtcttgtttggatttacggctccgttggtccacttccttgacacccagaaaacgtcccagcaccgtaagcttcgttcctctcttgctttgcgcttctttcattaccttggataacgcacatctcgagtgcttctcgccaagacctctgtcggggcctgactcacgagaggcgcacattcagtgagaatctcccatttgatttcctactaaaagcttcatttactccgagaggatccgcaccattttcgtgttttccgtcggcagcca

SEQ ID NO: 513 - DNA, 2094 bp, Toxoplasma gondii
  source 1..2094: mol_type = genomic DNA
ctggaacgttcttaactcctgaacaatgtttggaatcattcgcattcttcggcatagatcccgagtgttcttctcaagctgctcagtaatctcttgcatgtcatccgtatctagtgtaaccagggaatcctcattggcattgttaatactcccttgatacaactcttcgaggcgaatttggttggataactttctggccaattccggtccgagtaagtttgtcgccttgtcgccttcgtcaccttgaataccttcaagaacctgtacaagcacgtcttcatttcagtaaaattttgtgtgcgaaaccgtctcttgggcgtttttttctttgatggtactcgacaggcacataatgcatacctgtcgggtggcgactgagagatacgttagcttctctgtcacctcctccataatggctacaacacgctgggcgtcaacagtcattgacttgctagaggccattttgcttaagagtcttgcttagtctcctctgtaaaaggaacccatactcctgggcatttcttcttatgccgcttgaatgcttagatagactgcaagcatctgtccgggtgcttgaacacaacttcgagatgtagcagttgtgaaggaccgacgcccagctttcctatgacccagaggcgaggctgacgaaaaagggatatccgtttcagagacgtctgggtcgtatgcttgatgccaaaacgaggctctagacactgggataattcagaggtccataagccatggctttcaaacaacaaactgcagacaaaattgtgtagccgtgaccgcagcaaattgggcatggctcggtgggactctctttcctaaaatgccacggaagacggctagagagtacacgccttgaactacctctttttcactctggactttgtgaatgtacaaagggttgtcaggacagaagtctcggttttcccttccttgttacaatgataccctagaggggtaaaacgcctaccgcaaagatgcgtattcagcagggaggaacaaactccggtgtattcacaattacaggcccattcgtgtgcattgaggacgctatcgttgttgttttaagcacagccacaaccagctggcttggttattgacgcaaagtcatatttacagatgaatatgatccagaaatgaagcactgctgcccgattgttgcagcctctgtcttggttgtgatacacatcgtgtttgcggctgcttgcagagacgctctttgtgcaccatctcgcgttatagccgtctaccccgtgagcctgacttgatagcaacatacagttatctttttttgaaagaaaggatattctacgagtcaacaaagtcagacagaacgaagctcgtcgcggagccccatgaggcgttttcgcaaggttcaggcgccacacgctgctagcagcgccagcgtgcgatcaaccactcgaggtcacctttgcgaagcccgtctgtttctgggctgccgtttcatcgggaaaagtgtgatctcgtgtatgtcaccatgctggcccctggttttctgaaggttacagtctcctttctttcgagaacgaacaagacagcttttgacgaatgcctgcgcctggatgcaaaggcaacagaggggatccttgagttgttgccggtcttgctggtcccttctcagggggcatgtgcatccgacatcttccttgtttcctggccccttgacatgttgcgcatcccctttgttgtctcccattaacaagcgcgtgcttttacgctcagtggcctagtcatatgcagctgctagtatcgcgaaagtccctattgcagcaccgcttacctaaatttgcagaaagtgtgcgcagtccctggaaatcgttctttgtctttgtacgttggtcgcctgcgggttcctctctcgacgtaggagggaacagtgcatgctctgtccgttgccgccccagaggttttcaattgccgtgccataaagtgtgccacacacgaaaaaagcacacggcttgcgccatagcacatccggtatcagaggcgttcctactaacgcatgagacaacgccgaaggcctgctgacgattctcacctaaaatcggtgttagtttacaataa

SEQ ID NO: 514 - DNA, 2680 bp, Toxoplasma gondii
  source 1..2680: mol_type = genomic DNA
gagacgaggaccacagaccacgcgtagacagaaacggttgcaagtatccagatctctcctgtctggcaagtcctcgacttaaacactcagtagcccagattccatgaaaacacggaaagcggcaaaatactgaaagcgacacctttcgggtatctcaagtagttgggagggaagccgtacgtgacgttcctcgatgggaaaccctgagcccacgcaggattcctgtatatgccgatgcggtgacaaagacagatctgccaaacttcgtctgttgcctctttctttaatgacaaaaaagcgtgccaaggagagatgagccagtacccaaggtgtcagccaacactccacaaagagaacccgatttccatgccagtacctgcctgccgggccctgcactacacacgcgggcagttgcactcgaaatgcggcgatgtttttactcacacgggtggcctgatactgaaaatcttattgtctgcgaggacgcctgtacagaaataaatatgtctgcgcctgcgcacagctgagatactgttagagagaaagcgagacacgagaaaaggaactttggcaaaccaagtcctcgtggcgaagaaagaggtgcgctgacgccacgaacgctgtctcctgagtatacgacagacaaaatagtctgctacgacaccagaacgaaactgttgctgaactacggtggcactcatacggatttcagacgggcagaatggcagaaatagtgcccaaaagaagcagaaagacaagaacgaaaagagggaacgttttcttcaaatccgaacccgtctgccttgggctcctgcggtgtccgctgatagctgaacagccataaagaacagacaaaaataccatccgagaaacaagagtcgcgacactttcttgtccttcctggaaaggccagacccttaaagaaagacaaaggcgctctcgcgcgatagaccaattcatttacttttctcactcattacccaagagcaagtcaaaacaaacacgccagagaattgacacaccctagtgctccggtggttcctaaacggtcatcgcttgttcagaagacggtcaaaagtagggcctggagtcaaaccggaaacgtctgtggagtcccgagacctcctgtggtttcctgctgctttcgcagagcagaacgacagaacgacgaatagcaacaacgtcaaaaacgcggcaagaactgcgtggaagatacgcttcatttgcaagacgctaaaataaacaaacacgcgcacacccgtgcgcgcaccagctacttggtttatgaaacccgtggcaggagagaacccccaacttcacttgtctttctcagttggacttttggcggggaaggcttcggggaaaggagcccgcgccagtatacacgcttgccaaagttcgttgtcttaacccgcaaccctagacacttcacgcaactttcggcggcgaaattcaccttaaatgagaccctaacagacggcattttcccctcagtggaaaaacatgctttgctacttgttctggtgggaaagatcgagttctggctcgcgatcatttgtctcgaaaccggtgaaaagtgacgttcgagcgaccgcctggcacacgcgctgcgtttggcggaaactcactcgagtcatttcgcacggtttttcaaggccgtcttcccgggagtctctgctcctgtttttggttgaaaacacagcgcaattatcttatagtccatctaacaggcgagaccgtggcacttcgcttcttttcccacggacttcacgtttgagagaaccatcgacacatgcagggaagtccgccactgttggaaggtctcaaggtcagcggccgctctgcgagccaccgttcggggatggggaagtggaactggagggttgaggaagaccgaaagcaggaaggcgaggaaaccgccatccaaggttgagaaggcgaggaagtcacccgccggccaaggataatacgattacctctagaaaaagacaagttcaagagttctttcccgttgtattctgatggaacctagcctttttccactatgtgtgctggaaactctttaaagacatggtctctacagtttttcaaactgtgacgtgcacgccggtagacccattcgtaacttcttgaccgaccccccttgcataaaataaattgttctacctctgaggaaatcatttttaatgcatgaacaggttgttcaatgcgtcggtgttactggcagcggggaagtggtttgtttgccaggcttccgagggacagtttgcggggtttgtagtgcgcaagacatgaaaccttccagggccatcgccttttcctgtgtataactcaaagcatcttgcattcattttcctcgaagcactgcatatctacttattttgtcaccttttctgattaggagtgcttccccgtgtcacttgcgtccctgcgcaagacgcttgtccttttttccgtccaagccgttctacaggtttccgtgtttctgttttctttgtctgtcttacgaaccgatctgtcgtgtttccgcaaagagacaccgtatcgtgcgagctgtcttacgcggagaactatcggtagggtctgcctacccgcggcaacagacgctcaggtgtttttttcgtgccgagtcaggcctctgtccgttactgtctctaagcgtctcccttaaaaacggaca

SEQ ID NO: 515 - DNA, 2059 bp, Toxoplasma gondii
  source 1..2059: mol_type = genomic DNA
tcgcttcctctgcaaattctttatatttcgatggatgatgcatcgctacgtctttgcttctttcttgcgagtcacctcaggtaattcttgctccggcggcaggccccgctcgaccgcctacgcaggagccttaagggcaggtcgcgcaggaaatgtcgctccttctctctagttgcctgtttctgtttttcgtttcccgctcgcgttttcgtggtgtttgcgtgttttttgatcgagaattgcccgcgaagcaacaacgctttcacgaaagaggggaacctgctcgtgaagagcggctgaaaagctctaacgcgacggtacagggagctcgaacaagcgtttctggagttctgtgtgaacgaggacttttttagaacgaagttgaaagaacgaaggagcaaaaaggaaaggttcccgcaggggaagaaccgcgtgggtgcagtagagatagaggaagtttttttttccattcttccaatctttgtacctcctgaagtcactagaagaacacaaccacgggcggtgcttcccctccagtttcaaaagagacgaggaaaacatccagtctctgtcagtcccggtcagatccttcgtagacaggaacccggcttgggacttgcattgctcggaaactggaagcggcctacagagatcagatttgattagattcgagagaaaagtgcatttttcactcgcttcgctcaaacgttttacattgcaaagcctaaagaggtaagagacaagacttgtagtcgaaaattccaagttcctcaagaggcacacacagcgcgcggaaaccgtacctgcgcctccttcaaatcgatacaacagcaccgatctccacggccgtcgtgccagacttgtccggtggatgctctcacttcttcgtctcacttgatgttaagatttcggaagtcagttcgtcaacaaagaatggagttctggcccctgtcgtttcacgtccatgttttcgacggcacaccgggaacatgtttcgcaagttaacgaccgaagagagaaaaacagagcctgcaaatgtcctagacaacactgcccagatgcacccaggcgccccccgaatcgcagtgttactaaaaagactttcattcatagaggcctacaagatctttcctgcctttctgtggtcgggtgggcagcctacagacgtcacggctggcggctgcgaggagcgacgcagctgatcgaggcttcgggatgatctgaacagacgaatgcgtttgcgcagcttctgaacaagtgtctccggtggccaatttctgcgttgaactacgctctttttctttatcgtttgagacgtgaacgcgtggttaaactctcggcgtccatgctgcgcagaaaaacaggtagctgcggacactaacgccaacctatgcccgcagacctttttctctccccgtcgacgtggacaacaacgcaggataaaggcgttccgcaagcgagcgtcccggctagcttttctgaagtcaccgcggtttttcctgagagctacgtggttggtcggtacacgccgagtgcccgacttcaccgttctctttgcaaagtctcggatttttccccatacgtggaaagctgctttcctggagacatggctcccgccgtttctcgaggggtcgcatgccctcgtttagctctggagtgtctcggtttacggaaacaacttcttcctcatcgcaaacaccgagtcgtgagcgaaaagcgtccttcacaggaaggcgatgcttcttgccggccgggagagtgtgccactgttcctttgtggcagcaccaccgatcgaacatgaagtcgccgtgacctgcaaaactttcctcgaattgactgttgtttccttctacgacgtcagcaggaaagacctggtttctctccagtgtcagacgataacgttctttgtctcgtctgttccaacaccctctcggtaaatctctcacgccagctcgaagcgtccttttcgagtctgcttttcagtggacgctcgctgtcgaggaaagcagagcgacctcccagagtgttcacccgcaacatttctgcttttccccccga

SEQ ID NO: 516 - DNA, 2740 bp, Toxoplasma gondii
  source 1..2740: mol_type = genomic DNA
gcatgcagggtctagggttagattctttgggcgtcactctcaagcgcggtggcttcatccctgtagatgcatgcatgcgcgtcctgaagcacgctcctgaaggcgacgaaaagccagaggtcatccggggagtgtactgcgtcggagatgccaatggccagatgatgttggctcacgccgcttcggcgcaggcggttgcggcagttgagacgatcgcgggtcggccgcgaactgtgaacgtgaagcacattcccgcggcgtgtttcacgtcgcctgaaatagctttcataggtaaagtcaataatgtgacggtaaattcgaaggactcaccgcttgtttccacgccaggtccggtgtggccgctctcttgtctttttatggcgttcgtttttcatgcttcgacggtttacacccgtcgacgagggtgtacttgggtgtatgtacaccggaggtaaagctccaggacacagagcgtggttcaacccaaaatggcagatgcactgaggattgcagatatgcggggcaggcagtgtcagggaagtattgccaactcgatgcatgtcgagaagattgggtccattttgaaggaaagtgccatgctttccaccacgggcgtagattaccgcgaaagtgcaactcacggggatgcgtgactgtggcagacttgtggctggttatccccggcgtgccgtatgattgttatgttctgtattgaaactaggtggaattagaatacatactttctgggtccgcaagttcctgagaaagcgcgatcttgtattttctagtgccccccctctggagtgggtgttttttgtgctgtgtcacaggcgacactgaagaagcggcgatggagctaggtgccaaggatggctttgaggtcggcaagagtgtgagccatttccgcgcaaacacgaaggcgatcgcggaaggagaaggcgaaggtatattgaaggttttgtaccgtaaagacacgggaaagattctcggttgtcacatgatcggaatccacgcaagtgacttgatccaggaatgtgcaacggccataacgaacgacatttcagtgaaagacctcgcctttacggtccacacacacccaactctaagcgaagtagtggacgcagcgtggaagaaagctgtgggcatgaatgcacactaaagaacaggggtaacagggactcttatgaattattaggctttcttgaaaccgtttcgctcaattgaacggtcaccgaaggtaggagcagaaaattgaccacattcaaacgaccagatcggccggaaaagttcacatgacggcaaacttggctggtctgtgcacacaaaatatctttccgatgaataccgagcaacgtgtgtgtctgatttataaatatatatttgtggccaacatatatatatatatatatatatatatatatattcgggcctagagaatagagggggcgccagcgttctgcgtcttggcaattgtatgaattctcagggcctggtgtttcgagcacccgtttgttgatgttttgttgtatctacaaccggaagtccggtgaatcgaagggaaactgtgtcccttcacttgaaatctaactctttgtcctgacattctcctggaaatccaggtcccttcaaccgttcacctcctttccgctggtgctgatttagactgaacgcatgaaaacgagaacgtaacgcaaagtacgagaaaagacaataatgttgctaccgttttagatcgtgcggacgttgactgtgtgcgatcgcgtgcacttgattctcagggagagttgcattgtggtggatattcatgggaatagcggttgagtacggggaagaataacacattcggcaggttccagggaaacctggacgaactcgcgaaactccggagtctcaattctacttcagcgatatcgatgcaaaatccgtttgctgttacgccctagaaaacgtcatctggcaatcatgtttccagccgtttcaatgaatccactatcacctgcgacgcaacaactgacgggcgatttcttttgaagttggttcattgctctcaactgaaatcttgtctgtcccgtgctggcaccccagtcccgagaaaacattcgctggagcgcagaatctctgggtgccactcatgcttcagcagtggtgaacacccttctctgccgtgtctgttagaaacgacggactcaacatctcaagaaatcctgcgcctactttctagacacgtaccaacactctgatctcgtacttcacatgattaccttcgtctggtatcttgcactgcacaattcccaacgccgtgttcgtttctacttgtccctctgtgccgcctttcttcccggcagttgtggcgcggcctgcatatcccccttctgtacattcattccgccttcagtccgtggggtgtgcacgtggagttatccgcctttacaaaaacgccacgtaaccattttcgtggtctatgtccttacgagtgtttccgcaggcacgccgaaaccacactcccgctcaaccatcttacggctggactgccactacttgtccgctcggaattttcaatcgctaactttctagctttctgcgtccctcgcttgtccgcatttttcccgccaactttatgcaaacacctgagccttgcacgctggttcttttcgctggctgacaagagcgctgcgtgtgtcgtaaactccgcttttcacgctgtgtgcaggagcgcaaatcagttggcatattttgaaaa

SEQ ID NO: 517 - DNA, 2799 bp, Toxoplasma gondii
  source 1..2799: mol_type = genomic DNA
cgtcaaagaaaagcgaggagtcttcagatgcggaggcagcgggactggcctcttccctggttcccaccacgcgaagtcgaagcgcagggcgtctacgaggatgaggagaagtcgttcgtacggatatacagagacccaagaactggagggcgctccgggagcggggggattggcagaagcggcaggacctctggagggcagagaagactccgccgaggctgcacgccttcgatccccgtctgcttgtcgcgcctgggtgcctccgacgcgttctcgcgctgtcgcaggaggctcctgggctgtggctgggggcctggcctccgcagtcgggtgcagatgcggaaagagaagaggaaacggcaactccgaggcagaggagaacacgccgagctcgactctggagagaaaaaatcccttcaagaagaagaacgtccccgccgcgaggaggaagccgatgccgaagagcagaaacagaggtaccctcatcagcaactcccccggaggccggtagcgaccccggcgcctcatggcgacaaagagaatggagaaggtgcacccagagcaggcgacaaaggcgggcagagcagaaaatgacagagaggaccagacgcagcagaggcgggcagcagcgggacgtcgctcacagaggtgtgcagatgaagagatgcaaagaagaagcgacctgtcactgacaagctggtggccgcagagaaacgtggtcgcgagttttcgaggagaacgtctaaggtgaggaagtgagagagaggacggcgagaagacggagaggaagcgaacactttcggtctaaaaaggaagcgaaccgcatcgtcaaaacggctctttggaaggggtacgggcggattcgtcccgagaagcgaactgtccctccacttcccactgtcctcagtctcctcagagtcttagcaagagactcatccctcttctcgggtgttccacaggacctcattcgctgcaattgtgtggccgcgcaagtagcaaaaacgagcagcgcggaaacgcttacatcgagacactatgcacgaacagctatacctacgtgctcttgactagctctgtacacagatacatgcacgtaggtgtagacttaagaacctgtggcattacctatcggcacaaaaacagaaaatataaacagacacatggacggacttccgatccggaggttccgcaccactgagcattcatttactgggcgcgatgtcgggtcacagcgtagctgcccctcctcacagactcgagacgaaggtatctacacgttgactccgatcccgacgagtcctcatttgaggtcgtctaatagaacaggtatgagagcaatttcagaaaacacggggaggttttggaaggagacgcgtataaagtgtatcgcgagggtgctcgacgaagtctacgacaaacgcgccacaaaagaagggacgcagagactttgcaagaaagcacatcgtttcacgtggagacaaccagcgcaaacgtatgtccgctctcccctcgaaaatgacaaaggtgcgatttcaacaaaccaaccgagcgacatcatctcagcatccgtctgctgaactgcgtagatcccggtgcccccttggagaggccgaggcggcgaagagacgagagtgcagacgtttttcgccagagaagaacctgagcagacaaaccagggaaaccgtggtgtgtcggcttcaattccaaaaacgccaagtatcttgagcagcggagctcgatttgggtggaggaacaagcagaatcacccacgcgagtccaagggacagcacgagtctgctcgacggctctgaaaggcaccgacgcttgctgatccctccactccatgggcatctgtgcgtgtgtgagaaatggaggaaacgaaaactggagaaacgtgcgggaaaagggggcttttctcggtatgcacataccactgccagcggggccgaacctccgacaaaggcgtgaccgcgcgcgctgttgagacaagacacactttggagacaagccgatgttctttctccccttcgattggatgtttttacgtgtccggtcgggtgttatagaaagaatgcatttcatggcacacccttggaggtgctcatctttattgttctcgtcggaaaaccgcagatcgtgactcttgggagaattctattgcatcctctcagctacttcaccgccgccgatgttcttgtctcctcccggccttttcgcgcgtcctgaaaagaaagcaagaaggactgctttttttcctgctgtcttttctcctttccaggaacaggcacggagacgctgttgatcagagcctcgcgcttctgctgcgcctctgttcagacgaaagaaatccggtcccgataaagagaaagcaggaagcgtctgctttcggagctccgcagactttaaaccgtgccgatattgccttgcgtgtctcctctcgatttcctaggttaattttgtgcgctggaaaaacgccttctctggcgacggtccaagagctctcccctgtgtcgagactcaactccgaactggccttcctcgtcttcatttttttcacacccccaagacgctgttctttcttcccccctcctggagacactttctgccctgtgttactcctttcgttctctccactttctcatctctgcttgttctcttcagtttcacttctttcctggtcaggagcttctcctttcccctaaaaggcattaactcacagcgtttctcgttctgcttcttctgttcttgcttcttcttccctgtcttcccgtctccttctctgcttctctgtcggctaca

SEQ ID NO: 518 - DNA, 3350 bp, Toxoplasma gondii
  source 1..3350: mol_type = genomic DNA
ctccaggtttccctacatgtttgtctgtctactcgaactctcaagaaaaaggaaaaacgtattctgtccggtcctctgcgcatgcaagtacctcttcttcacaggctactgtggcgcaggccagtgattggcatcgacgcaaacgcgggatgaagcaacatgaagaattcaatgacacacagaaacgaaaaagagcaacgagtgagagagtcacaatgtgcgcaggaggggggcctcgagacttcacaaaatcacatctacaccgtgatgggtttctctcggggtttccaagctgcggagaagcctctacgcgctccgctcttcgccgaaacagaccttggatgccactgttttttcggagaggtccagaacctgagtgttgagacagtggaaaggaaaaaacgcgctggtgaggaagaggagctggagaacggttccggcgggaaaggggaaatcagtggtgattttgacgtcgtcggacgcagcccagagattcgtgtcgaccccaacttccttgcgaaaaaaacagaagcaagttttacagcacgaagggaaaagcgttctggcattcacatgtcgaaagcagagggcctaagatccgttacacgaaacttctttcaggatttaaataaatagtccaacacgtgcgactcacgccccagaaaaggagcggttaaaacgacaaagtcctccctcaagcgctcagagcgacggcgggagtcgtaaggtggagcttgaacatcaaaaaatgtccgtggttgactcgtgctgacgggttgagcgccagcgagttttctcgaggggagagacaacgcaaggcaagttgagccttgtctttcgatgcgaatgctcgcgagtagcatacacactagaaacgacgcggaaaacgaagtcgaataaagagaaaagcacgttcggctgtccagaggggggttggctaagctgcgcttgccctcaaagtaggcttcagtcggttcggtagaactgagaacggaaagtgcacgggagtcatctagaaaaccaagaaactgacgagacgaaaatcggaggcaagatggggtaacgattcccgcatgtgacctcaaggcgctctagcgaaatctgccaattaacctcagcgcgtttgcggacccgcaacgccgggaacgaaacgcgaaacgggagaaaagcgaggaagttgggtggcgaggaaggaaaaccgcactagaagctagaaaaacttatcgagtagcaatttcaaagcatagatgtcgtcgtgggatgttaactgggaaagaaacgatgtggttttactcagcagaagccgtcggagtggaggcgcaatgcctcatccgcttctagcgcgaaaagtatcacgagtccactccggcggtatttttcaccttcctcagttagtgaatttttttacaaggagtaaagtcgaaatgcctagcacgtttgctttttctgcatcgcgttttcaaagcaatagcactacaggagcgctgaatatcgtgaatccagctccaagtcctccgcatacgcgggcgcgtaagaagccgttttttcatcccagaacggcatgcctggcttacgggctccatagaaccgtgggtggcgagagttccgtgacggcgcttacgggcagacgattagactgttctacagactgttttttcaattcgtgttccctgcaaagaagtaaataacatcttcctcagtgcgaatttctccaacgtcatatttttgtgggtagaacaaggagtcgtaggggtttcccgactccattatataccacgaatcgtgcgaaattctaggccttttttccgtcacgtcctgtaaaatccttgaaatatcgtcccgtgttctgtctccatatgacagagtgttactgtagggcctgttgcggccaccaccactgttcgataccaacacatctctactatggtacgattttttaaaaggggaacacctagtcagattctatttctttcctaggcatctttccccaggggttaccgtgttggtgatagggcacagagcatgaaaaacttagcctactcgattgtgggtgcctctggacggtgtcacagaccttgtgtacggtgcgatccgtggcacgtagaaatgagagcaccgcagcgaggtacgagcgataaaccatttccagtctggaaaaggaagcgtccgtgagttggcgagagagtatggctgaaaatacctcctgctgggaaacgaagccacgcgcgaaatagcagtgttcgtgattcagggttgttcgcagaacgcgtgtagaggacaaaagcctcataccgtgggacacggaacagtcgagaggataatacgagcgatttacatgaatgtgttcctctctcctgctggtacatggtttttctgcctccgctgtggaaagaacgcctaccgcggccgagggtcgcaggtcgctggcacctttcccacctgaactgtgtccgaggtggcggcactctctggcgtggttcgcgggttttgcgttcgtgtggtcgtggagttccacagaagagcagaaaggtgagaggaagagtgcgcctggatcgaccgcacacgtggagtggaaggtatgtgtgggtctcatgttccccatgaacgaaacgctctcctcaaggacaacatccccgttaaaaatggatcctcgtctgaggggatcccctcaattctgtctgcagcaaaaggacgcgtgtgtacgggacggcgtgttggaatatccttttcttcatgcactcgcgggttctgaacgtggtgaaccctcgctagatagccgtgatggtgttctggaagacgccgtgggcagagaattcgaacgactatcacacccgccgagcagacggccagcgccgtgggtggtgctcatccttcctgcggcatgcgccgcagggttcagcacgctgacttgaagttgcattggacagggcgagttcgcaatcaagccggaggaaaaaagggagggtgttgctgggcaggggagcagcgcgaagtctggcgtctttttttcgttgcgtcgggtccaaaaaccgccttttctctcgcgtctggccctctcgagtttcgcatctttgtctttcttcactgtcgttcgcgggttttccacctttgtcctccacacacgcgtgttagaagacaccttccttccagcccttcctcatttgcgcgccgcagccaccagtttgtacagcggccggtttggtggtgttgcgccttccgaccccaggtgctccggcagaacgctcccgtgcgttggtgttaggattctttcctcccccccgggacagccgtttttgtcgacttttttccttctgcgcgctctggttcctttttttctgcatcttccaaaa

SEQ ID NO: 519 - DNA, 3464 bp, Toxoplasma gondii
  source 1..3464: mol_type = genomic DNA
tattttactcctcacacacagccggatgtacatacatcgggagccgtcgacgcttcaccagctgcaagcgcagttgcagagagacgcatgggaagcgaaggcgctgggttgtcgagttttctccgcgcctccgtctgagaactgctcgaactccaagagcccttccggcctatccaggtgtctgtacagcgcaggcgtgccgctgaacctaggcctctttgcagattctctcagtctctttcactcttcctccttcaaatccaagacgcggagagagaaggcgaagaagtggagagaaaaagaagctgcgaagacggtgcagacgatcttcagactccgaaaaaaggaaagcagacgacacgagtgcctatgcgtgagcagaacagcttcttgtccgcgtcgtgtcacctccttcctccttgtgttccctccaggatgattgaacgaaggacagcaggccgttcgtcgttttgcgcttgtccccagaaagacgaggagcttcttgttccgcttttcctctaggcaggcttctgtgctcttcgattctgcacagagcgcaaggagagattcatcccaggcgggcgccaggaaccttttcacttctttcaaggacgagaggcgaagtctgcattcggcgaggaagcctctctcctctttttcttcgctctctccatccttgcaaacacgaaagcagcgaaacgcgcgctgctgagggagcctccggtgtacatcgacccgagcgccgagtcagaacatcctggcggggaagctgcagagacacccgagctaacttctcgcgactgtgtcttcaggcttcagttttccgaagaacgccgcagacacgcaagcagctgtcttggaaaacgacgagcgcccaccaccgccgccaggccgagagagaacaagacgcgcgaaagcggggcgagaggaggagaaaaggagggagaaagagggaagacgggtggacaggaagagcgtcgaaaagggggaaaagaggcacgcgtttttacggagaattcaaaaaggcggaggagactgcgatgatgtaaaaaaaagagatggaaaggagatcgaaaacgcttctgcgcaaagctggctagtgcgtttgcggggtgacagtggcaactgtatgtacagcccaaaagccggctgttcgaactcgaagacagaagcaaaggggggaggtgcacacagaggagagagcgtccaacagtcgtttttctaccagtcttttccccgaagagaagctggacaaaatacgacgaaatcttgtggcgaattcggtaagccaagaggtaaagctgtatagacatcgcgcctccgactcgaaagggggaacacgggagtttgcgtgccgggcgtttccccctggcgattcacaaaaaaacgcagaaatcgactttttggggtccgaaagaccgccaggaactgcctgaaggacgcacacaagggcggaggaggacgcttcggagaaaagacttctttcctcgttcaacaaggtacaaaagagctggtgattccctcttgggagacaccgaagagcgtacacacgtaactgttggcgggtgaggatacacctgagtcgaactcgcgtttctctcctacggaacaacagatttccgagaacagagccacgagctgctcaaagaaaatttgctctcccgatcgcgagtgcctgcctcttgagttttttcaattctgtaaaagtctaccacttataaattaaaaacctaccagacgagaacgcacctctctcctctccaacacactcttccaataggttcgttcctgaactccgttcaccccattcttcgccttctatatatattaataaatacatttacatttacgtaaacattaatatgtatgtatatagtgtttatatatatatatatatatgtatgtatttatagagtgttatcactcccactacggccatcctgataagggtcgcatgcgagtgatcgtttttctcggctttcctgttttttctgctgccacgactttgctctctggaaggcagaagaaagtgcaccgtgtcgacgcgcgtcatctgaaaacattcacttttcgcgcatgtacgaatgtgcatgagcctacacgcacgactagaaatgcctgtctctcttcgcagaacatgcctatatatctttatgcacatatatatatatatatacatatatatattgttacagacatccctaccgcgtgtatttacgtaggcagactacacatgcacgttcctgaaggtgtgggctagaaattgaaaagaaaagaagcttcatccagaacgaatagcgaggcgcgtctgggatgcgaagccgaaaaagcttccgggtgacggactcgtgactcactcccgcttctccctccgcgttcccctcacagccctctccttggtcgctttcttttaattgtctgaccgcgaacacgcagtcgtcgatttgcatctgactcggattcgaatccctgtcctttcacacatttccttctgcatttgagtaaagtgtctggcccccaagcgcgcagctgtctaggcagaagactcgaaacgaattcgagatggactcagaagaatctgcgaagagagagagaacgcactcggaaggataagcagatgttccacggcgggggtgcacacctgaaccgcggagaacgccttggagtggtgaagagaggaacggattttgactggaggcggaaccgaaagacttgcaggcttcggaaggggagagtcattctttgacgaaaccagcactcggtgaacgtgagagaattcgttttttaaacagtcaagtctcttgtttgtgggggctctttttggcaggcatgccctagcgattggtgactcaaggaaccggcttgccagctgtgtctctcttggtgcctctcagaaagagttttttttcttttttgcatttatttgcctttttctttcgaggccgttgccccctgaacctggggtccctacgaaattcttctttccttgccttcttgatcgctccgcgtcttggtgagtagacctgctgcctcaagcgacactcactcctcgtgtctcacgctgttttccctcgtttcctttcttcttctgttcttctctcttgtctcctcaacattcttgtttctttttttttgtttcctcctgcttcctcctctctttgctgcctctttatcccatatcttcgttctcctctcctcggtcattgtctcctctctctttcctccgttccctctcttctcctttttcttctcgtctttcttctctctcttcttctcttttctctcgactgccaggccgcctcacttccctcctcgctgccgtcgaattgtcgcccctcttgttctctccagtgtacatacacccccacgtgggatactcttgttctccctttcgctctttctctcgtggtttctctcttccttcgcggctattgccgccagcgtctagtcctctgttagcaaca

SEQ ID NO: 520 - DNA, 5010 bp, Toxoplasma gondii
  source 1..5010: mol_type = genomic DNA
gttgagttacgcgagcccagaaaggcaggaagtgaagatacaggcccgctcgtggatcgccaagatgtcgatagttttgcggtgggcgtacactcgccggaaggtacgatgacgcggagggtggagctgcagaaggcaggggagaagaggcgaacgacgaacgagaagagaaaagagagggagaagaaggtcgaagagaaaggagggaaggaggagatggagaggaagagcccacggaacagagaagaggtcttggcgcacagcttctgagagccgaggtcgaaggggagagagacccagaaaactgcagcggagacgacgactcgcgtaagctcaggtgaggactccctctgtgttgtttgggcgtcgagccttctgctgcggacgaagtccaagtttctctacgaacgtcaccagagaacggaagctctctgttccaggtgctggacttggaaaacggagaaggcgagaaacgtccagaaagaggcctggtcagaaccgacttcgcggctgtgaggcgacagccaagaaagagagagtgagaaaaacagtgtggaaaaacgagagggtggaaggacgccaggcttgggcgccgccccaggagggcacccgatacgccgcggacgctgtgtgccgtcatcgcggaagaaacgagagtttcaaggtgaaaatgaagccattatcaccggtcgagacacgcaccgggtcagcaggaatcgagttgagaaaaaagaaaagaactcgagcagttccgctctccagtttccacgaaaaacgacgcgcacatggagtgtgcccgagagcgcgctgtaaacgaacacccgggaggggtccagtgtgtcttctcggaaagaagggatggaaatgcgaagaaagcaatttgtttgcatctatggaacagaaagaaaaggacagatggtccagcaaagctcgtcgatctcccttttcccgagaccgaactctgctagaacggccgacgaagaaacgaaagtacgcgtagagaaagatctcgacgaggtgactttgcgaccaagacccaaaaccgaggaaacgagtgaacttgacgaggcagaattcgatcccgtctgcaaggacagagaccaaacagaaaggacggagttcgagcagtgaaacgagaagcggtggggcaaactgataggaagaacagagaagacgacttgctcgcggtcgtatgtgtaaaagaacatgtcgagtctgcaagcccaccgcatgcagtctgtgcggtggcgtcctgacaagctttagaggaatgagatgaccctccacagtttatggcactttttttccgcatgttttgggcgggaccaccgtctctcgcgaaatccgcagatctgagggtttcatcgcattcaggaaagcagaagggagggctccccgacctcagtaaaaaagcagcgcgggtgcctggttccctggctcagatcattatgtgcgtagagagaaaaaaaggatgctgcattcatactctgcttttgcttctctaccttagtgtggaaggcggccagttcacgagaagctgctgcagcctctctagacgctgtagaggaacctgtaatccttcgtagtgcaaatgcgacggcacctcagaaaaggcgcagggttcaccatgaatttagacttgcccacgagatgcaggtagttcgtccagttcagtctcttcagtttgccgactccgtggaacggaagctaccgagggccgcgtctgagtgcgcttttaccaggcagttgcgtattcttgttggctgtcaaatctcgtgcaatttgagacgtaattgaggaagcttcaagtgactgcttctcacacaaaattcgggcaaatctgatttcacattcagcgttttccgcagagcgtcgtgcagcagttcagcgagtatccgatgtgagaggatccgcgaagtgacagcatcgccacttggagttgtcatatcgctccgaggtctagggcatagagcgcccttctttgtctgacggtacattccacttgcgtacggacagcgaagcaaaagcgaggggaggtcatgtgtgagagtgacaagggtgctgcaacagatcgaactgtaggcgaggctactcaacgggaaacacggttgcgtcgttgccatcctagacggcttgccgttgatactgacagtcttaggcatcgaaggcaggccctacggtcgctgtgttgacgactttcttcgttgacttctctgcatccagagactgaaactcggatcgggaggtacactgcttcgaccagttcaggagaaactgcattgcggtcaagaatctgttacttttttaggaattgcaagagggtgacggccgagccagtcggttccactgaacactcagcgaaaacaattcagacaggaaatggagcctcgcgaataaaaaaccgcggtcatgacggggcattttcccgtttcctatattcagtggccaagggtggtgcggagacactcaccatcaggtatcgagaatatgctccgcaaaacagaggcttgtctttttttcacaagagcttgcgacaaaagcttgcagaaacgtgcacgacaactttccgggcgcctgctcattgacagaccttgcgaaacaggctggcaagctgtcgattgtttctactgacacaaagagaacagaagtttcctttcagctgaagacgaacatccgcagttcttgtggtttcttcgaatgtgcagttggtttactttcgaggcaactgggagtctttctgcgtctgcccgaactccagtcttggcgcttaagaaacgtctgctgcggtgtcgcgtttttgacatattcatcctgtaagaggacagtagatccttgctaaacagaaacgaaatcgcactgatgttagacgattcttctgtgtacaacactgcactgtgaggcaacaaaccagttctgttacaatgctgcgtgcgtcttttattgtatatctgccggactgacgcacgcgcatgacctcaattttaaaagaacacaagttcctctgctttccggtcgaatgcgtcttgacctgtagttcgcatcttgctcgcgatttgatgttgagacgctgcttctgcgtatatcgatctagcactagcaatcggttacaatgggctcttttacatagacaatcaattcacagttccgttttccgtccgaagagctttgcttcacgcgaagtgtttgactgtagacgcggcttccgagtgtttttaccttctgaggaacaatgatccaacagatgtagttgttttttgtgagaaaacaactgcaaaccaaaaatacctgagtctgcggcaaggggcgaccacagacactctagacaccagctgttgggggtcactagtgtccatcgtgaccgtgccacggggttcccttattctccttgcaagttgtacaaagatgagaaaagagtaatgtgccttaacgcttcagcgagagggccttagcatccgagaaatcgatcaagaatacgaaggcgtgaccgcaagacgctttttagagcaaacactctccgtaacgtcgctgtttttcgcgcttctcgttcgtcgtaacaatccggcagggctgctgcttccctggcctgcctgcgctcgtggtatacacatcaactcaaatccgaaaaacaacaggacatttgctgcctgtacgtgacatatgcttcgcgtcttgcccatgcatgctcggttgcacgttgcttctttttgaggagggtcctactagctcgctcacagtccgttgctgaacttccatgtgacttgcttgtgcgccctgctagcaggtggcgggcgctcgacgtcgtcgccattctgtcggaagtctttccgaggttcgctgaattgttttccggaaaactgctgccgcgccaagagcctgtctctatttgtgaagaaatatcttttcgcgggaggtctttcagaggtctcaagcagtgtgctcgtcaagacgggggaaaaatcgtgcagccagcgcacccagccggttttgcgcgcgtcggtctgcggctttcctctttttgcggcttggctgtttgcgttttttctttccctaatgcatatttgctggacacggaagtcgacgctacccaacacacgccaacaggtgatgtaccagctctcgtaaaagccggagtctcgtaggggcgccgctgtcgcaagggggctaggccgagcatggcgttggtggttccgtggttctctgaggaccgtcgatatctgctggacgatgggactgggattttatcaccttagtcgcgtgttgaatttttcgagggggattgcggtgtatcgtttgcgttttcgcggagagctgtttctccgcgatatccaagcgtttcttcgtttccgcagcgaggttctctccggcggtcgttccctgccagtgactctttcgttcttttcctctgcaagtcacctctttgctagccgttgccacttcacgcctttcggccacagaagagggttcccttttcttgtctggtacgagttcccggtgtgagcgccgtctagcgttctgccagtgacaaacactgtcgtggcttctttctcaggtgctcctgtgcggtgaagacttgcacatccgacacactgcgtttgcgaaggatgacactgctctccacgctggctcaaccaactggaacaggtcgaaaactgcagcccgttctttctgtcgttttcttttcgagatcccagtcctgtgttattcatgtttcgcaacctgtaccgtacgggtgctgttactgacagtctcacctccacgtcactctcacaattgaaccacttcgttttttccgtcgctgcccttctccagtgcgttgcaaagtgtcgtttgcaaggatcgcgttttcgctccctcctctccccattagatgggtgcggtcggtagacgaccagcgagcacagcacctccgtacccctcaaactgacggcaacggcgctctttggtttccgtatttttcttcaggagctaccggaagaacgagggaagcaagataaaagagaaaaccgaaca

SEQ ID NO: 521 - DNA, 2415 bp, Toxoplasma gondii
  source 1..2415: mol_type = genomic DNA
gtgcaagaggcgcgatgtgagcagaatcgttgaggaaaagaaaatacctcgacacaggacaaccactgtttgacgcggcgtccatctaattagatgtgcacatccagttcagcaaaaaactgcaggactgaagagaattccgtttgcaacacgacgaaaacagacggaaaagtttgtagtcggatcgatgtcgagactaggctggaagattcgctacatgaagacgaaacccgacgcatgtggaagccgcaaaagaaatgagggaaagctgtagtccgttgttatgcgccgggtagtcctggacaccatgtcacagagtgtgtagaagtcttaacagagaaatcatgaatctgtcagtcttcaaagatgcagaaacttacgaagccgttcatcatccggacaccaaagaatctgaggagaggtgggaatcccctggaaatcctgagaccctcaaaagctaccgcggcgaaccctccctttcgtctttcgtagaggcaggcaaccgtttcctaaggtcccgtatcgacggagaagccgcatctgtcggagattacgagacgctggaggcgtcacacggaaaaagttgatcaaagaggataccggaaacccgacagtgaacaatcggaggagacagcgcacaggaaacactcgagaaaagacgagacaaatctacgaaactgtaagtgattgagacgaatgtggagaggtaagagagcaggatcggagcgtaagagggaagaaggccagcgaagtcggcgaaaaaacgactcggaagcaaagaggatggaagacagtaggcggggacggagtagggggacgaagatgaaggagaaaacgcgccagaggaggtggcaagaagctccagaccacgggaaggaggtggatatttgctcggtggactcgggaaacaagctctctcgacgggaagctatcagcaaaaaggctttaaattgcggtagctaggctggaaggaaccaccaaaagaagatggccgccacaagcgattccagtgccatgacagacaattgagaagcgagttgtctggaacaaaacaccaagaggaaacgaaattcctatttccgcttcttcggcttccactcaagtgccagcaaaaggcgttcgttctgcaagacaaaaaaccaccagttcgcccgattttgcgggtgttttacagccgcgctcgcggtggctgcctggccgtgaaacgatttcccccgtcaacagcggcttcgccgatgtcttgctcgttctcgtctgcgtgaattttccctcagagcttctggggccagcaaggcagttttcctcctctctgaggacatttagcgctccagttttttcgcttgtttcttccgcgagcgtgtggaagtcgagtgaaaagtacgaaccatgaacggagaaaacgctcgcccgggtggtcggcttatttaagaaacggggtgccgcgagtgctggagggtcgcgaggcaaggggagacaaagtctcgatgacggtgggaatctcagtttagaatgccgaacaggaagtctagcttcggattgctgatgcttggtttaccatgctctgagtacagaaggaaaaggaaggcttaaacagttgattttccgcagctggagggcgtctttccaggccacattgaccgacttggtcgctcggaccccctctcacacggtgtgccacagtgtctagttttgagggatggggagaatagtaaggtgccatcaaagcgcacagacgcccgcgtgcaactttttcgacaaagggggcgcgtcctaagcgtcttggcagagacatcgaaaaggaatcgagcaagggtttcccgccgacctctgtagagtatttgagggggactacgagtggagcgttcgtcgacttccctgccgattttcgaaaagacgaaaggtggtgtatctttgctctctgctttgccgagaaaacacgaaaacctcgttttcgttggaccactcaccaatctgactttttttcacctcactttttttcctgttgcccactccgttcttctcgtttggtggagcaggttgctcaggcacacctttccatgaagagcaggacagttccccgcttgccttcccttttggtgttccgctgatttttaccgttttttctgttgtttccactcctccgcggcggaactgccttcccttttctgcgtttccccggcagctccctactcttgtgcgtccccggaattcatcgtgttgaaaatttctctgtcgctcggccttccttctttgcgtgcacaaaagcgcacacttctccccatccatgtgtcaccggctctcccgtactttcccgcactgttgcatgtagccccgcctcccacgacggaacgctctgcagctgtctccaagttcctttcactggctggaaggagcttttttttcatccctgcaaaa

SEQ ID NO: 522 - DNA, 656 bp, Toxoplasma gondii
  source 1..656: mol_type = genomic DNA
tcgagacgcatgcattcgaaacgctttgaaactcggaaaaccttactcgcttctggtcaacgaagaactgcggacccgcagggggccgaggaacaacgacatggtgtgttggcggcgggggaggaggagcagatggggacgcagctgccatcttttggaaatcgaaggagtcgacagagagcagagagctgcagagaggagacttctcttggcgacgtgagcgccttgttgacaccgctgcgtccggtgtatctcgcgtcttagaaatcaagaaaaacgcagaaactgcttctacaatatccagagaagcacacggagagcaagttcgaaagtggacagaaggcactgcgagagaggacgagagagaggcaaggaagggagacaggcagcaggaaacatggagagagaaaaagtggaaagccactgcggtgagagagacaacgggaactccagaagtttttttttcgcgaggtgcagacagagaggagaagaagacaaccgagagaagcacagaaagaagaggaaggagaggagggaggcctctttcagaggtcacgagcggccttcagttctgacttgaaaatacgacggcggcggaaacagtgaacgcaatcgagagagtcgaacattttccctgtgaacctgccttcctcaaa

SEQ ID NO: 523 - DNA, 4270 bp, Toxoplasma gondii
  source 1..4270: mol_type = genomic DNA
tatatgaatatgtgcacttgtatataggtgtatccgtaattacgtttaaacatacgcatgtatatacgtaaacttgtagacatgcatgtgtatataaatatatatatttaaatatatatatatatatatatttggtttggatgtgagaatgtgggggcgggagtcgaagagacgagaggaaggactgttgaaccagcgaacgtcttggagacgcagagaggctgtctttttcgagagaatgaagaaacgttttttttctgcgtaaacgcgcttttttagcttaccttcgacttgcatgccctcgacgaagccccgcttgacggtgtagcgacacgggaaattcggatctcgcgcaatgtacgctttctcctcatcgaaactccgggcgcctcctgccatcttccccgccatcctgtcaccctgtttgcctcgatgtctgtttcttctctctttcctcgtctctcttcttgtcttagtgtgaattccttcttctctgcgtcttttttccctgggcttcccgtcctccttcgtatctgctgatcgtctcccttgcctctgccttctgcctttccttatctcctgatcgccttgtttctcttcagacttccttatcccttgtcttcttgtcgtccgtctcgtctttctcttaatctccttatcgtcttgtccctcgcttcttccttctcgtctctcccttcctccccttgacttcgcatcgcccccttatctctatcttcgtctccgcatgcggacttcctaactcagctgtctctgccgtctctgctgtttctgctgtctctgaaggacgcctggaactgctcgagaagtgaagggaggtcgagggaaatcgtcgcggagcgcgtttctttcagcggcgtttctctgcaaaaagcggtcttcatcacttctcgcgttgccgtcggccgcgcagatgaccgctccgtcttggaagcattcgcctagaactcgctggaaacaaagaacgccggaagttccgcttcttctcgcgaggtgagttgcgtacaggcgcgcagagtcggagcctccacgcagcgtctccgctgacgcagggacgaatacgaagcagtgccgaggcggctgcagtctgttcctctgcttcgcagacggagcggttgaacaagaaacgcgaaagtctttctgtagaaaacaaaggcaacgtccttccaagttcgccgcggctgtcgagggtgtctgccctcgcttcgcggtctgtgcatgcaaagagaaacgcgaaaagtcgacccaggagacacggagacagaatcacgagaggaacgccgacacagacgaagaactggggaggaaaaaaaaacagacgcgaagcagagcgagagattcgcgactcgcgactcgagaaggggagaggtcctctccgagacgcggactcaaagaagagaaggaatcgcttcttcttctcgatacctgtctcggcctccgagggtgccaggtctacacacaacactcgactctctctgtactgcaaaaaaaaacgtcgcaagtgcaggggtgcagcgcgagtgtgcggaaacggagatttcctcgtttccaccgcgcgggcaaagaagcaaaactggcgaaggttctgcggtctttttgacgcgtcgagaaaggcgtttctctcaccgtctgattccgcagcaatcgaacgaaacggacgtcgcgcgcgagtcccgcctccgcagcgccccccttgtctcttcgcccaagtagaaaaccgcagaaacgaaacgcgtcctccgagagaaagagaaaggcagttgacttgtgtcaaaagacatctttccaccgacgcgtcttcagacccagccgcccgccgactcccccccccaactccctctcgtttaattcgcgcttcacagacacgcggcagagcgaaacggtgaagcattgtagtccgcagagaagtccatgagcgttgctcttgggttcgccgcaggtctttcgttcttttctctcgttctttttatgtctctctgttctcggcagaaagtcagggacgaaatcgggaccgcctcggcgtccgaaggtcctctttctcgtcgattcggatgccgcgcagctctgactcgcggactttttggtgtctggcgacggatcgctgaagcgaaccttgacgcgcgaaagaggattccgccgcgtggattcacgttccgaaaaactgccgagcgaagaaaaaaccttgccgtcctaaaacagaacgcagtggtagtaggaagcgggagcgcgcgtccacctgcttgagatccacgccaggcagaagaaaagaaacgtaaacaggaacgaggaaacgaaagacctgtgtgttcttttcaaacgctcgagcctgtcgatctgtccctgctttgttcagtccaaggtggaaaaccgaggcgttctcaggaaagactctcctcccctctcaaggtttgtaggagttcatagaaatgcggttcttcttggaaaaactgttgtagtggaacaaagtgtgaatagggttccccttcaagaaatcatttccacagcccaaatttccagcgtgaatgccttcccctgcacaaccacatgaaggcatacgcagcatcgagaccgctcgtgaaatgcgtctaaacgatccagggaggcacacgcgattctgtgaggaacgaaaagctctctccaccttcgaaaacgtcttctgaaatcaatggagcgcctccacggtacgtagggcgtggagcaagtggagcacaaactgaagctcttgctaaggtgctaaggaagtttttcctgccgaaattagggagcgaaggtgcggtgtacccctgttgcacgattaagaacagagagggctcctcacggcacttctatctgtttcttttcgaagctgtttccccacacaacgtcgtcttcgagtctcgctcccggagctcctgagacctgcagttctgctgcatcgatttgcgcaaccccaggcgccagagagaagaaaggtttcaggacgtccttgacgcaggccttggtgcagacgcaaaatacagcgaccttcgacactttaacactgccgttttcaacgaaatgctatttggaagagactcgatattttgaacctacagaccagaaacggtcatgtctctctgtcgtctagctaattccagtaatatatatacatatatgcatatatacacatatgtgtaagcttgtcaaggccatgatataccctttttatttgtcatttgaaaagagatttccaactcatcgtcttgggtgcgtgagtgccccccagcaacttttattttctgcttcctacacagttcataggatctctgtggtccctcaccttccttctgtttcctccccagtttagagggcgtctcggatctctcttcctccctcttgcggatcgtagacacttcctaggacgtcggtgctgatccgctttttcaaattgagcaatgattgctcctccgctcatcactggcctaccaccgacttgcccttccagaacccctcccctccccacactcccagtccaatacagtctgatagaacgaacgaattccgaacaggaaaataaaaggatatgtcgcggaaggaactcggcattcctaccccagtggatgcatttcgacacaccgatatgcttgcacctgcgatctctataccagcacaaacaaacaattgaatatcgtgtactttacacgtctctggacagagggtcgctggaaagagtttcttataccacagtatcatcccgtccgttttttaaagtgaattttcactaactcataagaaaaaaagttgcttgaaacagctcctagctaaacaggtgaagctgtcccgactcaacggtaggctctctcgctcgtcattccttttttcgagtcgaaacctcgccgaagcatttgccgacgtcacacctttctgtggcccctgagctcggggaaaatctgtaaaaatcaaataaaagaacatcagccttgtgtctcgaagttcatgcttcgtcacacatgttttctccccctttcgacaccgcagtgtctgctgagttcgaggcgccacggtggcgccttagctcttcgctcgatacacacacgaagactcctgggaccccctgaagaaattgtccagagaccccggcttatatgcgatgtgaaatgctggactgctttacgcagatttgtagcgagaacgcgcagcgaaaaggcgcccctttcgagttgaactttctcgagacaggaacgtgattcggcttatacaagaaaacacaagagcccacgctgcgccgggtgta

SEQ ID NO: 524 - DNA, 3215 bp, Toxoplasma gondii
  source 1..3215: mol_type = genomic DNA
aacacgagcggcaaatttcccgcgggcgaccggtttccttcgtttggcacgttccatagccaataacaaggcggcggaagaagcagctgctgcagccctgcacagccacacccataaaaatgaagagaaactgatgggcttgtctagccattgatggagctggtggttattgaagaacgctcccggcagagaggtgctaccaatagtggtttgttccttggatatatttgagatcatccgccagataccaaattctctaacgcatgcgagcgaaataccgttgagcggcacactgcaccatctcaataacggggcttcatgaagaaatcccagcccttgctgtcaccagtgtagcttcaccatcagtttagtattttgggaaccacgggagccttcctgcaaaatgagatctgttgatctgacatctccctcagtccagtaacaaacgaaacgcccacaaagagcactattttccacaagttatctgcggaggttgtcatcagcatctggtccaaattttagaggtctatgcgatgtctttgctgcggcaatatcgcatcgacagaaagtactaaagcactgtggcatgaatctgtgcctctgtttttgaaactcaggcacagtcagcacgaaactgcaaaaccggagggtgatccacacttttgctacgggagccttccggaaacgcgtgcatccactctatcgttgtctttgacaacgcatttgatcgggccctcttgttgtggcactacaagaatggctagtcagaagagacgagcatacaacttagccgtttctgcagatgtaatatgctccgatcaacgccgtcacctctcttcaacccatccccgcagcgtcctgtccccacgtagctccgcttttacgcgtatcggacaggtgaaagagcatatctgatgaactctcattgaaagaatggcttgtgtcatttgtacagaaatgaacagaacccaaatcatactcttttcggttacaccaaaaagatcagcggaaggcagcttaaacgatttataaacaacgctaccccccgtgggcaaatgtgactctgggtgctaggtccgcctcatttcgcgctccacagcagccgaaaccacaatgcagtatgcattagtcactggagcaagtatgcttctatctgggatcaacctcttggggtacttacaggatcatcaaagccaccaactgcgtgcgctgagtcttgcgccgagttaccaggacgctccggcggaccgaacggggcactggcacacgagttgtccggtgcacggttcgtcgagtgcttctggcggtcttcgcgtcgaccattcttgatcgactacgttcccgttgttcacgtacaactaccaggggctcagcgtaagcactgccaccaaagtcgcgccctttatactgcgcgacagcgatctgttcgccagcggcggctagagaggcgttctttcttatggctttagtgacgccatcataagtagatttagtggctttagtggcgccgtcatcagcagcttcgctggtttctgtggtgcggtcatcggcagttccactggcttcagtggtgccgtaatcagcagcttcactggcttcagtggtgcggtaatcagtagcttcaccagcatcagcggtgccatcatcagggtcgtcagtgatgccgtcatcagcagcttcagtggcatcagtggtgccgtcgtcagtaggttcagtcgtcccgtcatcagttgattcagtcattccacctacgtagtacggcggacgcggggcactgacggccgcttttgtcgctacgctttgggaagcgaaaacgatgtcgagcatgtgtgacgaaagtgccatcacagcgataagagccgtgacagaaagcagacgtgcggcaccatgaggccgcgacatgctcatcgcttgcctggttttcccgtggcacaccattgttttccgtgccacagtccaggccgtttggccagagacgacagactgaatgagtgatggcgccattccccgcgagggtaagtcaatgaaagaacctgcacctcaaagtgacctcggcccgggccaaagtgtgtacgtgttgtgtgcgcaccacaagaaacgcgagacccactctcagtggggggtggcacggaagcacgacacggatcccagacggtctttttccagacagcttgtgacatgaaaatgcacgtgtcctaatatcaataggaagcggctggggttcgtacggcccttcgcgcaaggccgttgtcttacacgtcgtcgtccaccacggcaggacagcagaggaaacatacgcggaagagactgtgttgtacttttccggcgaaaaccagatttcctcgggaaacattccaaaatctggcaacctataacgtctgactttgactctaacgccaaaaaagcgacagcaaggagaaccgggtcacgcgcgccgcgcccgctttcccagccgatactggggttccgtgcacgcaatgctgtgtgcttggctttcttgctcgtcgaatttagccgttaaccgttagaaggtcaatggcttcacgttcaaaaagaatgtctgctgaacgcgagagaacgttcatttacatttcagcgacacagttggaacttaggaacgcacggatcgtgtgtagcagctgcgacaacggtgtacgacacggaagtggacagagtctccgcgggcccagcggtaagatgtgccgagcggtttcccgcatgcgaccttgggcggacacagacagccagggcgagatctgttgggacctcctgagaccctcactagaagtagaggtaagtccaggtgttacggctggccagggtgcgtgaataacgcatctgaagcaggcgatgggaggagtacctgccacatccagcacttgtacgttgaataactcgtcgacgagttccgcttgcatgcagtttacccgccccatcacaaacaaagggctcagtcggtggttgccacaacccttggcagtcgctattgcccctttaatgttactggcagggaaacctgcctacaacgtgcgcgaggatgtggcgaaaaaactctccccactcctggtttgtggttcttcgcgccgtctatgattcgagtgtcgggggagctggctggttgttggagatggctgcaagttactcccataagcaaactgcggcggactgtagctggcttctgtgagctttgagaaagtagcgctgacggctaccaa

SEQ ID NO: 525 - DNA, 1781 bp, Toxoplasma gondii
  source 1..1781: mol_type = genomic DNA
tggaggaatgaaagatcgtattagtattccctctgtcctgtaggactgtgaaacttttgaatgtttgacagtctttttaaccgtcctggtgcagagtggtgcatactgtcacagacaaaagcgtgctcgcgacgagcaatcggaactctctgatcatggaagccacctacatggcattccttgctccggaatcactcgggcccttccactgacacaacccatccatgggactacattctgtgtagtaagcacaaatagaaaccttaatccgcgcgggcgtgtaatgctctctcggaggtgctacggcatgattccacgcacagcgactacgcacctgctggtgttgtcccttgctgcaaattctgaaagctcttggtcgctccaagtcatgactccggtgacattactttgcagcaaacatgtctgggacgcggccttgtacctggccgtgttcacctctacaagggacacagcgatagttcaaattcgacacgcggtcaacccgacactgacaaacctctacagcacatctgaatccttgttagcccttgtgaactgacccactacatctggtttcttactgaaactccgtggtctctccgccctcagaagtccttttccgacagcttgccgccttgcagagaacacaggtacgcctctgcaccgcttgcactatattctcacatctgtctccgaaatggtgtagaaaacaagcgaaaaaggagtgttattattggtacaaacactgcccagcgttttcccagtgcatctcgcctcggtgtggcccgattgctttctgccggtacatgttcccgcgccgcaaacgccaacccccagttctgtctagtgtacacatattcgttcatgcggatattccactagagggtgacagtgaagaagcacaaagaatgcaggaggccgcacgaaaggaaggtaaacttcttacaaaagtctccatctgtccgcctatgcgcatgcaggtgaagggaaccgacctcctggctacggacgacgtcgaatcctccgaaaaatggtcatttttcacttttcgcagtgagaagacacccaatttgtcttctatttcttctccgtcgctgtttcccctgccactaggtcgcttccataccctttgttttgagcagtggccatctccagtttgagtgaacggtcgcagccctgcgtgacgcttttcttgcatgcgctttgcgtacgaagcccagtgtgtgtgtcccgatgtttttccccagttgctggatacgttcctgagaagagcacgcggctcctctggtttgtctctccagtattctcttgctgcttctcgcaaatgatcccctttttcccacatcggtttttctgcccgatctgccgcacaacgtctgaggcattcgtgttaggggggcaaaagggacagggacaaaaaggcgagcgggtgcctccggtccaaacgtaacgtttttctctcgagcagcaaaagcaaatagaaacgcgtccctccgtccacctgccttcgagatctcgtgtcggtttgcttttctctgcatcctacgaattcacccaccctttccgggtgcacttttcgttcctcttcggaaagaacgcaccgtgtgccctcaaacccacttgtgtctgctgtgtattcttgcctctccggcgctttcctcgcctccctgtctccacttgtcccttgtacagctaactcagcggtcggggtacctctggtgccagccaggttctgcttccctccagtcttcttcctcgtttttttcacctcgctggcaaaa

SEQ ID NO: 526 - DNA, 1874 bp, Toxoplasma gondii
  source 1..1874: mol_type = genomic DNA
atagaagcgtaaatctatcgatgagctgtcggctgtatgaacctcctccgaaacgccactgaagcgaaaaataagagtttgtgtcttttgcagggtgtgagtttgatattgcacatgaactgcagtcagatttttacggaacccaattccactgatcaggtggtgaccttgactccaccttttgtttgtcgacagctgcccttgaacagatagggggggtgcttcgttgcgtaatgtacggcgtgcgagggacttaccttcgctaatagggtacttgtgttaacggcgctctcaacgtatgctgcacaaaatgtagctcatgtgctcgtaatccaattgtttgtcttaactactcggagaagatagtgttgaaagtccatcggattcacgcaggcgtaactctccgtttgacactcctggtgtttttgtggagaatgaccctctgaaagtgatcgtcttggcgtatgtggtatcattcgtgcttttgggtgcagtgtcgattctcagcatgaaggaagtaccccggtgctcttggaaaccttcagtgatgcctcggtttccgtggctccttgagtgctggcccgttcaaaagacgcgtgacaacacgtttcaaagagaaacacgtgggtatacatctggagatttaagaggcagcagagatgtcgttctaatgtgtcgacatccacgataaactgccatgcctcttccaaatgaaactaaaagctgttcctagcctccatgtgtgtcgttagcttctgttgtaggaactgttgtggcacaccatggccgaaattcacacaacaccatattccgcagatgttatttccgttgccgcacgtctctgaaacgcaagacgggtcatccaacacgctcgtggaatcgtgctccggctttctgaggccatagcgaagactcctacagccagtacacgggcaacgtgcgtaggtgactgtgtctgccagacccgctgcttcacccggctcatcattataaaggctctgccagctagtgttttcgaaaaatacttccagtgactatgactgaacgcactgatcagaagagacttaaagcaggatcaagttctgagcacccactccattatttttccgttcatcaactacgcaaacagatcagttttccagtttatgttcccgcgcgtggcgctctagtcccccaacgaaactgaagttcatggtgccttcagtggggaaacgctgcttttccacttatgatacatcctcaaaatacatggcagtgcttatgtgggaaacaacttagctcacagatccatccacattctgtggcaaagacaggcacaggccgcgctcgagaaaaccactggttccgctggacaagccggtcggtccacagaatcgctggaccgtgcaacttgactcgtcgctgcgcagtacgtcgtggtgtgcatttcctacatcgaaaagattgttgagcccatgtggcctttgcgcttgctcgcaagtttttgcagtctgtccttgtggttagcgtatggcttgctactggcggctctcgcaagtgtctacgttacattccctcatgcattccagcgacactggctttcagaacgcggtcttagtacgtgtatctgccattaatgcaacaacttgaggtggtcacagtaattctcaccggatgattgctatcatgaaccaccgctgttttttgagaagtccgcgtgcgtgtggcgggttcaccctcctctagcacagcggcatccggtggcgattccgggtatggggaatctacccacgttgcccatcgaaggtacacggactcaagcatttccagtgtatagctattgctttttcttgtgacgcagttcatttttgaaccccttcagctacgtctagaca

SEQ ID NO: 527 - DNA, 2327 bp, Toxoplasma gondii
  source 1..2327: mol_type = genomic DNA
gacactggaaatgctctgccttcgtaggtttcgcagcagttgcatgcgagacagtgcagattccattgacggacaagagcagaaggaagagaaggctggaaaggctcctcaaagctcgaagaagccacgcctgtctccccgggcgaccgaagcagcatctgctgaggcacattgctcttcagcggctgatgatccggtcgaactctcacacgcagaagactcaacgccaatcagcctgttcatgacaccacttcacattgtacctgaatggaatttcctagcggacctgcgtttgtttttttcgttctgagaaaagaatgtctcgtctccgtctctgtgtgccgaacgaaggagttctcgtctccccagaagccgcagagaaagcggctcgggtgcacaagggcggcgacaccgagtacccaggagcagtcgaggtcaagaagcgaggagcagaaggaaggcctgcgaaagtgaagacgaaaagatctctcaaaggcgcctgaaccgtgcaaaggcggaggctgtcgcgctcgtctccgtcgagcgcgacgccgcgcctgcaggagacgcgcccgcgagacactctgcgtcgccgtccgcgtcgggtgtacgtacacctggtcaggctggagaatgtgatacccacagacggagatcggagcgtcgactcgggtgtctcagtgcgttgttcccgaaagaactcttgcgcggagaacgaggatcgatcaggcagcttgcatgcgcagcgaagaaatgaaaggtcgttttcaagtggaaaaccacacacggccggaaagagagaaccctctgaggctccggaaaggaaagccggaaagggcgcaaaagaaagaagaagggggtgagacaagagaaagcggggcacaacggtggagaggaaaaggacagccgaagaggaacacaggaagctaaggcgaagacgaggtgcagaaaagacagccggagagagagcgacaaagtgagcaggggtctttccggcgagaagcgaagcagcgagtcgcgaaggtataggaagagaaaaaatccctccaagtccttaggactgcccagacagggagagacgagcgggagacgccagaggcgcgccgtgcacgctccaggacagaaagtccggtctgccgcgcactctgcatgcagtcaggggcgcagacacgaatcataagaacaccaaagagaccgaggagcgcctgtgaggccaatataacgacagacgaaagctgaagactaacgcgaagcagaaaagggagccgcgccgaggggcagaaccgaaaagcgccacgcggtgtctcgacaccgggcggtggcgcacggggtttccttcgctcgtctggcagagcagaaaccgaaacgaagaaagctgctcgcgttttggggaggaagaatccttcacatccacctgcgtgctctcaggagtcattgagatcgcttcctctcgctcaacagagcctccctctgagagttgtgcgacagtctgcctgccgagtacgcgtgcaggtgtctgcatgcagctcgaggcccgcgccagtctgaaagacagagttctttgtcgaggccgttcctgcgcttttcatggacatgtggagttttgcaagcgccaagagaaacctggaaacgtggaaatctccatccgaggctcagacctgtctggcggtgccgcaggtcctcgctctcctcgctcgtttcttcttcgcgaggcgtcgcagaagcagccgaggcagcgaaaagtttcagtgccagctcgctgcctctgcgctggttctcgtttcttcggcttctgtttgccctctctcgtcgatgtgtgtgtgtgttctccgaaaattttgctctcctcccttccgtacaccacccgcgggctgctatggagcgtcgattcccatcgaaggcatgactcgttccctctctactactgcactaccgctgtcatttctcttttgtttcctgtctcttccttccaatatcgtccttgctctctcgtcatcggtatcgctccttcccgttaccctgttcgcgttctctttctccctcggtatctttctttcctactacctcgtcttcggcgtctttgtccccgttatcgccctctgtgtagttttctcttctatctctctttctccgccgctgagttctctgttcctcgccatttctcgttactttcctctgtctctccgcttcagcctgttgttgtttgcggcgctcgttcttgctgtcttgattttgcactctcttgtccgcctcgacagaggcttgctggagcgcctgcagtgcaagagggcggccgaagccgaggggtcgacgcgccttgaagacga

SEQ ID NO: 528 - DNA, 2389 bp, Toxoplasma gondii
  source 1..2389: mol_type = genomic DNA
cagtccctccgacaatttccgctgaacttcctgagagtcctcacacgcgccgttcttcttttgcgtccatgaaagggaagaaggtcttctaaaactccgttcgccttctctcctgtcgcctcctccccggtctccgcagtccccttctccccggtctcctccatctccctctcccctgtctccgcgttctccttccccgtcgcctcctccctcgaccgtcgtcttttctccagcatctggcgccggcgggaaggtgccggagggcgtcgcgaggaacggcgacggcgagagaaagaagaagaaggcgacgactttccagagcagttcaggcagccgggggatgcacagacgcatggccgagcctcgccgcctgtaccagacaaaaacgaggtctttgctcgcgctgagaacagaaggaaaacctttgctggcggcatcgccactgccgtcgctcacagcgtcgtcatccccgcggtcgtcgcgagctctcgcaccggttccctctccgtagtggctcccggtaacgccgggtctctctgcagtgtcgtcccggtcctcgacgcttctcgctcgagctgcgtctccgtctgggggactctgaaccgctctgccgtcctccatgtcggctactgcgtcgctcgctcttgtgttggaagcagtcgcctcgcttcttcccgccgcggctgcgcaggagtcgcctccgacgcgcggctggccaggtgcgtcgagaggagcatctccaggaaggcctcgctctcggcagacaaaaaaccggagcgagaggtaggcgtcttcttcgccgcgatccgctaccttcgcgagaagagggtcctgagaaatcgagtccgaaatctcgcgcaacagcgccgacggcagataacgaagagtcgcttctcgctgcgctgccgccttcagcgacgaggacgaagaagaggaagacgcggaagcaggcaaggaagcagacgaggaagagaaagacgagcaggaagaggcagaggaacaagaggaagaggacgcagatggtttctgtagcgcggcgcggagatgctccctctgctccgcagaccgtttttcgcctcgttcccccctccgcctgtcgcttccttcctctcgctcttcatgccgaagccgattctcccttctgcgccaagtctcgccgtcggtgagctctgccgtctcacagaaaggcgagcgacagcgcggtgcaggcgtccctccaaagcggtgccgcgggccgaggaggctctgcgaggcctgcgttgtcgcctggcgagcgatggatctcgtcagcgcgccgccgctcttcgcggcgcggtcctcgaaaagctgaggcgttgtctgtacactccgccggccagccgagaggccgccgtcacgacggcctgcccccgccgcatcgtggagtatccagccgctggctcgacgactgttgtctccgtcggccagagaagcggcaagcgattcactgcggtggcctccatgtacactcgagtgcggtgtacgtacactcggccttggcgcctctgccgaggggccgttccgccgttggattccggagtggagatcctcgctttgccaagaggaagctctcgactgggatgtggggacgcccatggctttccatgttgcgctgttcgccttcgcgttccgtctccttttcagagtttcccctgtcttgccctccgtccactgtgcgccagtgcatgcgcggcagtcacgcgttcctgcgtcacagtattgaccagtctgcggctttttcggcgaagctccaagaggctctgcctcacttctcagctctacagattgcctgcggcgttcgagcggctctccccctgcttttagcccaaggctacacctccgttgctcactaactcttgtcggctctgcctgctgtccccgggagcaaggtcttcagcagctgcgagttcctgcggcgaccggcgaagaaatccggcagctggaagaccgcctcgaggaagagaacggtgcttccagtcgtccagagcagcacgtttttctctcgacaaagagtttctcctgccgtctcgccaagagatggttgtcggacagaactcgaaggccctctccacgccgaggcgtctggtccgcgacggcgaggagaagaggcgaggcaaaaaaaacaggacagggccggcgcctccagcaacgcgttgggagaaagtgaagacagtcgagcgagaaaaatccagcgttcctctgtcgacaggggcggtgtcgctgcaggatatacagtagcacaccgtcttccgcctggtcatgacgcgggcagacggaggaagaccagagtatccacctgagttaagaagagttcttctctctcctcgaactcttgcaacatttctaaaacaactgtttatttcttttccaa

SEQ ID NO: 529 - DNA, 2234 bp, Toxoplasma gondii
  source 1..2234: mol_type = genomic DNA
catcggcttcgttgtgacgtctcacccaagaaaaatacaagtaggagttgtccagggcctgggcacactctcgccatgtttttgttctcgaccaggaagtgtatgtgaaccagctctcgtgacaggatgggtgcagcgcacttttccatttccctgtgatcctgctaatgagctctttttttccccaatagacgttttggcactctgagagttacacaaacagcaattcataaaagcaagaagaaacatgcgtcatctcacggttgtgcggacacttggcaacttcagctctgaaaaaaaccgtaccccgacttaccgcccatctgcattaaacgtagttgccttgattcagccacactcgcctgattagggaagcgaatagccctatcaaaatcgagagacgcatttctaaaagtctgcaatctatcggagggaatcgccacttcgtcggatgggccgccagcctccaggattgacattcctgacacacagagcagtgacaagcgttttcaaatcttcgtagcagaaaaaacacacccctacatgaaaggtgaaaacctgataggctatagtctaggagaaaacatggaggaaggtctacccataggatactgaatatgacaccagttatgagatacagacaaccaagttctttgtggttgctataactcaccatagcttgtgctatccacagttgctggtggactcaaatcactcctcgacgttccgtagggatgttgtgaccgtgaaatagcttcagcagtgaaaatgacacataaagctaccaggcctccaagcgtagtacaacggcgacgtgtatatttttcgtacagaaattggcgacggcatgtgaagacgggggcatagactttcattgcgtcaggtggtcttgacctctgacgaccgagtcgacacgatatcaggatacagttccgttgagagagggcacttgacatcgcggtacagagacaggaaacaaccatcaactcctgtagaaaacgcgacgcacgcaaattgactactgccttgcattgtacccgtacgtcagtaccgagatcaagtgccttgcggtgatgaagacagacaacggtgcgcaattttcaccagctaaactccaccacctgatctacatcacgaaggaagaagctggatccactcatgccatgctaaacgagaccaatgacgctgttgttctcacgaggcggaacatgctataacctcaagattgcatagtacagcactcgcgcagaacgaagagttacccgagtttacgaaacaggtcctcacagttgccattcagtcacagcttatacgctgcacatgccgtaccctgacttgccatatctctggcagcgtaaaaaaaacgagcaggtgactcgacgcacgaacctcccgcgtgtgtcaaaaaaaaagatcacactcaacctactctcgctgcgttgcagagtctcaaaataaaatactcattcccgtacctgtggaaacttctagactgacaacgatggccctggacccacaaattggaaaagcaagagccatgaagctgaatacatgcctgcatgtcggtggacggtgtcacccgaagaaccttgtagcgtctcgtttcccctaccggaaggcaccgcccatggcagcgccatcgaaggtgtcgattgttccattcagcgatacgcagcaggtgaggtagcgtttcgaccacctggaccctgagggggtgcgctacgggctagctccgatgagcggcgccttctcagtccatttgtttgacattcatctgtttccttcacttattcccgcgacagcgagctaagcgaatgtgctgtatctccattttgggtatagcagagtcgcgtcgcttgagacgaaccgcgtcgattctctcacgtgccctcggcttggtcccgagctgactggcggccagggaagtgattgcgggggaaaaacgccgtggacttggcagcagaaatgtgttctgaacgtcactgaacactagggagggaggtcgcctggtttcttctctctcacttcactacacattcttcatatatgtagtcttcctcctgagcgggcgttttgggatacgttggtgatgggccactagaaacatggtgcacggaccgcatgtttcgtaccttgtagcttcccgtttctattagcagtacatggatttttgatttcccttgatttgttaccgttccgttatctctagtatttcttctggcgcgagtctgcaa

SEQ ID NO: 530 - DNA, 1484 bp, Toxoplasma gondii
  source 1..1484: mol_type = genomic DNA
cactccagttctcgacggttcgtagccttcctctcttcagctgaacgaggaagactgggctctccctcttgctggcgctcgccgcagctcaacttcaagcagctgaccttggacacacccgccgaagaacatgggggagcagaggaggcagaggatgaagcagagcgcgggaagccggcagaaggagaagacggagaggaaacaagagaagaaaaatgaggaggcgaaaagggagaagaagaagccatcgggcaggagggagaaacgaaagcagaacacgagaaaggagagagagaagcagaaaaccgacgagacacaccagcggcacccttgtgcaggaaggagacgctggacgctgggaagcgggcagctgaacctctggcggagaccaggagagaggcgcttctgcgagtcgccggcatcatgaagaagaacggaaaatctcaggtgtacagacaaatgaaagcgagcgagcagattgctgcagtgtcctctcacttttctcaggtgtgagcaccaaggcagtcgaggctaagagatagacagctgcgagacgaagctcggagaatggtgagcttggaagagagagaagcacaagaaggatgctttcgcttcagaaaacgtggaagacctgtggaaccacgaaggcggagtgtcaccctctccatcagtgcatgcgcgcgtctcccttcgtcctttccgttttctgaagggaatacgcagattcagacaagacgagaagagagagaggagaacagagcgcgcccagagggcgagtgcctcagaagcattctcgctggtcctcttgttcaaacagaagggatttcatgctcctgctttcttcacgaacctcttcgcaaacagcaagaggtgcgtctaaactgccttgaggaatccgccacaaaatatcggattttcgaaaaacctctccgttcgctcttccgcgatcattttctccgcttcctgctccgccgagtgctagccgccctcgttcctcgccttcgcagaaacggatctacctcccgttcttctgctacgcgtctcgccaatccagcagatgaggattttccggtggaaaacaagggaaaagaaaagtgcttctgcttctgtcgcttgcaatcctttgccaaaacagaagcgagtcgatcgagagaagtgacccgcttgctgcgtctacagctggcaacagcattcacacacactacggcacaagcagcagacactgtctaaatgcagcgagtgtttccagagaaaaatcaatcaaaacagacttccgatggccacctgagaatcagttcttcagcttagatgcgaactctgtagtttccgcctgctaaatcctactaaaccagggtagcgggaacctcagaaacacccggatcgacacctcatttcaacaccctcccccgtttctccgaatatacgccgaatcgaagcagatcttgcgcgctctagccccgcagtggattttgacggttttgaaa

SEQ ID NO: 531 - DNA, 2576 bp, Toxoplasma gondii
  source 1..2576: mol_type = genomic DNA
gactttggtgcgtcgcatcatggcgcatctgaacgagctcttgatgaaggccgagttccgcggcaacggccgcgaccgaccgcgagagggcgcgcgtccccacggcgtcgacgaggcgattcaccgtacgcacgatgctcatggcataggcgagccttaatgcgggtccggagagaaaggtttgcatgcgccgcgcggcaccggaggcggcgagctcgaaagacgaggaagaatctacagggtgagaagaagcacagcccagaagcggatcccgcagaaggacatccagcaagacccccgtgacctcgacaggcactggaagtctccgatctcgaagcctccaggcgccgatgtgcatcgcggcttcttcccaggacgcgcggacagaggccagcttcagcgttgccgagtctggcaaatcggcgccgcgagctgcatttccgcaaccgtcctctctgcatgtgtctctctgtgcactggtcggcaccccagctccgtccggagaacctcccctgcgcatgcgccccagaacgcccgcgttctcggtttcgttccgcgagctccctgacgctacatggagaagcagaagcgctacgcgtcgaagctgctgcaagttcctccacggagctgtgcgcagtttccgtcgaccgccaggctcgcagaggaactccgcgcagcaaggccccgtccgactcacgcttctccgccacttctccaggagagacagcgaaccttctgcgaggtttttttccgcagtcttcgccagctccaagtcccgcctctcctgtgctgccttccgcgctcgtgaagccgcgacggcggcgcgcctgcacttgacgccgcggcgcgcaggcttggcagctgtcgccttcttggacggctggcgctggtgaacttgggtgctgcgccggcccattgtgagcagaagactcgcctgggcgacccaagaaacctcgtctacactgcgtccccgtccctagagccgccacctcactgtctccccttcaaactgtgcattgttgacgaagatgcgctcaaggacgcgaacgatctcaggcaaaagttgacggagttaaactggaggggtgaagatcgaagctcaggacgttgtgcggtcggaaggaacgctggggacgagagggcagagaagaggagttctatccgaacaggagcagtgcctccacgtcggctgctgaggagtcagtccatgactgaaatggtttctagtaaatatggagagacttctcctgaatcgcgacgcgagagagaggcgtagatccgcccttgggacatgtcttcccttttgccctgcctggttacgcagagatcggatccttctgcagcgctggggcttccagacagtctgaaagatgcacacaagccgagacttacaagtacaaacgaaaggcaggaccgcaacagtcgccgctccggagagctccagttctcttgttcgttgcggacttacgtcaagaatcgaatttccctccatggattgagagcccgagaccgaggaaacaagccagacgggacgaaaacgcggcagtgcacggaaacaacggggagaggaaacgggctgaacatcggcacgacaggtattgagaagtttgccgacagcgagcgcatgcacgaagaaaaaacggcgacttcacacgaactgcatgccgtttccttgcagcgcgacagcttcgtgcaggctgatgacaccaagcgactttctaagtatttcgtagctcggaagaccggaaaatgcacttaccctgcgcatacgcaaacgttctccatgcgcgaagacgactgaggcgaactacttgtctctgcgacgggaaaatccgtgaacaaacgatcaaggacgtagcaggctccaccaagtgcacaggttctgcagcggatgttcataacggacaaccggaagaaagagtcggcaaaaatgggtgtaaggtgaagcctttgaaggcttaaggcagacaaaccacattcgaggccaaatctgtcaaacacggtagatgcgcgcggctttctgtgcgcgagacgctgctgaggacccctcttgagtgtcatacctctgcgagaaacgtcaccgaggcagaagacacgagtccgaagggcagaagcggccagttccaataaaggcagaatagctttagtcaagttgagcgcctccggtttctggacgcagataatgacaacagtcggcagcgtgagagtccggacgcgatgaggttcatcgaaagtgtctgtcgccctcgaatcgaagaacaagctgcagacggaatgcagagaacaggttttcccttgcttccgttttgacgcattcccacagttgattttgttgggagcgacggctgaactctggtttccgctggcagtttcaagaagcagattccgtttttcgcgttctaagcgatttcgcccgtgagaccctccctcggtgtctgcgctgctttccagtgggcgtgaggcgtttctgagcctaccacaggcagagtcaatcgagcctctcgggccaggaatcacagcgacacagccacttgctggttgcggagttcagaagagaagccgctgaaccgcagcaa

SEQ ID NO: 532 - DNA, 1585 bp, Toxoplasma gondii
  source 1..1585: mol_type = genomic DNA
actgttagctgtggtacgttatgaatcggcagtgctgcgtctttacgacaagtgtatgttttttaccatttaatcaaagcgtgcatagttccgtttcgtgaaccttgaaacggtttccaccaaggaaacctgtaaaacgcaaaaatgaagcagttctcaggcgctacatcctgcttctaggtgcctgctttcccccgttttccctacactgtctgtccgatgcctagcccccacgatccggttatctgggaacaacgtccttatgcaagggtggtacgaagtcgaactaaggtagttgatggggaactggttgctcaacataccttctcactgataatgctgacattagtcccgatgaattacagttctgtctaaacgaaagagtcaagtaggcacaaaccgtagaggaattcctaaatatttcaagacctacacactctaaggagtcgctgtgggtttttatgtacatgtaaaaatattcataaacgtttgtctttgcacagatgtttatgtgtgagtaggcgattcagggagtgcagcagtcatctggtggctctccaccttccttccattttgtgtactttccacgtcaagagtatttttcaacctcccctttttgccactgcggaacgcttgggtgaaccaggtgtatgtacactacggaccgtgggaacatatgagtccttgagtcgagcatcatacatgaattccccttgctggctttcttccttctgagatgggaaccatatgaccacaacaaaacgtcagaatgcacagatctggtttttgtcgtgcgtgttgtagggccctgattagggttgcagagaacgtgaacgttctggtgtctagaaccagtgtcttgaccattctagaacgatgggcgctgacgagggttttcaggtgccccatacgtgttgtttttgattcggattgagagactaaaggaaattctctctttatgttgaagaatttgacagagattagaattgtcgaggagcccgcccgaaaaactagcccttccacaagctacgccggacttgcacgttcaagattctgcgcgtgcagtcagaaaggactggaacattttacgtatccggtgaggtgaattcattaaaaaaaggtcgtttcgttttccggcgctggtcttctatagaatacactcttctatttaactagtttcgcgcgaacttgttgcctcggacgtcgatccgcggttggtggaaccatggcgagcttaattgcatgcacaccagctgtttcgtcaacgcctcgagccttttctgcaacatttctctcgcgtgtttcttcttttcagctctgccgtgtgacgaagagaaacactgccgatcacataccacccgagaaacacagctttctctccagtgtctgtccctccgcgacaccctctccctggagtcggagacttcgacacacagaagacacatgcacaccggtcccgtcagctccgccaggtgactcagttttctcttcagaccttgtcctctctgtcttgtatttatatcgtttagttccccgttttctcctttttttacgtctccatgatttgccgcgcgagtcaagacga

SEQ ID NO: 533 - DNA, 1755 bp, Toxoplasma gondii
  source 1..1755: mol_type = genomic DNA
aagactctatgaggcgaagaaggtcgaggtacaccgactgggtcactccgttgctgcggcccctctgggaacggcgagaaagtcgcgcagtgtacttgcgtaggagcagacgaaggcgacgccacagacgaggaagagaggaacgcagcagcagagaagggcacaagagaacgaggtctgcagttgtctctgaggatgcgttgtcgagagggaaaccacgacgcccctgaggcgagggaggccgacgaaggcatgctcgagaggagcggcaaggacaaggaggaaatcctttggacgacgggagacgcgaggcgcggcacagcgaggcgaagctcctgaaaggccaagggagaatggcgacgcttcgttggcgggcagcggcgcaacgaggaggcagggatcggcaagggagcggagacaactgagaacgaggagcgatacgcagtggaggagaagcacggaggagacgaggaagagaacggatgcagtgaacgctcccgcaagctcgcagcagaggccggagcaaacgttggggggaaacagagacacaaggaaagacacaagtacccggagacagttttaaagagacaggagacgcggcgcatccttccggtggatcctggcacagcgcgaacgtgcagtcgagaaggctctcgggcatgaacagctcttcgtccatcttcctcgacagacgcgaagccgcgccggaagcgaaggcgtacggacaggacggagaagaaacagagcgagcagcagagagacgccagccagcgaaggagggacaatgcgaaggaaacggagagggagaaccggaggaagagacaaaagaggagaggagaagcccgacgcctggccagagacccggcagccgaattcggccagcgaaaaggaaacgagcgacagccgacgcacgttggcctcacccgtgacgcgagactgcgcgagacgccagcagcaggaggcggcgacgaagccgaggaaacagacgaagaggaggcaaccaagaaaacaagagacgaagggacctgacggggagacggcggcgatgaagaccgaaaaagaagacaagacggagatgaagaagaacaagaaggagatgaagaagaagaaggagatgatgaagaagaagaagaaggagatgatgaagaagaagaagaaggagatgaagaagaagaagacggggataaagaatcagaagatgatgatgatgatggagaatgaagaagcgacgaggaaaggagagacacggatgtaacgaagttcgacatggacagcacaggatgaggcttcctcctctctttccagctccaggcttgttcagcctctagcggcgccgagccggagaagcctgcccgccgcgaggtcgtccccatctagaataagaagaatcggtgatcagtcgatcatatcatccggccagggtaagaagggggagtgcagggaaggttcacagacgtcagctgacgaggttgtggaaaaggcgattctcaccatgacagagagcttcaaatttaagaggaaaacgacctctcgcctgttgctgcggggggtctctctcgcgcgcgaatgttgagagttcttttgagactgcggtggtgtgcaccactgagacctccaggtctctggagaagtcggggggaaatcagtttcaatccttctctcgcgacgcttgtcaattcgtcgctttctctgctcttccagtacaggcagtcaaagaaaacaactcgtggtgtgtcggagaaaaagaacgccgaa

SEQ ID NO: 534 - DNA, 3098 bp, Toxoplasma gondii
  source 1..3098: mol_type = genomic DNA
aacatctgaagagcacccgtggaaaatccgtggttttcttataaagggacgcttcagaggctgttgctgttttctcagacacctctggtctgcgccggacaagccgctttgatgtcaagttgtagttgttttttcgtcgtcttgacccgataggtcttcggttcgttgctgcctctttcgatcgtattgagtttggttcgtttcggtttgcgcattacgaaaaacgccaatgaggtttcttccagaactgccagatgaccggccagccgcgtcccttggctgcagaagaaacgtaccaattcaggaaccgcgtgagtttcacgtgttctgtcgcttctttgcccgtgcctatgaaaggcagtgctgcggaaagatgcgcgtgtcagtgcataagcgttgacaaaaggtcttcacccgcgacaactggagaggtttggacacgaacagtagccgtatctccggtactccctgcccgtgaagcataggtatacggcgggacaaatccattcgacgagaatatgtttcgcacaaagggttactatgcttcccgcgattttaaaccacaggagccctggactgtgtacctggattacaaggtagacactccttgttattcgagaaggcaaacaacgcgctacgtggcactttttcaaagaaattgaaatcttttgatctcaaattccacacaaggtggccacaaaacctgtggtcccagaggtgcgtcagcggtttctgcgcaggtcaatttatgcttcggccagctgggctctgatgggaagttgccgtattcaagtttcgtgagatgtttgcgcgaacaaacttgattgcagcaaagcagaacatctaaatttcgtgcgcaagtgctgtacaatagcgaacacagatgacggcggcacagtgccgccgtgggtgacgccattccacgtttgaatgcagaacaagccactccgaggcatgcgttttttgtttaagatcccatactcgggctccgtagattcccaaattgtcagggcgcatgggccccaggaaactgcggtctgacacgcgtccgccacgtcgagaaatactataccgtgcgcggtagatttaactgtctacctctggctatgtgcaaatgcattcacctgtgctgatcgaattcccctttgcccagcagggctgaaaaacaggtctaatacaaagcctttggcatcccaagaaaacgtgagaagacagtgcattggatcgcctccaccacggtcgatgttaacctatttacatactcactggtacaaacactttccagaacctggagacttcccgtcgaacatcgttaaaacgttgagaggttgtgacagtcgaaaaaccagacaagagacgcacgatgatccggtgacacgcaaaccgtcgttgtcaagaaacaaaaaagcagactctcttatttttgacacgaatatctccgtcactctatatgacatagatcgtttcctatcgtcgttcaaagctatggcgactgaactcgttgcctattgcgactcttcaccccagacgcgacacacaggcgggttgaagccgagggaggaggaacgatcaaaattaaactccactgaacacgtttagatcgtgcgttgttctagccacacagttacgtacacttcacatttgcacagagccttttttctatatggatcctgtaccaggccagtgtgtctacggcaaccccgttctgttagtaatcgtcacacacacatttgacacgactcctttctgatccagcaagcacttgcctgtcatcacacgcaacattctttgacgtcatcgctatttctgttgcggaagggcacttgatacggacgcttctgcgcataacgtcacttgatgctacgcatgcagcggcgaagggcgcaacaaaaaccgaccggtgcccagacagttggccaccaaaaagctgtaaggaaaccgatgcgacagtttgccactgtttttacttcttttttctctgagagaaagacatttgcggagagaccttcatcttttgcgaatggtagttgaaggtttccgtgtgagtccgtcgcgtcgtgtcttctgcgagttccggcgtctgtatatggagaaccacccgccagaacaaccgctgctattcgcaggtcttcacacgtctcaggaagattcgttaacctttcgctggtttccatcttttttctgtgaacatcttacaagaggacgctacctctgtctctgctatgaccctccagtctcctcttctccctccgtccgtccgtcgctcggcgtctcatcctcgccccccttgttgtctcggagatttctgagctttttccgggtctaaatttccttttcctttctttcttacgctttctcctctttggccgacggcaacctgttcttcgaggcattcctacgtgggcaaacgcggtgtttcacagttgcgtgcacgtgcttcctgcgtgacatctacgactgtatgtgcggcgaccagatgccacataaaagggagttgtggaagtttggcgggttttcttgctcttttcctgttgaaggaacttgcttggctagcttcttttcagaggaaggcaacagaacttctagcggttcaaacgtgtccgcaacgtcgcagatgcgaacgtgtccactttcttcttattcgggaccgacattattgaaagtcgggcagcaagttgtctaagaagaagcgaaacgcaaatctctggtcaagtgctgctgctctttcggcagtgtgccgcgggtttctgtcgaagctcgtctcgtttcctccgtagctgccgagtcccggaaggattttctctcaggcgtactggcgacgtgtatattttagtgcatgcattttcgaagggacacctctgcatcttcgcgatccgctttctgtggcctggtttcgccggaaaacggcaacatctgactcgagactctgacggttcccgactgaattcgggtggcatcccaggtcgaccggctgtacctacacctggcgtagagcagcatcaagaccacgtgtcaggcttctgagtgattggaggcaggctttgaagaaggtacgtttttttccgcctgcgctgcggccaaactgtcagcaaacacca

SEQ ID NO: 535 - DNA, 1502 bp, Toxoplasma gondii
  source 1..1502: mol_type = genomic DNA
agagagtgagctcgatctatgatacacgagtctgagacctcttgttctgttcagacgagactgttcagagtctccctgttctcaagaaaaaacaaagcgaggagaggcagacgaatcagcgacctgtgggtgcctttgcagaacagatcctcgcgacgcttccgacctctcgctcgcgcgcgcttccggagctccagtgtcccagcgagcggctcaaggaccaagacgaccgacgacggcgaccgcgaacagaaatgcccggaagcaagggtgaagataacgcaagaaacaagaataaaacgtcgaaacaacgacggcgacaagggacgaggccgacaacgacacaaagttggcgaacgaagacgtggaggccgaagaaaaggcacacttccaaacgagagacagagggcgagaccgagtaccactagttacagacagaggcctgctgccgccatcaggcggttcattcgccagaagcgtgaacggagtccatcccgttcttaatcaggtggaaagccaccaagaatccgatccgtagattccagtgtcccccgttaagtttttcggagtgaccactggagaaagccggagtcgaagagaagcacgggagccccgcctacggcgaagagccgctgctggttgaccctcgaaagtctgccggctctgtggagtcgcgaaaaggaaacagcgaggcggggaaagcaggaccacatcattctccttcctgtccctcagggagttcctccatcgcggccttcacacgaggagtgccaggaaaggcaggaaaagtgaagggtggcagagaggttcgggggaaaaggagatccgagaaaagcggagagagaatcggtttgacgggggtaacacggaaagcggagaaaccactaaacctgcctgcggaaaagcggcaaacatcggcgcctctcttgagtttccgcgacagccacgaaaagaatcttcgcgcgtgtctcttccctgtattttggtgcttttaatcggtttcgtaaagatccagaaggcgtgaaacagcaggacggaaagcgaagaccaccgggaaacagctcctagagagatggtgtgaccaacagaaatcagcaggaacaatgcagacaggagagaaacgactaggttgtgtggacgcgtttctccagaagttcaccgcaggacctttgaaagcagaatcgagacaaggaacagcaagagcgtcacaaattggccgtttgcttttcacagcgttctctctcacaacagcgaagacaccgctgcagctagcaagagagacctaggttatgggtgcctcccgcggaaatgttttcaactttttaaaaagtggtaaacgagaggcagtcggtagcagcaaaccaaaaaaagaaaacttcgtcgcaaatttccaggccccaatcctttatagaacgcgaaaggctggtcatggcagagactagaaaagtaggacgagcagtcgactctccagatttctcactcgcgaaaacagcgtctgcgca

SEQ ID NO: 536 - DNA, 385 bp, Toxoplasma gondii
  source 1..385: mol_type = genomic DNA
ctggaaagagaaagtcccgatcgatatctggatggtatttacgcgagcgactgggtctgtttgtaaagcgttttacattcgtacggccccagtcgtgttcttctgccgatatgccagagcgtttttctgctcttctccctgactctctcgttttttttcgactcgatttaaacagtgctgcagaaaacggaccatttgcgcagagatcctgcggatgcaagccttcgagacctgaacgcacagtccaagtcctgggagatactcaagagaaaggggagcttgtgaaagtctgaactcttaccatcgaggcgcttctccatgaagcggcggaggtccgcggcgggaccggccttgcccataacacccggcatagtggcagggaaga

SEQ ID NO: 537 - DNA, 2971 bp, Toxoplasma gondii
  source 1..2971: mol_type = genomic DNA
ctgctttcccgctgacacgcgggattgcattcatctgcttcagaagccacttccgtcgacacatgtcggattttgggtcgcccctcaggatcgtttacatctttgtcgatggcgaaccggcaggtcaaaggaggaagagacaagagacggttttccgcctctccgtcttccccctccgtctccgcgcggagcccgatgttccctggcatgattctgaccatcgcctccgtgacgggttcctcgtcctcgtcaccttgtagccgtttcttcgaggccgagtagtggtccgccagagcctgctgcacggcctttcccgccgcctggctaatgacctcgaggattgcggtctcaacattttccttctgcgatagcagaccgccggctgacgcctgaacctgtgacggtggcgaagagaacgtcgtccagatgggcggcatcgcagagcttttgtctcctctaccttcaaaaaagctttctccgtacggcgcacccaagggaggaaaggaagcttctcgagagcttgcccgagctcggggcctaggagcgacgcgagagtgacagcttgagtgacggagtcgtgatcgccgcgagggaagcagacactcttcttctgcgttaggtcgatgccgaacaaagccgcccttctgactggacatcgacggggcagacgacagagacagcgaggggtgacagcgctgacgtggcgtcggcgacacagcgtgtgtgctggtccacatgtcgacggacccgtggagagatacacaggctttggaggatcggagagaagttgaagacacggacaaacagagacacagaagaaggaacgtcgcgcatatatcttttcggctgggagagtgctgggaaacgcaccgtgcgaggcgccgggaaaaaagatccaaagcggtcagacagaagaaagcttgagggcgctgaataatgtctcatacagcccgcgcgttacctcagttgaatccacaatcttcggaagctgggaaacaaacacaactagggcagcatacggacatgcccatctagccggaccaacacgcgtagctacctgccagaacgcatcggtatgtgcagtagaaagagaagatcttcaaaccccgaaccacggcgcacgatgtaagacagtgggggcaagggcaccgggatgtcacatatgggcctgtgcatcggatcggcacgaagaacaaggaaatttatggaagctttaaaactcggaagccgtcacttagcgccaagacggcttctttcggccacgtctccgttgttaaaaggatggattgtgtctgcaagcgcatgcctgaccccaaacacaagaatctgatatcggagcagcagaaaaaggcagagaaagacttgcagattttagaccggaaatgccagctggtcgcttcaagaccagaaaatgcatcgacaagacattcgcaaagatccaaagaacatgacgatctgtaaggggagtgtcacgaggactgccctgaatgcaactcgcgagttggagactccgcagaaaaaacagtaaggcgttttgagcgcaaaaaaaactttatgggggttctcctgtccgttttgccccgattcggagcgcgaggaacagagtagctgcctggcagtcgcaggctactcacggctctgaagaggtcgtgggcacaacacaggtctggcgaactacaagacaagggggctcttctgcagacgactcgcttcgaaaactttggataaagcaggaaaaaccctaaataactggtaggttagttctttctctgttatccagccgacggaatatcgtgaaaatgtagtgacacaagcagttatgagcgggacaaagccgagaaagtgtgtcttgaatgcgatggtccgttagctccgaatataagccgagacgttttgccgttaggggagcgcagagacgcagaacctgtcgagacgaacgctccctttgtagcaccccgttcttccaagcgtaacgggaatacagcctttccttttcccgtctcaaagccccagcagaagcaccttgtgacttgcgcgtgaaagacgccttttcgttcaaacgccacacacacgtggaacacgggaatggacggttggccccgcctgaggcacgcgttcagtgtctgacaaagagtgggacgagatgtgcgaaaacgcgcatcatccacgttgaaacgtggctagcgagttcgcgagctttgagcgcgtttcagtcgcttcttttggcgggtcgtgtgtcttgcacacttcgccaaattctacgcctttccagctctgaatttttgcctgtcgatttcgccggatattcggacgcaaaataattgcccacgaagccttttcgtgtctgcttccctttcctgacatagttgacaccccagggttgttctgctgtcgcgccaacgtggaaagtccaaagttgcaagacgcacaccgctccacgcaaatcccggttctgcatcttccaggaaaggctccccgaaggacaattgagcaactactcagcgcgtgtttcgccgaggaagggaggtgattgaactggactgtgtgcagttcaggagtttcgacgaaaacccgcgttttgccagtatctgtcactgtgtggctgtgtccggccgtcaacaggcgacggcaaacccgccagtctgcctcgcgcctgctctgagggtattcagtgacaaaggcgtaggttgttttctcatctgtgttcactgaattcgttagtttggctgaagaggacggcagtacagttgttcttcaaccgcttttcttcgcactggtgccggagtcgtttctacgagcatcagaccctgccctctctccgtctcttgcctcgttttggctgcgatctaacaggtgtctgtgttggattttccagtgtcttgtccaagaattcctctggtttctcgcctccatcgacccgagtgtcgtgctgcacgcacatcagctgcgtgtatcttttcccccggcaaca

SEQ ID NO: 538 - DNA, 649 bp, Toxoplasma gondii
  source 1..649: mol_type = genomic DNA
agaaagcagaaatcgcgtcgctctccttctcaagtgtgcgagacagtcgttgtcagggaactctggaatccgccgctgcgacggcctaaagcctgtccgcagacatcgttctagaaagacatcttctggaggaccgccggggacctctagctgggctcttcagcaatgaaaagccgcctccaaaaacctttcagaaaaggacggcgggggacgcgagacccaagctgtgttgcgagaatcgaactggaagcgctctgcgccgactctttaagagttcaaaggtgcgagagacaggacccagactcgaaggtacggcaagaacaagtcttttttcatgtcaaatgctcatggtctctcggcgagaggagaagctcttctcgtctacaggagaagctcttctcgtctacaggagaagctcttctcgtctaaaggagaagcccttctcgtctacaggagaagctcttctcgtctaaaggagaagctcttctcgtctaaaggagaagctcttctcgtctaaaggagaagctcttctcgtctaaaggagaagctcttctcgtctaaaggagaagctcaatgagtctacgcgagaggaactcctctacagaacaggacggggcgtagtgacaaccagcggcagtgcgttctagta

SEQ ID NO: 539 - DNA, 4021 bp, Toxoplasma gondii
  source 1..4021: mol_type = genomic DNA
ccttttgtttgccttcgcacatcgccactgttcaaactccttccttgttctgcgtgtgatgacggaagtggggctccttatcgttctggtttggcgttcgatccccgttgtcgagaatcttctctcgccccaccagatcatgaacgatacatacgactcctttcgcctcgttaacagttatggtcttttcggattcatgaccaagcaacgggaggagctcgtcattcaggtagggatgttacaaaacaggaacgttttaaggcgaccgtcgggcaccagcacgttgtccagattcgtcgaaaaacgcgtgcgcaaggtgatgccattccagacaaaaggggcgcgtagtgtcccactggatttgaatctgcagacatcacgaaaacggaaaatgcacacagaatagcatgtgcctgccaactagagcgctgcaccttttcgccacacagtagcgcaatctgcgatcgggatgcgattctacgtggcttcagggaacgtatgaaccagatcccccgtcggcacctgccaacccagcgtggcaaacatatgagttctactgcaagcccggagacatagaccggcgtccatgtttcgtctcgccatactattaccgcctagactggctgatgtggtttgccgcgttcaacgccgacttgcaagctccatattggctccttcggctagtcaaaaaaatgcttgccaacgatcccaaaacttcggctctgctcgcgcacaatcccttccgaggaaaacgccctcccacattcattcgaattctccgctacgactaccactttgcgtacaaaggaaaggtgaggcaagctggttgctcgcaagtcatcattttgcgttggatatggaccgttaccaaaactaccatcgttaagaataaataggcatacctatggttttccccccttaaccaaaatttcgaaagcagttaagtttgtacccctccgacccaacagttacctcctcctcgctctgtctccgatccggttcgtcctatcagcgtgtttggagtcgtggaaaaatacaggaaacgcgaattacgacgcgccgttttctctgctctcactaaagacagaacagtcactctaacgaaggtctcataggtacgttcatgcggtacgctttcctgcaggaacaggacatgtacgagcagggaaagtggtggcagagaaagtatttgtccgagtttctgccacctgttagcgccgccctgttccgcaagatttgatactgtgacgaggagaacgccgtacaaattttcttttgcaggcggtcacgaaggacttagagttgaccggcagttctccagttttttcaaggctaaaaagtaccgtttgtcttgcatcatacaaaacagggactggcaaaatttctacggtgcacatacaccaagtgtcgtcgctgcgaaaggggagctcttcagtgccggaactcacagcccttagccaagtgttggatagttcaggatttctcgagaactttttaggtggtatttgtgaacgacattttgtttttggggggcaaccggtttgtgtcctttggagaaaaggccaagatgctgtgtggcttactgccagtctgtggctgcagtcgttgaaccgacaacagcagacagttcagcaacaggcaaagggcactatgtctcgggaggacctcaatggcaaagatagcgagacttctctagatgcctcgcactgcaagaagcagtagaaaataaacgcattctcagatgccctgtgaactcatgacgttgggctaagaccgcaggctcctgcgaggcagctgctggcggtctgctctgttgacggcattatggggagttcactttaagctttgttgtgtcgaacttcattggttacaaatgaagttttatgcacatcactgtaagagaacaaacgggaaggcaatcgacctggccatgcgagtgcgttgtcgatcattaaaacgatcctttgtgttacatcttatcttgccttttataggttgtattataatagttttcgatatcttctacttacgtttaacttgttctagcaatctgcaggtattaacaactgagtgtcaacggaacaagaagaagtagcttctgccgtcaccttgcccaggctgttccagtgggctttgaactgcatttttaacaccaaactgcgggacggttcgccattcatgttgcaagcagtgatgacccatgcagtgcgcaaataatgaagagccgtgaggacgctttgctcttctctgtacactacacatctgatagatttgttcactggtctctgaacgcaggattcttcgtaaatgcttacagagacatctggtgtcgacactacgcacaacagggttcaccgtgatttccttttgaggcgcttgttctcaaacacggaaagtatgcgtaccacacggcattgctctgttgacaaatccacaattattatctccctgctccaccttcgtgaggccttctgcgcagggacacactaacctaggaaacccaagtcactcttgacacgagagcactgcagcgcattactcagcctctctgtgcggaaaaaaggggcaacaagttctaaaatcgggtggcttccctagaaagcgtgtctttataagttgctgcagtttaattcgaacgctttcccacttggtggtcacaccactgcctcccgacgagccggcctcgcttcggtgacaaggctggggcgactgaaaaaaactcatgttcccgcgacttgtacgccgctctttcagcctaccagcttccactgtttacacttgcccgctgctccaacacgttcagcttctcctttcctaattgacacgtagcgagtccttctgcgaacttctgcgtttgttttccttcgacgttacctcttctgtggctgaatcgcttgccttgtctcgcaaaacggtcgttcccagaaaacgcgtccgcggtcataaacccttcctactcacggcttcgtattaatccacgcacgaaagtgtcacacgtgacaagcggagcaacgccttcctgaaggtaagagttgttttcaaagcaacccgagaccatttgcttccacatctgcgtcgtgcaaggtcctgccaactcgaaactgtttccgcttaccgctggctcctcatttcgtcaatcgcaaggacggaacccggttgaggtaggccgtgggggtggcgcgcagggtccgaacgtgactcgaaccgcccacggcctttagccgccaaaaatgctgagccacgacagagcaccgcgtgccgttcgaactgagtccagacggcggaaaaaacgcaaacatgaccggacgaagttgtgcgattctcactttcttccaggtctttttcggtctacccagtttcttgtgttgttcagttcgtgtttcttttgtaactcgacgcaccggtgggcagtcctgcgtgcagcctctagcaccggcgcccgcgctctttttttgacgtcgatttctgactagacgctgctggtataactaccgcagactcgacccctcgggcgtaaccgtccaacggctctcgctttctaaagcaagagtaaaggcctctccgcgcggttttccctgtcgattcaccttcaaaccatttgttagaaagcgagtgtttcctcaaatacagctcagcccttgcccggtggccgctcacagtgaacgttttgaggggcgttctagtccagtgactatacggacgacggcacacaatgcgcggcagcgctgggtattcccggaagcggatttgtctcttgatttgaaggttttctgttcatgaggtatagggctgtacgttacgcgtgctgtgctctgtccaatgtggcgttgtcccagaaatttcgcaggtgcttccgatacacaatgtacacctagatgacctgcagctgtctctcgtctccgggctgtgcgcttgtccggactacggcggattctaaatgtgccactcatacccgcctttcggctttaatttccgcattttactcatctgaacgctgtatttgccagtgttgcgccggaaa

SEQ ID NO: 540 - DNA, 5032 bp, Toxoplasma gondii
  source 1..5032: mol_type = genomic DNA
aagggcgaagggacagcagacgtgcatgcagttagtaagcaggaaggcgaggctaacaggaataagaacgcagaggagaccattgaggttgggggtgtggcgtcgagcctccggtgtggggcacaaccaggaaaaggcacctcgccttgcgaagcggacagagtgggtgctgaatccccacgagagcggaagaaaatctcagactgtgaagcaggaaattccagccctacccagagtcgcttgtcaaaaaactcggaaaccttcccaacagaaccccgtcctgtagatgggtctggcggatacacagcctaagagcgtactcatcatcaaacgaacactggggaaacaatgtgcatttatacatctctgcacgcattggtgtgcgtacataatgcgctacaacatcgtgtagagctgcacgccttgcatgcaatggatgcagtacgcttgcgggtaacgtctccgtacaaatttgccagtgggaaatctatggtcaaagcacatagtttctacactcgagaagtatatgcagatgcatgttgtttccaaggttctgccacgtggaaaggatgcagacaggtatttcagtgcctataaatgacaggggccgttatgagaattaaatgcgccgctctgagggctaagatctcaagcgagcgttcttgtgctaaggatggctcgaatttggcgcagccacgtttctcagtatctgctgagatcatttgtcagatgcgtttctggtaaaaaatttcctcgcgaaagttctcgagtcgttttccatttcctggatttatgtgcccgttggatcttgtaaggcaggagccagtaaatgtgacgcctcgatcaagcagaggcagagcaatgaagattacaacggcccgaacgtttcaattaacgtgtcgaacgatttcgctgtcgctttcaggcgcacgcctctacatgatctttcgcgacactcactcgaggagatagcctctctggttggctcatcatactcgttggcaccgtatatacacatctgtgtttttatctccttgtcggttatatttgatacgtgagaatgcgttcggctgaaacactgtaggatgcaaagctcatcacgtgtaggcgtccacttctactgtggaaacaaaatgagatccgtagcagcgaacgatcggcaccggtctcaggaagcaccgtatcagtgtggggtgtctgcacacagttcgtaagagcctgaaaattctgagatgtcctctcatagtcgtagcctgcgcatgaaggtgcatgtcccacaaaaggaccggatcagtgacattgttcatccttgagaaatgccaataacgcatcgctggcgctgaggcaagtagcaggagaggaccacgtgaaggcaaatgccattgatatacgtttactttatatttttcatgggcagaagcaccccttcatcggagctgcgcttcataccaggtgcttcccgcctctgaagagcccgagctttggtagcaatttgggctagagttgagcattcgcagcacgttttacaggcggaatcgttgaaggcccatcaccacgaacgtcgcttcctgcatcatctctcaatctgcccgagtcttgaataccttttcgaacaaccgctgtactggccgcaactgtcagcatcatctattcgccgtcacgtatgtgttcttgtcaacgatgtgcccgtctgaaattagaaacttgcctcctgttgaatgtgcgtcagtaaattcgcgtgttgctacgatgtgtaggaaggagtctccggtatcgtttagtagcagaccgttgaaaggcgtggcctcatctgcttatgtcactgtcgtccacggttgcggcgatctcttcacaggccggcacagattacttcggttgttggacggatggaatagttttcgtgtctacccggtccccggtgcttaagatacacctggtatctccctccagatttcacagattaaacgtcggaatgctaatcgtgggggcagttcttcgctgccgactgcgacccactaaaagccggcaacaaaacgttagccactaaaatgggactctcaaaaatgttgctcagtgatgcacggaggagccccatatactactgcacctgtgggagacataagaaggtgtcgactctgccgtcaggtgccctgactagagattcaaagtcagactctccccaagatcctgcacctggaacccagctcctcgtccctcgaggacacggcttccgaagtcgaaagccgagtgaaaaccttctcgctataccgccgtataacacgattttgttgttccatggccgtctttcctttccagcgcagaagaaacgatgctaggaaaaatatcgacctctcggccatgtttcgtctgtccagctaggatgttcctccgcaaatcacctcaaaggcgcagaaaccaaagcagcatgattctggctgtaacgcaaggttgttggtgagctgaccaagctataagcttctaatgctccaacttctccgctgcccactaaaaagtcccgttgtacgttcaaattcagaaagaaccgcctaatgcatagggtttgtgccaaactactcaggtacacacatatgtatgaagctgttgaccgtgtctttctttcttgaaggcggtacacgaatgtcgccgcctcgcagctcacgttcggagacgcgccgtccctcccctgaagccgtgcccggggtaccgagcgcacacattcaggcggttttttgagaggcggctttttcgtgggtacaaaaaacaatgtggggcaagtaagagtggccgtcgttctcccttccctgaccggcaagaagtgcgcaggctctttttgtttgctcgattttgggtcatgcttgagcttcggacggcttttggggtgtgtgcttccgttgccaaggtcatgtgttctgccgtggctgtcggcagcccgcatatatcgctagtgctaggcttgctggtctcctgaactttctactcgatcaacacggatgcatatcaccgattggtggagatcctttccttcgcgtttctcgtgtctacgtgtcgcacatgaacttgaagccaccaggcaggtgtagctcccttcagaaattcctaggtgtgcagcgcagccgcgagccttgcatgaccttgaactgctcggcgtgccctctctgtgaggccggaccggtttgagtgcgtttaagaagtgaggagaattctgtgttctttccagcgtaaacaagtcgtatatcctcatcccctacgcgaaagttgagcgcagacacacttattttttgggaccttgctcaagtgtgcgctgcctcgtggcctcgactgtatctgtccgtatgcgagttcgtcttgctgcgacacggacacgagaagaacagtacagactagaaacgaaaagtggttttcatttttctctcgtcgcggtgtcgggtaaaccgctttcatgccactcgcgtacactaagttggccctgtgagtgccgacgctgtgagcccgggcaggctgcgtctctttggtaggcgtccattctgcgtgtcggattggcaagcgcaaaaagaacctccagtcaaatcacatcctgtcagtctgccatacgtgtggcgttcgcctgtcgcgattctctttgttttgcttttgttcctcgtttttgtttggtgttcacccgtccctggctcttcacccttgtcaggaggcgctctcccccagcggtcgcgtcgtcgctatctattctgtcggctgggtgaccgcctccattcgtgtctctcagattttcatgacgggcggtgttgtgtgtggcactggtgaaaagtcaagcgtacaagtgtgtatggcacacccttcttctgaggacgagttcatagaaaagtgtcgttattttagatgcttgagtcgaggacaggcccgaagccttggtctgtccggcgactcattctttacctccgaggaccacttttccccaacgggaagtttttgggtgacggggtaaagaagcatagaaaagactggagacgaataaggactgacacttaagtagctattgttgttcaacgggctggctgagaaagctttctcgtgggggtacacctaggaattgagtcggatgcccatgccagattcgaaagattgaggcctcaggcattcgttgttgttgttttacgtcacgtgtcatctgaggaagcgttaatttggggtgcgtccagtctttttggaagacgctgttctctcctacgtcggccgacccctcgacagtagcgttgttcggtcgcgtagtcaggaaccacctttgccgcatcgagagatcctgtgtcgtacctctcctttactttgaggggagaaatagaaagacgaagggaggaaatatgtgccgaagtgccgaattccgtgtgccgtggctccattcaaacgatgtcactgctctacttagcatatgtcctacaatctcgtgtgtgcaatggccgtgccgcttccgttaaaaattgatgattgggtgtccgtgacacagcagctgacttggattcgcgagctgtcacaatgattacagattggtgagtgaagaggctgcgtccagttccggtcataatgctgtgagatagggagtgagacgcccgtcccggtagaagtacagctccagctggcggctattgtccagtcatccgtccgacagcagctgtctcggttttcgctgatgcgcgtgggttccagttcttttccggagcaggtgcttcgtagagtttctcggcggccgttgtcgctcgcgtgacacccgcgtagcaaggaacagacaagccggtcggtatatcaacgctgcattgactcccgttccgtgcattggtgctgacttacctttgtcagaggaaaccgcacaagggacaggaggttcgttcggaacttcagctaccaccgaaggacgactcttctcttcggtgcggaacgcattcctaagttataaatgcgtttacctgcacacacaatctagatacatgcgcgtgcatagaaataagtacataccatttccaggcgacgattcttttagcga

SEQ ID NO: 541 - DNA, 2791 bp, Toxoplasma gondii
  source 1..2791: mol_type = genomic DNA
tttttcctttgattccgacgtaggaaggagaaaatgtggagttccctgtagtgggcgaatcaggcgacgggagcgaaggtgacacagagaaaactgggagttcgactggaggctgtacagcggcagaacacgtcgatgagcaacaatcaatatcctcaaactgtggagagaaagtcccgttcggtctcgaaacaacatagcctccgcctccacgttttcgagaaaatcggattgcacgccattccccattccctaaagaacactgccttataagaggagtggaagaggaaccaaagagagccgacgcatggtcgggacaatttgaagttacggccacagatggagggacaagaaacagaaggaagaatgagtagatacaaatatttagaggccgcatggagatatcggcgtggacggttttgccggaagtgagaaacttcgcaccaccagatcccacaaacttcggttgcaagaccgtcagagataaagagatgataggaatcaggggtgtctcagaaacgggaaatcccatgttcgttataagcggcgaaatcgcctttttgccggaggctccaacatgcagagaatcctcaccttgcagagatcaggaattcacggggaagggtaagtaggcaggcaggtgacgcagaattccaacgttgttcatcaaactcaaatactggagtagcggggctcattcccttctcggacttgcctcaaggtatattacgaggaaactttagctatccgctacgagacgacgacaacctttgcatccattactactgcctaacgaggctcaacaaaagtaaatctcgtaatttttttggattcgatctgcaattcctgcagcccaaatgagaagacaggcatgcttgcacaagctgtacgtggcggatccacaggcgtggcccgaaaggtaggaaaacgcctgtaatcacgttgcggaaagaaagggtaaggaagtaacggaaaataaaataacaacgcaaggcacagacgcattatccccgttgcacgaagccgagacagtgtctctgtcatggagtgcagatgcccgatttcgagagttgtcacccggattaccaaccaagaagagaaaagacttgcagaagtgcagagtgattcgaaatccgcagcgccacgacgtcaaaacttcgatctgtcggcagcgcgtaaatgatatctcctgggacctgctggctttcgccgtcgtgcagatatcgcggctggtgcttgctcgacaaacacattttcagtgcatgcgtatcacgacacgcggcagtacgtgtgctagagttcgcgcgacctacaccgctcttcaaggacaccacggaatcgcgtggcctgggattattatttaaagcccgaagacgtgaacatcttgcgggcgtcctgttctttagcattcgcgtgtgtatcatgatcggcctctgttttcagcccttatgttcgcggtagcttgtttctcgtcggtgtatcttgcaacagcggaacgcctaggagaaggggaaggttctctgggcggaagtccgcaggccctgcccaagtgcccatcacttccagtcatccctgcttacttcgcacgcccaacgttctgagctgcgtcaagacctctgaagccagaaagggatgttatcacgtatgccgtaccggatccagcaggcaacctaagagtgtcctccactgtaaggcaatgcgtactccaagccgttatgtggtcatccgggtccgggacagcgccctcgtgtgctctctctcccagcgtcgcatgcagacacatgtgtaaaatgtgctccgtcttctgtggctgttcgaggaaatgttttaacttccccaaagtagggagcctgttattatgacggtccacaaatcttagtgagtgcatgctggcaggaaactgcctcgatctgccagttgtccgaatcaacaccccgcacacagaggggggggggcggagtgggggggcaacgtcatgcctcgtaacgcttaccgcttcttaagccggaattgaaacccctattctagtgaatgtcacacgtctattagtgtcgcgctcgtgattggtttaagctggataaagaagagtcaacggtgaagtgacggttgtgttacgccgaagggcatggttccttcgtttcaccaaacctgcgagtactcgcctccaataggtttggttccctcctactcgccattaatattattgtgcaacacctcctgaaaaggtcactgagttttgtgaaaagtgagcgcattggtttcacagacggcggctttttctgggatgatggagcagagcgacggagccagcgcctggatggaggaaatcaccttgcgtacacatcggtgcggctagctacgctcgcgcgtcttgttaacatgtttctcttccagttttttgcgcgccttatcgtaattacaacttaccagtgaacaaacagtgggcacatgagcctcgtgattcgcaggtcaagccagttcacccgtgagtcacaggcatgcactgcgtcaatcatagctgggcaatccgacagctgaacgtgttcataattttgagcggattgttcttggttgggtcatgctcacatggatattctgaactcttattttacgaaactgtgctgttctgcttcacttgttttcgtcggcattggcttcctcgaaaagccattgttccgaaacgtgtttgagtggcatctggattaagctttgtgaaccctgctcatcattgtcgccttgccgaagacagagtcactttcttcgtgtttcgagtttagattactgagcaaga

SEQ ID NO: 542 - DNA, 4129 bp, Toxoplasma gondii
  source 1..4129: mol_type = genomic DNA
gacaactattcttattctttgcattccaaagccgttgcagaaagacgccctgccgccgaagccaaaggcagctatgcgcatgcacagcctgcttcattcacttttcgcaccgaaacactgatttcgtccctttccacctcgtacggagaagcacagtctcaataggtcccccggagcagaagaatccgtacaggcacttctagattcgctcccgggtctttggtatgacgggcagaacggacagaaagacgacgcggtaatacacctgtgcttgcggggacagcaacgtattcacacgttttctcattctcctggtgaccccgtcttccactgtcgcctgtcaacggcatgtgtatctaactcacgggtacgcggcgtacaaaccctctgggatccaccgcagaaatgcatgtcgagagcacatgcgagaaacaggcacggactggggccggcgagagcgcacacgcagaagtcaaacaggaagatataacggcaaatagagggctatactggaaaaagaaaacatcaggactttctgaggaaacctaaactgaacactgtgcgaaggctggttctgaacgcgttgccttcgattctgcctgctgcccacgctcatcccctgctgctgcctgctacggacgctgtgtgtctgactctcttccaatatgtttcctctcccaagaaaaaaaacgaaagggtgagtgaattccgtcccacgtgctgtttgccgtcacagcaagccagaagtcacgtgcggaagtccgtttactttctgcgcacgttgggcgacgcacctgaagacgggactagaaaagctgacgtatcgaggtcgcacgaaagtacgcggaaatagaacgaaaaacttttaaagagatcccgggaaactgccatctcttgcacaaacgagggaacgctctcgcgtaaaaactcggggaacgcagcgaagctccatggtttctgggccggttctctcccgtgtaatgcgcacgagtggacgccgcgcacgcaaacactggagggctcagttcgtttcggaaaaaatgcacgcgtgtttctccagcgttcgccagctcaagggaaattttcgacccttcgtttcgcgccggaaccgccaaaaatcctgtttttccctcactctttccccagagcgagactttggcccacggcgcagaaaacggacggttgaaccaccggcacgcacggggaagtagaaacaaatcgcttaccgggaaaatttgcagtgacgtcgaccggaaaatgaacagaatggcttcctggagagaaacctgggttttcaggtctgcagcacacaaaaaacaactggcgaatcgacagcctgcccagagaggccttctgtgcagagttgcgactttgtatgtgtacagctcagcgctgtgacacgcgcgacgcccgctgtgcggagatgaatgcttggcctgtgctctccagaattgggggtccctgcggacaaaaaccctaaatgtgcctgtgttcatgtaccaggtcttggtaagaggaccacggaatcgcgagagaccctgtttcgggaagaagaccgtagaacagtgagaggccggcgtcaggtaaagcaagtcttgtttctggagaatacaagaattcgaggacggctacgtcgcgcgggcagcaagtctagccattgtgtggaaaagagacgggccaatgccacagatacagaaaaagcggattttcgatcaagaaatacagtaaccgaaacgtcaagtcgggggcattttcggggtcgcttacaacgcttcccggtgtgtccaaccgcctgtgtgcatcggatgtttgaattcggttttcgtctagcaagctacactacattgaacttttctggttatctggctggccggagaatgcacagttcgttaccctcagatgtacccaggcagtcttttgaagtagcacagtcatgaggttcctcattcgcaagcagaatttcttgcagttcttccgggagggaaaactccaggggtgcttcgtatatccaccagttatcgagcacagaacctacgacgaggcaggcttccgggggaaagatcaaggttgagagttcgaaaagaatctgtgtgcggtttcgtactcacactgtcctgccagcgattttaccgggtttgtctgaaagtgaatttgacgcagcatgatgaccgtacatgattgtgtaggacgacccgatagagagagcgtttctcgtgtaaactattcatcacgagggacaagacacggcgtcaaagatgcggatgctagccccgcagtgccttaacagaaacccttctgaagtcaaacagggcttccacagcgtacagtcactaccctcaagagaactaaggggttggatcgttagacacaagagctcgttcaaaaaagagaccgccagtcggttcgtaacggggaaaccctgccatgtagccccttgctagctggctacaactttgcagaggaacgatagttctgtaacaccaaacgagaactgttgcactcattccgtggctaagcccgctgctggcgacagcagagctgtgaaacaaagaatagaagcatgaacgcacagcgacgctgcttttcttcacgcgtcactgctctgtcgtttgctgccggttccaattcggctgttgttacgtcaccgcgcttccctttagaacgagtccttttgacgtcggcttctttttctgctttaacgccgaacttccgtcgttgtttgttggctaaagctgagaagctgacagcacgcagaagcgccttccagctcgactgccgagcctccacaccatgggaacaacaacgaagcacagagtaacgcagcctttgcggccctctgtgtatgaccagggttctggcagcatggttcctctctgcaggagaaatgtcctggggagaggaacctggaaaaggaggcacaaggcaagatgaagtgccggctattagaggcggcgtgaaagcaatggaggggacagcttcacccgatgacatgcaggcagtgtccaaatgcaaagtagcaaggaataacactaaatgatatccctaactgcgacgaattttcgattgtgtagagctgcaatctacgtataacgcatatacatgtcaatatatgtgtacatacccatgccagatcacttgtatactctcacagggaatggggcttagtgttgttctatctattcttttttctggcgtacacaagccgcaacggttacacatgtttggctgagtgtatattttctgcgggcagacggaacgtacgcttccgaaaaccactttcccctcagcccctttagggaagcgatatcgcgtgtgccgcatatgaccccctgcaaaacatgtcagtggtccactcgcaaaagcctacctctttcggtttcagtagtcccaccgaccggtttttgtttgtgatcatgtgtgttcaaatggcaaaagttccttcgttaccaattccttgacgcgggtcatgtcctctcgggatttggagaatcttcaggcggaaagaaacagacacacatgtacggacgagtgtacgcctgcagcaaccaccccacctgtgcactgatccagtgacaagtgactattgctgttccttctcggctaccgaatcttttggttcctgtccatggactaagcaacatctgcaatagattcctcgcagcacatgcgactcctcctatgcctagctggctattctttacatagtccagcttcgttttcctctccgtctcttagagtccaccggtattcgcacaagcaaaaagctggaactcgaaggagtttcatattcatctgaaaacttggttaacgtaccgacagactaatagagtgattgctgtctttatccgtcgctgattttcgtgaatagcaaccggtctcttcttcacgtgtaaagtctcgcttctccctttctagtaggcttgtggtttcgtccgacaacaaagtaccggccttttgccagcggacgcattccgcttccactgttgcttctactgtctaccaagatacgatccctgcggtgttttgactttctaggcgttcgtggacgattgtccttccccgcaacaacggacgaggaccctagctccgcgcgtgtttgtttccagtctcgttctgccgtgggaaacaa

SEQ ID NO: 543 - DNA, 2711 bp, Toxoplasma gondii
  source 1..2711: mol_type = genomic DNA
ctacaggtcaatatgcggcgaatgtagatacttgcagatctttgtccagtcagtcggtgagagtggggaaagttctttttccgagagacaccaagagaaatcaagcattttggtgtgacggtttgagtgtgtgtgtctgcgtcgactggcggcccgctggccacctcgcatatacggcgatccaggaaggcgaggaagaacttctcgctcctcttgcgcttcctctcacctcgagactgagctgagaacttcttcctcgccttcctggatcgccgtatattcggcgaggacgtaggttcctcgcgcgatgcacgaaaactggaagagagggatgtctgcctctggaaatccctcgagttttcctctgtcggctctggagctgccggcacacgccccctccccagagggagaagcttctccacgggccgcccacatcgcgccgccttgccaattgtctctgcagaaagctgttcaggtcttcttggctcgaaagttcgacgcgtctctgcacacttggacctttcgcctgcgtccacttcgtcctgtctcaggcctctcaggagtcggatgggaagcgcgtcttcaacgcgaacgaagcgacagctgcactgcttgctcagtcttcatatctggccaaagagaaatgccgacaagagagaacaccacacacagcaaggcgacggcaacgaggagacgggggagacaagtcggaccgagaaaaaaagacaagttgaccgcaacggacggacgtcttcggaggcagaggagaagacgttcctgttcctgttttctctcgctttctcacgtcgcggcaaacgccgtgctcccgcgagttgccttcgcactttcctctggagagaaggaaagctaaacgccctgcagagtctgcaggaagagaagtctcaggagacaggcgtctcctcgctttcgaagcgaatttatagacgcggtggagtccggaaacgcgcaagaaccgcagagaggcgaccgaaaaggcgggcaggggccccctcgtcgcggctgcgaagaaactcctcttcagacgcaaacgttgagacatggaaagcaaagaagagaaccggatttctccctcgtgttccttgctctcttgctgcttggctcagaggcatttctcaatggagcggcaggcgaactcaccagagcgtccttcacttcccgggtcacttttccagaacgtgagcgagacgtcgagagacgtgagagctccatccggcgaggctgttttgccgcgacacaaaaagctgaattagagcggagaaagtgaaaaagcggagaaagtaaaaaagcggagaaagtgaaaaagctggcgcactgagaaagtgtgcttcggactgctttgctagcggagaaccgagagccgtcagcttacatgcgccctctttttcggctgtggaacacggagaaaaggcgaagaaaaagagaagaaaagaaacgaaagggaagaaaaggaggagaaaaagaaaagctcgcagcttgtccctttgtgtgcagatgtgcagaaggaaagattcgtgggaaaaaagcgaaataaaggttggtttcgtctatccagacgaggcaccctcgcctcttcccgtctctctgagaagaaaagactttcgttttcaattcttcgcgaagtccattcgctccttctgcaggtgctcatcatttctcgtctgtttttgcagcgaaaatcgacttttccagcattgcagtgaagagtctctctccccaaatcgctcttctcgaactcggacaataccaccgaggtctcctcatgcgtgtcgactcttgtgaaaacatatatatatatatatatatatatatatatatatatattcgtagtatgtctctgtgctcttcatagacaacggcgtccataaatatgtgcatcggtcaacatctacaaggaagaagagtgtgtgtgtagacaggtgcatgcaatacaagcgtagttcatcttcgatatatatatatatatatatatatatatttatttgcagtttcttgtatttgttttccttaagtgcatgtatgtcaatcacaggcagtggagtattgccgcgtttggatgtcgcggcgtctgcctagtctgttattgtcagaaattgcgtcgattagtgttttctcttagaactttggttgtcgccggtgtttgcgcacggcgtctccgcgggaactttgactttctgtctcctcgccatgctctgccttctgtctgcatgagaaggtggaactcttgaagactttttgcctgttgcatcgcagatttttccacgaaaaaactgttttctgacgcgtcccagttctttctctccgcggacgcctggtgcgtcgaacttgtttgatttgtccttgttccgcgcttccttgattggcgcattcgtgtctttttcgaagcctcacttcaacgcccctttgcccgatctgcattctcttgtctctccggtgcgtctgtcgctgctcgcgagcgtctttttcgcctcccttctggattccggctttcgtctctgtccgccgctctcgcgtttggccgagcttctggagagtcgcttctcggagtcacgcgctcgcccgcagtgcgcgtcgtccctgttctctgcgttcttctctctgtgtgctccacagtgtcgacgtcgtgtctccgtctccggagtttcgtcgtcttctgccctctcttcgactcttgaaacgcccagaagaaaata

SEQ ID NO: 544 - DNA, 4949 bp, Toxoplasma gondii
  source 1..4949: mol_type = genomic DNA
gagaaaacagacggtcgcgaaacgcgaaagtcatagggagcgaagaggcgaggaacgagacagacagaggcgcgacagagtcggagaggtcacagcaaggcagaggcgcagcgaaggaaaaagagagagccggagaactggagaagaacgcagcgaagagaaggggaacggagaggggcaaggctaagcggatggagaataccacgaggaaacggagaaaagactgggaatcaagacgcagcatgctctgcaagagtcgaatcgaagtgtgcggaggagcgaagtcgagacagagcagcacaggagtgagagcacgaagaaagcatctcgaaaaggaagaggtgcaccatcagtgctcatatagagagcggatatcattcacattagcagtcagcgaaaagtgctacaacgctagtatgatcagcactgtcgtactcggagtgatcactcgtgagacaggactgctggaccgccggttgagatcttgaaaatggaccgaagatgtcagggtcgagcctttccccagcctctcccaagcgccggctttgtcaggaacacttcagaggcatatccactgcaggtgcttgaattcgaacacagagtttctcctttgcgaaggatccctccccgaaaacgtggttggtcggccagcagcacagcgccaatccatggtcaagtgtctctggctcgagagaagttttgtctcaccgttgcgtcttgccgcctctctccctcgctggaggcgataggccctatacaggtcctgagcagtcttctggagaagcctgcggccagcgtacttgggcctgaagggcgccaggagctccgcaggctttctgcctccgggtgtctggctttctccgtctgtttcttcgccttcttctctccgctgactgtctctgacggcgcagagggtggcttcagccgcttcctgttcgtcagggtcgacggggtgtccggccttctcgcgctcgagaatcgttcggtactccgagaccgtttccctcatcaaggtggagagaggaaaaaacggcagagtcggccgcgttcctccctcatgatgtgtggagaagtccgaggcatgctgcacagcagaagagcccgccaaggagccggagcatctctctcccagagccgaagagaaaaagagagactggaggagacgcagagtctccgccgcccttcggggctcctcgtcctctccgagctcttccgtcagctttggcaacgaagaagctgtagaagcggaggaaaacaagaagggttcatccttttccccccccgctgactgtgacagttcgatatcggccatttcgtttattctgtttcgcagcttgtctcctttgcctgtcgtgccgcctgccgccaaagagtcttccgagggctggacgaccgccggcgtgttgcgttgccagagttgcgggtgcggttttgtgtacgcttcccttcgtttccaaagataggccccgcaaacgcgcaaaatgccaccgatctcatctcactgtacttcttggtgtgtgtcgaattgtgtgccaaacatcacagccaggtgacaagacatgagtcgaggaagaaacgggtcgtcggctagagttctctggggacgccgcctgagctggccggagctgcagacggagtacaaaagccaagttagaatctctggaagtgagggagagaaaacgaacagaaactaaagacaacggattcctgaggaaagaaaagctgcatccgcggacgcacttgcagttactcggacttccacagcaaccgctgcacttttcgtccgacaagacacaccgacgagagcggacacgcgtgtgcgaaatcgcgtcgcacgatggtcaaaactctaactccagttaagagttttggagtcaaagttaattaactacacaagaatacgaaagaaactcggtttcccagtcatggaacgcattttcgcttcgtccgctccccaacgaagatgcgtgttgacctcatttgcagttctttcactgtcgtccctccggcatgtcgaaaaaatgctgtggaggatcggggatctgtgaaaaatacgggcgtgcctgaagcgcgtctgtagagtttcaatgcccgaggcagagtacaggattggattccgatggaactgtacttccaactgtacttccacttataagaaccatagtctaagtcaccaggtttgcagtgccgattagatggtaacaaaagccagactccatgttaaagaatataaagtgggattcttaagcttctgtaaaccaccctttcatcaggaatatatactacatgggggagaggggttcggaacgaaagagctccttgccgaacattcacacatcgcggcacctacaaacagtttatgcgcttccaactctctcgcgcatcgcatccacgcagaaatgccggtattgtcgtccaacgggttgcgttttacaagtctatgtaactgcagctacatgtttgaatgttttaatgatgtgatatgaccgcctgcctagccctaaaacaacacttctttggtcaggccccccacttctacctgcgctcgtatcgaggtggaaatagaaaagaatcacggacacagggaagtgctaggtgttgaggatagcactgggaaagggaaatatacaggcaggtaagacgccacgcaagataccatatttttatacacatcggtgcacgcactgtcgctggtgagctggggccgtaatacaacggtaaagtgtttccggcttgtgcgagcaacgcgaacgaacgtttgcacacaaagatgaggaggcttgttagaccctacttttcaagtgtcaaaaggaaaattgagtttttcgcatgaattgtcatgcacagtggctcacaggtggggggtctttctcgtgtacagggtcacacgcgtggacttgcgtgtccacaggacgaagtcgttttgtgcctgtgcagcttcattgtgcagcttgttactcctgcacaaggtttgaggatgtcaaagctactgaggaaaaattggagcaacatcctggtgaagactgcaagaagttgtgaggtctgcacgcgtcggaacttctaatgggacggcatatggaagaacccatttcatttttgactgctgatattgatctccagacgcgcatcgaccgctccgtcgggtcggctgcagaaccgcgcggaagggtgggagccgggactttcatactgcaaattcactagccacgcagcaagtgcagttgatttttgtcgagacacacgtgtgggtggtcgccaccgaagatgtcgtcagggaatcgttcgtggctcagaagctgaagcgtgatgcatccaagctggtcgagcggacggaacgacatgtcgttcccggcctgttgtgccttgggtcatcgaagcgcgaatctcttcgacagacactctgttttttaccgaagccaagagtactttagtcaagtctatgactggagacacgaggctgaattgtcgggctttatgtgtacgagtccaactcgagacttcgtcctcccctggtactaatttgggaagacagctgccgttagctcaagccgctccttctccctgcgccccctccctttctgtcctgattcttgaccctttgcccacgtctgtaatctcgtctactgtggtctgttgtccgtgccttgccttgcatccaccgcattcctcatggcagctcgccagctgtgcggttctgcgtctggtagaagacaaagggagagcgatcagaaacaaaggttgagacgaaggctcgtgcggatgtcacgcagaatcgtcaaaagaggatagaggaggggggacaaagatggattttccgtggggtctcttcctttctctcattcccccgttgtcctcagcaatcaacattcgttctgtacatctatcgtggcactgggcatcgcattctctcatcgtcttccatgaaggcctttccatttaaagcaagatcaacacgcagctactacgtacgctagcaaagcaggtgacctcaccgccgcgagaacttggctggatcgtgtgggagcgaaatgtagagtatggtgagtttcctccggtgctaaggggtagaactgcatcaacagtatgcaggcagctcctatacttcacttactgaaccagaacagtgtctgataaatatctgtgtgcacacgtgtcacacagaagtctctgcatccattgtgtgacgccagtgtgcacatacggaaccagaatgaacttacactgagctaccacagtggtagggaatgacgactttaatttatagaagttgttggccacttcgcggtacactgtgcctctctattactttctcgctggcataatccattgttggcatacttctctgtagaaccactttatatccggtcacgggactctcggcgccaggcaatggttttggcgaacccgctgcagaaagacacgccccccatcgctcgacggggaccgtcgagcatacatatgaagctgacgcgagcaagcctcacatagcgaattcgatggctcttctgccaaggactcgattattatgtctgtgcgacgaaaagtccctcatcactcgcttgtcaggcgcaactctgtccctccccccgatgcagttgcatcactgtggttctggagaatgttccccacaaacgaaaacgtgcgtgctcgccgttcttagaatgacgacacaatcaccacaatggtaccgaagacgacatctccgttatcgcattgtcgtttgaatggggagcatcaacatattgatgttcaaatcacgcggacttctctatagggctatcatctcaaaactagcgctatacgccgacttcagcgaaatagctcgatgagtctggaggcttggaagtcgtgatttgctacagaaaggtgctcataggttgacaacttgtgctcataagaatccaacaaagaggttcaacgggcatatccgctgcatcattttgccggta

SEQ ID NO: 545 - DNA, 1478 bp, Toxoplasma gondii
  source 1..1478: mol_type = genomic DNA
gactgcagcgaagaggttttctggcctcgaggttgagagcgaagacgagaagcgagaacgggagagggggaaggaaacaggttccactccctctctgtggttcttcgaacagacgcagagaaagaagagaccgagcaggcagaaggcaacgccttcgtggctgcctggcgcgcgggtgcacggtgagatgcgagcgccattgctggaagaagaaagaaaagaatcaacagggaaaagagggagagagaacaaagagggagaggcaagagagagaatagaaagagagagacaactctgagtggcgtagaaccgagcaaagagacacacaggaaaagcgccgggctgtggaggcactttgtgacgcactagttcaggtgtacatacacctcaactcagccgctctctgctctccagacgtttcactttcgcgcctcagcttcctcctggccaggacgttcttgttgagtttctgcccgacgcagtccactcgcgagagagaactccgacagagaggacgcccagaggcatgttcctcgatttgaaagccgcgcgttatcctggatttctttctgacgagtttttctccccctcggacatgcctctaggaccaacagcagctccttccccgcgttgcaggagaagaagagacctcgcggccgtccctgccgcccgtaaattcgcactgaggaaacgaacttcctttcgagcgaatatgcggggggcaggagaagagacagggaaaagaagaaaaagggagaagaagaaatgaggaaggacgcgagaagatggacggccgacggacggaagcgaggaacagggaaaccatgtgtagggcgtatggtagcagcacaaggggaccgttttttgaagagagagcgagaaaagcgaaaaacggagattttgcgacagatgattttctaacaaagtcaggaaggcgagccgaaggcaactgttgctctcttcgcgcatgcacttttttcacatcggcgcgcgatgctcagcgcgtctgcaagacatcgtgtgtaggagagaaaagaatctctgaagagctcgtctcagtcgcttgcagaagaaggagaacaaggaacttcaaaccacgaagcaatgacgaagaagaacactgcaaaggcgttgacgcgtaacagtgcacacaaagggaagtggggtgcatgcgatacgacgtggaaacaggctgaaccaacgagttgtttccgacgctttctcgccacaggtcttttcttaacgttcgagttttccgagtttgtcgtctgcgccttctcctagacttcagagagagacccgtcttcctcttcctctctcctctcttcccttctgtctcctcgcgggcacccaccttccacgttttattcgagactttctgcctctctgctttaaacaagttttcctgttgcacacacacacagttctttgcctcgtctttctcggcgtctgccagcttccggcgtctcgacgcgcga

SEQ ID NO: 546 - DNA, 4729 bp, Toxoplasma gondii
  source 1..4729: mol_type = genomic DNA
agttctggtgtttccaagtccgcgttgcttggctgcgcgatccgaagaagccccgggagtatttcgtctctttcgggggagagccgctttcggcttgtctctcttgcggccacagtcgagctcgacgcggagcggcagcctcggatttgcgaagcgaagatggagcggggggaaacggaggaaaagaaaagatcgaaggaagcgaagatgcgcgcgaggggggcagcaccgcacccttggactggtgaaagagagagtcgtcatacagagagacggcagaagccgcagtcgggtgcagcgacgctgggtgatccagcgccgagagagaaacgatgcgacagtttcttccttctgcgtttgaggagagaaaaatagagaaacctagaaagacgagtaacagacgagggccggtcatcaggcctgagacccgggacgaccgagttgctttcctgggtggaggggaaggcggacggcgaagaagagaagagcgagaagagcagacgagaaaaggacgagagagactagaacaagagagcagaaaacaagcgagtggaggaaaagccggggcaagatccatcaaggagacgaagaacgcagtggcagcagcacggagaagagagagagcggagaaacagcgaaagaaaagaagagaaaaacaacagatcgcacaagtgcggccttcgggtggacgaccgaaatggcacagcaggacagactgcagaagccgaggatgaaagactttctccatttttcgacgcgaagaaaagagaagaagccacaggagagagaaaacaaagtgaaaagacaaattcgaagaaacccctcgactcggcagcagcgcgggtgccggcaccagcctgcccccactcacggggtgtacgtacacccggtgcatgctggccatagtgaccggtcgaagcctcttagcttcctcatgctccacaaagacttctcgatgaggagcaacaattttctgcagttcttgccagcattattgcgtcatgaagcattgatctacaacgggtctcggattctccctctgtaggtccacactgtcggctgcgcgagttcggcatccctttgtcacgagatgggggaggtgaaaaattgacaggaagaggaggacgaaaaggacatgaaacgaaggggatttgcagacagaagcgaactcggatgaactcgcgtcgtccgccttttcgcgcctcccggcgcagcggccgcacacgacgggtctgtcttgtcacctcgatcttcgatacgcggagtgaagctcgtcgcggcggacaggtttgaggtttttgccccctctagaggtaccggaaaaaggaataaaggttgaggcagcgaaccacgcgtcaagagcactgaaactgcggtgtaatcttcaactgtgcgccaagagtactgtgcagcgagagcatgcagcgaaaacaacagaaacttgtgtgctggactggggacaaggaagaatcgcctgtcgcctgtttacgacgattttctcgcaaggattcaaaggaattctcacgttgattcgatttgaacttctccgttgtccacaacaagttctcagaagctgcctgccccctgggtctctggagacacacaactccacgtgcatgcaagcgtttttcagcgctctcatctgcagtgtggcctgctgtgccgcacatctttttctctctttctgtaattgctgtttctcctcgatctcgtggagatccagagggagaagaggtgacgaaggaactcgatgaacctcaacagccatcatctgtatctcctctcgactggtttctccttccactttttccgggtcccaaaagcgatgccagaaacggagatcgctggtcgacagaaagggggatgagaaggagcaggtacacttcacgtttcgagctgttgttggggagacgcactcgagaaaatcaggtgaatccaacagagacggagggcgcgtagcggcaggagcagccggcacagtctttgcaaagtcgtgggcggggcaccttggccagcactggaaatgggtcgaaactgcaaagagaagtcaaaatggaagaattccagtggattccaagcacacagatcaagaaaaacacgaaggaagtctgcgagatggacaggcaccgcatgctgtcctactgcagcaagcacgacggtaggaaaccctgtgcaactagatatggcaatgtctttttaccaccggaattccgatagagacatctgccggttctggtcacctcgactctcacgctgtgtgctatgatgactcctgtgacgacacaggttcttcgtagaatcttgtagtttcatctttctatcgccggtcaaaaactgcgggaaaaacggagcaacgaaacactacgaagggcctttctacttacactcaaataattcgggcacccctgcaggtacatatatatatatatatatgtatataacttctgcttctccatttgtggactgagtttacggaagtagaagagaatcttaagttacttggagggttgatatgttccgcgcccacacttgatgctgtttatagtaaagtgtggagatacctggggagttgcgtaatgggttaaatcctctggacaaagtagacgaaccgttcccgccacacatcagacagacagagcaccgtgacacttcaaaggagacaggagtaaacccacgtctctctccgtcagaatcttcagctatcgctttttgttcaatattccaagcagatatgtatgtttctacaccagctggatgtgaaggaacaatcccttttttctaagcatagacagaaaattgtttgtgaatacatatatatatatatatatacgtcgacctatacatagatatatatagagatagatatatacccccctaaggggttggtcgcttctcatcccgacgaccagaggctttgcagaaaccagtgcgtgtgtgttgagaacgcagcagctgatgtgacgcttgcggttccttgaattataagtggaacttttcccttttttgtgtgacactcgtcagtgtcgcaggtgcctcctaggatctgggagtccgagctgcttccaccttcgctttcgctcgacaggaaacgggtaaggattccggaagtcgaacacacgagccgagaggatcaggctcttggagaggaacagaagattaaaatgctcttgcagggacatcaggaaaacagattttgacaccaatcgaagacgaaaggtctcgtggagaacggaattgtcgacaggacacatttgaggctcaagaactgttgctggccctgaagcgacgaaaaatcgactctcgacacgaacgaatttgcgttaggggagttacagacagaatgtacctgagcaacaaaggtccagaagagttgtttccccatatagatgtttcccgacatgtgctgtggacgtatctacattcctactgtggcttaatgtatgccggtgtacaagcgcctttgtgcgcgttgattccttttcgaatcggatggtaagtaaatctgtgaatccgaatggtcacgagcctagcgaaggcatcgtgaaatgcgagcatccacaccatactcactctggattccaggtgttttccctcgagggggctgattgacaccggtgatgcagaagtggagaatgggtgaagcagattctcctgtgagaagtcgtttcatttttagtgcaaagctttcgcctaaaaagcacgattttcgccgagtctccaaagctgaaaacacagcactccacgtcttttccgacgcattcgtgccgttgcgcgaagcccagacaaccctcgaggtggagtttcccttgtctggacaaatccaaaacaagcagtacacgcgaaggaatttctcgtttcaggtccacatgcttttcttcgtttcccctcgttctaaaagttccttcacaggaagggtggagacgcttttttctttccgtggagctcgtcgctcgctaccaacacttcacagaaaacaggaatttcccgagtgctagcacggaggagctggactcggcttgctggtcacgcgaggtgttcggcgtgaccgcagcctcagaaaaaaagacatgcgtgcctttctaggttattcatttgaaaatgaaacaccgaaagaccttctcactgggaacaagggtggaaaaccgattttccctgccagccttccagggaaaaggcgccatcgactgctccgcttgtctggccggacctcgatgctcctttcgcggtgccggagaatttgtgcaaacatcaggtgtttagctggtcggttgagacggaattttttattcccgacgtcatttgtttctttgtgttggtgctgaagttggtaaggggtttgtactggttgttttctccagaaaaacgtgcacttttcaggtcgagcttgcgcttgtctgggactcggggtcatgcaactctgcgtgactctcccgactttgtcgtcgttttgtttcggcgaagaggatctttgcctctctttcgttctcttggagcggaattgaccccgttcacttggtttcgtccttctcgccccctttttcgctgcatttaggtactcttttctgtgcatctgtcgtctcggccagcggctgtatatagtagcggggcgcgggcgatcgtcggcgaccggctcttttccgcgccagcctgcctctatccttcctttttagaccagattctctctttcttctcggctttgctctgccttgtctcctctcccgacgcaaaa

SEQ ID NO: 547 - DNA, 2988 bp, Toxoplasma gondii
  source 1..2988: mol_type = genomic DNA
gtggactgcttgagaagcgctccgttcgctcatgtttcagagaagggaggacgctgtcgcagatctctcgacagtgtgggtgcatgcagcgattcataccgcatgagtggagactagttgatctgcaggtgaccaagggttgtgaggagacaggtgatgtgtagacgaggcggcgcctgcgtttcgcgcgactggagggggaggtctacacaggagggatcgttttgggagtcgaggagaaaatgtgcctcgcggtcttttgtcgtcaaatgtatcgagcaccagtgaacgtgctcacgaactcctttggaaactcgcgagttcaccggcggcgcggaatgggcgaactcgcgaaaactgcacaggagaaaaaacagaggagagcgcgacaacgcgcatggccggtgctggttgtctttgtggtgaccgcaactttgtggcagcggggcgaactcgcaagcaggtcggaatgcgttccatcgctgttgcagagggaactccgccggacaaattccggtgctgtgttcgtcgattcgcgtggaaaaaggaacgaagaatggggtcatggaatttctcggccgtgtgttcttccaatgcagatttctctcggtgccccatgcgattttgatgggtctgtccggtcttcgttgcttgcgattttggcggtcggatgttttgcgcgtctttgcgagattgtctgcatttccgttgcctgtgggagaagtcagaaaacattgacatttcggttgtccatattcctttcgggagtctatacccgcgttctgcacccgggactggaaaacctccgtgactcttcgcgctaaatgatcgcagagttcacaaaagaagaaagaatgccgtcctcaaactgctcaaagaaagcgaaacaagcgaaaataaagaagttcattgatcacctgtcttcatctcgcgctgcaagcgcttctttgctcgagacagcatgtttgcatcgcatttgaaagcatttctgcattgcacttgaaagcagatggaaaggaatttcgagcagcgaagacgaagcaggcgtactatcagttaaagcattgagatcgaatgtgtcaaaaacgtcgaaagctgcgcttctgtcatagcacggcattcctcagtccggtccgtgtggagccacaacgaacaatcacctctgttgcgcgtcgtctgagcctccttgtgcagacatatctatatagacacgtatgcgtacatgtctctcctctgacctcgactctgtatagtgtaccgctacaatcaggagcaagttatcatttcgatggttggatatctagatctccgcagacgtacgtcggtaccttcgaactgtgaatctcaggcgcggtttagatgagcagaagtgctccagtgtcgcggattatcttccgtgtgtccaggtcgattgttgtatgccctatttacttttatttcagtcttccttggtctacttctcagggcggatatccgggaccgagagtctcgggtccgggacatctttccaccgcggctgtttaccctattttccctcgaaaacaccatatacgccatcctcttgaagtcacttccataaagttacgtcttgcatttctgtcgtctaacgtatgtcgtcgaggctctgtctcgtctctctccccaagctgtcaccccagtcaccgcctaggaacgtcattcgctgttccccccactcactcctcgcgtttggtgctttgatcttgaataaaaagcgttccccatcatgtcttgtcgttagtttccgcgttaaaagtccattcgttccactccttccccgccgttgcggccgtttcccgtggacggcgtctttccgaccctagccgccaagaacgcgcgacaacgaaggccacaagttgccttgagcccaccggaccggctcctcggggcgggagcatgcgtcgcgacccccccaagacgttccgaaactaagattgttaaaaaggcgttcgaaagtcttacacagtccactgtttgcttcgttcaactggctagatgaagtgctgctgagtaaggaactcgagagctacacaaccctcagaagtctctcgtgcaggcaccgttgcccccaggccggtggtcttcgagaaaagaggacgcgggacggggctctgcgggcggagacgacttgagtggacgacgagaactgacgtcgcctgtagggattcgcttttgcttttgcgaacttgtcagaaaggtagcatctgctttttgagtcgattcgacggccgtagcctcaacatagcgaggactcccacacaccaccgatttcgcttttgtctacaccaggccgcggattgtgctgggacgagggcggcgctcgacgctttcgttcccagttgctcgcgctttgcatttgtatgaaacgcagaagttgtcatctcgccttcagaaaaaagttggagcgcgttctcgagggagcttccaggttggatctcttgggctgcagtgttgtgtcaaaaagagaaaggaacattgagaattgccggcctcctgcagcaatcaagcggtcgacgttggtcgtgcaggtgtttcgcgggttgtttgtgagcacggaagttcgtacagctccagacggaccgcttcttttcacagttcttgcttcggactcaatttttgacgtcgtccgtcttctacgagttgcaggggtagactttccccggcaaactctccgcctcgcagaacaggcgtgacccgtgaccgactgtttcgcggctccttgcttcccctctcctcgcggggtttcttgccaccattctttcttcgtaaacccactgtctacggtagcgaccagagcgtcggtgtttttcttccacgaatcctttggcaagtaccgtgtttcgcttggcgcttcctggcgcacccaaccgcactgctttccttgctttaccccttcgcatctggacacattgagccgctgctcccttcgcctctgcgttcggcgcgccgttttttctccgagctccgcca

SEQ ID NO: 548 - DNA, 2567 bp, Toxoplasma gondii
  source 1..2567: mol_type = genomic DNA
gcagtgaagtagagggaaggcaaaagagagtgaacggagagcagaagaaacgtagacgacgaatgccgcatcaagagagacaaagaacgagagagaagaagagagagcataagagagaggagaagagaggagaagagagaagagaggagaagagacgaaagtagagagagaagactaaacggagggaggagagaggggcaacggaggagagcggaaggttcgagagagacagagttctcactttggtgtaatctggagcgttgacggcgaattcaaaggcaagcacacctcgttcaataggaccgagcatgacggagtcgaggaggtagtcgccgccgccttcttcctttttctttgcattttcttcttcttcaacatccatgtctccctccacgcgttctccgtccgcgagactctggtggctaggcagcccagaggaggagagcgccgcgagtttctccttctttctcgccttcttctcgcactcggcagagcctacgtagactactcgccactcaatgtcctccttcaagggcgtcaaggcctcgaaacaaatttcgaagacgaacggcgaagaaatcggcgagggattgttccccagccgaatgttcgtcacattaaccaccgacatggcgccaggagaagaagagaggggagaagaagagaggggagaagaagagaagcgagagcagagacgtatggaggatggaggggagaggaacgcgaagagagaggagaggcggacggagacgcagactgcgagaacttgacggcggtttgagggcggcgcgcgagcggagaagaatcgcagaggaaagagctggagagaacgcggcgagaagagagaagagaagcaggctaaaagcaagacacaccagaggctctctggtcgttgcgtacgcttcacacaccgcgccgaagaagagagacgtcgagcgattcgaggtcaagagagaaaacagaccaagctccctacgaacagagagaacaggcgcgatgaccgagaaaaaaggaagaaggagaagggaggacagcgcacgacggagagtcccaagacatcttcacccagccttgcgcagttcttctgcacacaactggcagagaaacttcttcgtcgactgtctccctggaaagaaatcgacgcagacgcctctcgggggaggctgtctctctcctcttgcagggttcttcctcgaacgcttgcgagccgagagaaggagagagaaggagagagaaggagagagagatggcagaggcaggcccggcagatgcgtgtgtagcgcctacgttctgcgttttcagagaccagggcggaggcagcacctgcgagagtccgtctctcgtcctggggggcgcggacgttttctccgacaggagactcgttcagctttttctctcctttcaggcgaaatgggtagaacaatgcacactcggtctccgaaccattcgctggtgcaggcgaaacgcaaggcatcccgaaggaaaaacgcgcttttctccctcctctctgcccctctctacagacgcgctagcagacacacacctgccctgtcgcgcgctgttttcttgctcggaaggcagacgccgcaacctctctcgcgccgcgcagggccaggaagaaaggcagaaggatcgactgcctttgcgctctcgctgtagcattttccactgtcagacacacttcaaaaagcctggtcttgctcgaggaaagtcctattcaatctccttctccacgaaagaagactccaccttctggtccatctgggtgctgtgcggcatctgacaaatcgcgcgcggcaacgcgctgctttgcttgcgcggtccgcaacgtgagacgccactgcagagagatttttctttcctcgatttcctctacttccccccagttttctccactcaagtgtacagaaagagggagggcgagaagaaggcagccaggcgaaggaagagcgagcgaacaagacggctcgcgccggaagaaggaggccgggtggtgccgcaccgcgtatatatacgcgcgcgcgctggtgtaggtatatgcttacacaaggggggctcttttcttctgtttgtcttcatttctcttgtggttttctctcgtctttcgcctttcgcctttcgcttccctgcggatgtctcttttcctctgaactggagagaggagggaagacagaacacccgtcgtggcagaaggcgcgaggttccggcagcgcgacaagaacagagagtcgtttcctttccttcaattttttcatttctttgttggccaaacgtatccaggaagaagtcaaaggactcagtttcctggagtcgcttctttttgccgactcgccggaaagtccctcttccctcctacccacctcccttctcgaactctccctcccaccggttcgttgcggctttcttctccgaacgactccgtcaatcctctcctcgtctgccctcacgcactcgcccatctcgtcgcgcgcctgtctcgttcttcttttctctcttttctcgcttctctccccgtttttcgctctctctcttctctgctgaagagatctctggatccccgcacacca

SEQ ID NO: 549 - DNA, 1752 bp, Toxoplasma gondii
  source 1..1752: mol_type = genomic DNA
cccctctattgagagcgaggttcgttttcgctgtcctggaaatcgccgctgttcgctatcacaccattctagtgcattccttgtgaaccaacaagagatacaaaaacctaattttcattattatgtcagcgtaccgcctgtgcctccgaaaagactgccgccttgctgctgctgggtccccgccccaccgaaaagtcccccacctcctccggaggaaccaaagaggctacctcctccggtaagggacgatgacgtattagacgagaacattgcgaagaccacgaaatacgaacagaaggacaaaatgaatttccaggcgaaatgtgcctgctgaaaagaaaataaaacgagagtagttctggccaaaaacgaaagctagtgacttcggaaacaggagcacgagaaacagccacgtcgcttgataatgaaacgatttccacaccgggagcctacgtcaactaacacgaattcccgcagaatcagcttcttgaattctgtagttagtgaagaggtcccgatgttcccagtcctgagtctagcatgcgacaaggaccgtctagactggcacgatggagctggtgcggagcggccaacacaacagaatgctaccccaacagacgacggatgcgcgacgcgcccgccaaaagaaaaaaccaatgtgaatacttggagaaaactagaatgaacacacgcggaatgactcagtggctggcttcgatatggtgttgggattgttgacctcagaacaaacacggcgaagaacaaaaaatcgggcgaggcatggctggtcaaagagattgttccactgtctcggcacttcctttgtgtgcggaaaaagtagactgtttacgggaagaagacacgactttttccacgaagggaagaagacgcttacacatctcggcagatcagagttgcctaccctccgtcggcagtgaccaagtcgtttcccctgcgcggcacagatgcaacatacggcgcgggttgccgcgtctcatcatctgcatgtcttagagggagaaaaaatacgtcagcatgggaaaaaacttttttgtgcaccctccaagttctcgtcgacaggccagaaaatgcgcatgtattgttttttgcatgtgagcatgcgcacggggaccggggagtatgaggccacacacggacaggaaacgtcgcactgaccggaagtagaacgtggcgcaagcgtgctaccagtgctaccgccttagccccttgttggagacagaaaaaaacatgatttcaaccatggaagcttaaagacagcgtccagatggtgtaaaggaaagcaaataaagcaagacgaatccccccaaattgtgccggtcacctgattcatggtatcccaacgcacacacattggtcttgggaaacgactacgagcaaacacgtatgcgcgggcccttataaaaggcgaacttgagtagcaacccgagcagcgcgggcaacggctaggaacccttccagccagaggattgtcgacggcccggcaagatatttcaccgtggtcaagcaaaaccgaacactttttgagtcggtgtgaggtcgagaaaggagagctcccacttgtgtagaacttctcctttcagatatttcatttcccttgacgcgaagcaattaacagccatcattgggtttcatttcctggtatatatatctgtgttgcttaacattttctacgcctcaaccgcttactttgtctccgttgcaccgcggtcaacagactgtttcctgccacaa

SEQ ID NO: 550 - DNA, 2005 bp, Toxoplasma gondii
  source 1..2005: mol_type = genomic DNA
aaatcagagttgaggcaaaaccgtactaccttgcaaaagttgttgccctcaaagcagttgactcaacgtaagatggcatgatctccaccttgaaactttattgtcggtcgcggtgtcatgcagtcatctgaacacctctcatctgtaactgtgtcatgcttggcgcttttcagcaggagcacatgggaacgacatgaagctgttctctcacaaatccggcgacgtagagaaaatgaatgtggtcggtaggtactggcctgttaggtaacagacttcaggaggtttttgaaacgacaaaactgaacggaaactgtcataacggcaatcctatctccaaggctacgtgagagaatcgtgctcgttgcaatggaagtaactaccaacatttcgccatatggatccaacatgtggtttgtaagacctggtctctcttgtcgggagccataatacagaaatttatttctgtaaagaagggtgtgtcacatctgtgtttccgttgaaaacgagcgagctaaattttttccaccgcgggttcgtgcgacagcaacctcgtgttgtggttttggtgctgctttgtggaaattcgctctgtggtctttctgtgcattcgctcagtccagaaaagaagacccgctatttttggcagccgtctgacgaccttctgggcggagctgtggctcttaacgatcttcggcaaacggtgattgaaaaacaggcccggcggttgcgcgatttgtctgcttgttaccaaaagtgccaccatctgtcagaagaaaacaattacctcaagtgcagagagcaagctcttgttaagcagctgaaggaagcagaagaaacaagtcgaatggatgtgagtgacagggaattacagcggcggagtagtgtgtctgatcacgctgtatattactgtcttatgacactactaacttcgatgtagggcgccgatgtgcagctctacagtaacaacctgttataagacccatttcccttgcttgtgaaacttacattgcaactgagaacaatatgtattgtgctgggaagtgtcgttaacaagagcttgctaggtttctgtagccaccagccattggtcgcctgagagaaaaccaccacatgggaggcggcggcttgggagctttcgttattttggcaaggcagcagaggatagactacccaaagtcattcgcattcatttaggcgtcatagagtagaaatcagagggcgcgtgtccaatctgtatttcacacgaatccaacaagtgccgccttaccacctcgagagtgacagtcaggtgtcgggattccccagtcctcttttgtggcaagacatcaaaatgcacacggacacttattctaataaaccctctcgtcctgcttgtgaattcttgccgtatcaacgttcagagaaatcgaaaagtacagaagctgacatcactgaacgctcatctgcttcacgacaacatgctcctgcacacgtcactggccctactgatcgacaggcaaccgacaatagttactggcctgtatgagacagacatgatctgctgggtggtaccgaatctagcattacttgctcgagagggcaagctgccacgtcggatcgtgagtccatggttgcgaagcgaaaatagaagaagctgccaactgcagtttatcctgtacccgtttgggacaaaacacaaacaccgcgaagccgtcgctgggaaaagtcacaccggtagcacccgcagaaaagcctgcccggctttgctcgtccggtgagtgtagcctgaccttgctttgcttttgaaaataacctctgcagcaatagcatttaagatgatgctggggttatcgcattatgacactaccaataatgtttaacaggaattcccgctgaccagcagaatcggcagtgcagattaggaaagtcgtgtgtccacttgttgagtggcgggccggccaacaagaacgatgacattgccacgggtagagctcttcaggaggaaactaaagtgttgcgtaaaaaa

SEQ ID NO: 551 - DNA, 2512 bp, Toxoplasma gondii
  source 1..2512: mol_type = genomic DNA
gccgttgaaaatgcagtggaggttcttgattcaggcgggtgcaggtccgctgtcgctgatgagcaggcaagattccctctgctgtccccttgagactggccagacctcctacagagctgtgcctgaagctgctggataagattcatctggagctggagcttattttgccgcccttgcaggtgctgcaggagtttctgaagaagaaccagctgttcttgcacaggagacggtggcaagccgtccgcggtttccgagtgggccggctgtgtggaccgactcaagcttctcatgacttcgacaaggtgacaactagtgtgcgaaggcaacggggacctcaaccaacaaagaagttttcaagccgatatcagacggatccagaatgtccttgctacaacttctcggtacgagttcctccttccctcccggagctggaaccacacccaccggcctcatggctaattccctgaacgcgacaggaggccagaagaaagaagatggcatcggtcatgtgcatcgtccgcggtacccaacgtcgacgtcagaatccaacgttcagcacccgaagctcgttagcacactcacggcgtggaagagctgcaatagatggcagtaacaggaatcgtcttgagccacgacaaaatggtagaatggatagcatggcactttgatcctgcacgaatcctgtgaagagccaaaaaattacttggtaagcctgtcacaggtaactaaaaaagcggccgctgacgacactgcggccaagtagcaaaacgtggtgtgcttcgttcaggatgtaacggctaaaacggcccttcatgtaacatccaccggtgtcagcggtggcgagaattcagagaggtttcagcctgtattcatcggaaagaagatcgataggggcttcgccaagaggaaaacagccacagaaagacaaacagtgttagacaaggaatcacgctcagagcatgccctcagcagaatgcccagctccgcagatcgatgagctgtctatacactgcaacacacatgcaagcaacaagcccgagacaaacagtcgtttttgagaccaggcagctccgtttctgtttccgagcagagtcatcagtcaacggcatgcgaacggcatgcacagtgacttctgccatctgcgctgctgagcccgttcccagcacaacgcaggacacgtacgtcaaaagtaaatgacttggattgacagtgattggattggggtgccttcctaattttcactgtcaacgcgtttcagtggcaccacagcagcccttgacactctgaagacgctagttcagctgagtgcttgggaacgctgggcctgcttttcgaagcggtcatcgacccgtctgatcacgccaggcgtctgcagtgggacagttgcttgggtccacgtggtgtggtgtccgccagtttggcgcgtgaaaagtagccacagacagtgaatgaaagaaagattatgtcttcattttttgctggttttgctttgcctttaccgaagagccacggtgcgaatacggatggcatttgcctgtggcgcaagaacctcttgtagtcactggcggtggtcgcacatgcgaacaggggagacgcgagcactacgtctggcaatactggaagaacggtgccgttgacattcgtcatagtcggcgttctcttgtttcctggaacctctgcaaaaggcattcacccctcaggggaagtggatcatgccagcgtttctctggctctgagaaaccaatcttcgtgaacagcaatttcatcttgtgaacctgcgacaaagcagtcgcacacgcccaaaacttgaggcccaacggttttctgaacgatagtgatatcgacattgtcgaagagggactttcaattgtcgatgcaaccatccacgcgtgaaaccgagtcgaactgtgtgatgacaacacattgctgcgtactttttcatggggaaggctttcaccggattttctgtgctccacacaccgaatcaatagggtgcgtggagcggtttgcagaaggaagcaatctagcgtctcttcttggcaatgatatcgagaggaacagggggggacgacgacgtcgaggaacagttagagaaattctccgacgaattacttcttgccagtgtccgaactaagcgttcgacggttggctcctattggtctgcaggcgcctctggtagcaaccttggaagtaggtttcactcttgccatgtctggcggacatatacatgaagtactcgagtgcttttgagaacgcccttttggcacagcactggcaagctctccgccaccgcgcctgagccacccagaagcgctcttctgtctgatggtcttcaggttgccactttgcttcgtttaccagtttcaccggcccggtgggcgttctttttgaagaacttgtgactcctcttgcggagtgtgtggcccgctaccaggaggtaccgatggtcttccgggtgccgtacttcctctctcagcagcagctgacagactgtttccaccctctgtacaga

SEQ ID NO: 552 - DNA, 2568 bp, Toxoplasma gondii
  source 1..2568: mol_type = genomic DNA
atagagtaaggcaagactgcaggagcagaaacatgttaaggaagagccacggagtttgtgcagcctttgcatgcagcgtcggtaaaaaacggtttttccactggcacctctgttacggactgcagcggaagcgcgccttttcgtttctcgtcgtagacagggaagaacgaaaatggacgaacagtggggtccgggccccgtctaggctcgcgggaggcagcgcaaccgcctgcagagtcaacggaggagtgtctctcggatcggcaccatgtggacgtccccagacactgtgtcttttttggatcaactgtttttgcatgcagagctcatgacgctagcctctgcggccgaggcggcggagtttgcggcgagagcttcccgtgatggcacagacgcgagtcgtcaatctgcgtcgtctgaagacgaagagaggccgaggcgcgttttgtgtgctcgccacattttggcagctgccgcgcaaataccctctttggactgatattgttggactcctgctgtgtctctgctttcgctgcgccgcaacagttttgtgctgagatgtgacgttttcttcgacatccctcgcaggtctgctcacactccgagcgatgtgtgtcgagaagcgctactcagaaagacacggggtttcgcgtgagaagggagagaagaccgaggagagactctgccgttttgcaggtctctcaaagttgtgtgtttctcaagagtttcatgcacaccgaaggcctcaagactcctggttttccaccacgcgagggacgtttctgtagacaacggtgccgcaattaactctcgttccgcagacggagagacgcagccgcgtcctcgaaaagctttcgctgtggtgcggggctgttccaccgtacacgagagttgcgatagagcgacagaaaaacagagccctactcaaacgcgatctgtgagcctaggaattcgtagacagctgatgtaccactttggagttttttcttttcgtgttgacagagagcagacggtcgttttcgctgaaactagattcacagctgttggtttggcggcttctaattcgacagcaaggacgcacgtgtgtcggaaaaagaatctaaatcacgaattcaaaaattttcgttgtcactcgagcgaagagtgcgagtcttttcaggctcattgtgctggagccttcaagatgtaaaacagcagttgaacagtggcgactcgagaatttcaacacagcccatcgtctgccgttactgctcatattttcccggtcagaggagtgtttcttaaagtggttcgaagaagctaccaggtcctttgaagaatgccggcactacgcgcgtaagtacagcttgcggggtctgcattatcggctacacctggcctgaggaaggcaggggctttacaataactccagggaagtccatatggtggaaaaacgaggaatttgacagggagatgacgagtattacttcagttgtacggtcctcgagtctgtgaatggcatgacacaagaatatacggaggaggctgctgctgcacatgcacagaattccaaaaagtcccgtcctgttcctgaactgcaagcataccggatggttagctgaagaaggccttgctgtttgtggtggcaggggcgacctcgaactgggtatagggtctccggagttgggagtttcagtgtggtcttccacgtcgttgttttaatcagacgcgcttcaccgcgcggatctttggctcgttagtgacacaagttccaacaagacacggatatcccaggactttcaacaccgcggagttgtcagaaagtccccgccacgtaaacacttccacgcacccatcctgtgcacactatcgcgttgtgcggaaagcaaacatgtgtatttttcggggcttttctccgaaactcttcgaacgaattgcgtaggcagtctgtgtgtgagtgtgtcggagacctcaaggtgggcagcatttcagaaacagacctcaaggaatgccaggtattcagagaacagagactatcctgtgcaattgagttgcaactcagatgcaccgatcgaacagttccttctcgtacgtttgtacttttatgcgtcgtctgtgcatctgttttctaaatttttcacaagccgcatgtcacaaaacggctacgtcagctcgtgcccccccgcgtggacgcccatgtgtcggggtgaagtgtgcatcgtcgtctccggaattgccggcccgtgtttattcgcttttcaagtctttttatgagtctgaagttctgccacaaacgtttagcaacgctgttgctgaaactcccgtcgaaagaaatcctttgagcactccagaaagcacgacgccccgttcccgtccctgtcttcctcgacttccgtctctctcgttgcacacacacacaccgacgtgtgtctccacgcgtttgtctccttttcttccagacagtttctgttgtatgttcttctccttcgcgattcgcggcagtgtgtagataaagtgacggcgaagcaaggcgagttgcgtttggaagtcgtgcctttttcgtcggtgaaaaaagtcgtgtctccatca

SEQ ID NO: 553 - DNA, 1212 bp, Toxoplasma gondii
  source 1..1212: mol_type = genomic DNA
cgtgcgtcaaagttggtccgactcttcacatgtcgtttatctaagactttttaaaatagaattatctttgaatatgaggatcgaggtggcccgacgtttagaccctgagcgactgttcactgcgcgtaaggtatgttcatatatataatatagttcagacggcacgcatggatctgaaataggctcttgaccttacaagaacgggcgaaacgctgaatccgatgcgccaattgtgtagacaggtggttaatgggaccttcgtgaatgtgaaacaatacagggacccgcaagggcttgacgtgtgcatgacacgccgccactaatcacgcatcgatccgtataacgctgatacccaacctgctactgtggttgctctggccgtctgactgcatgacacaacatagaacaaactgtacctcaggcctattgctcaatgtaagtaccaaaggactaccgtcttgaagcccttcgcacgtggacgttcggacgtcacgcttcagcgcatcaaagtgacgacttgtcagttaacagctttttaaatcatgacgcagacatgaataaaagtctttgtagatcctccggcgaaaagagccccctcttcttgttccaacttataaaggactgtgtttaatcggaggatggcttaatcagttgaggcagtgcgttgcagccggttctctgtcggatacgccaagggccggctgcagctagcaaccgtatatcgatctactcgctctcacacttctgtactacggagaggcaatgcctcgcttggaagtagtttgactgccattcgatatagacggcataagaaatcagacggagacaactccacaatacgaactacaaactttgaaaccttcctacgtcggttgtgcctgctcttcttgcatgctagcgttgcatgcggagctacgttgtggggactaagtttccgaaatgaactccggcgcacggcgggacaggagtcaaatctgtagtattgcgactgcgttcctgtggcttttttttgtctgcggccaaagaaaagtacaggctggtcggcgttatcttggtggagggcgcccgttatttacgtttcgcccaagttcaagcctggcccattttttttccttccagcttccggataggatttgctttgcactggtatcagaagccggtctgaacagaagactggttgcgaagcttctttttcaagcacaagcataacaa

SEQ ID NO: 554 - DNA, 2102 bp, Toxoplasma gondii
  source 1..2102: mol_type = genomic DNA
tcagtcgatgttcatgagttccttcaatcgtaaaagggcattaacattcttctacaaatatggcaatctatatatatatgtatatatatatatatagagagagagagagagaagggagacctttggacgtcgtttctcttcacgagaggtatctcgcgagccacacgaagcaaagaattaatgatattttcgtgcgtgagatccacccaggcggatctctcgaatctgtcgggtgtatgtgcactttacggtcggaggcggcgatcgcattttttcacgttctgtttctttaggaaagctcccaatttggtggggaaagtgtaaagggagggcgtcggcttgagagaggaaacattgactgactgaaaagtcaagcagttcgtttgaaaaggataagctgcacagggttattcgaggcgagagagaccgtctgaaaacgacacacgttttttgggtttcgatgccatcctggatctgcgcactcctcttccgtgcagtgctttttaagcttctgggcgcacaaaggggttcctgggggagtattcgtattaaccgtgagagacaacgccgcctccgacggtaggatgagctgctatttcataatcgtgctcagaggcatcccgccacaggcttgtttatcagctctttctgagaagcaagtgcggcgaacggacgacgggttaacagctggacggtcgtttggaaggctgcgccgtttgctgccgacacagttggagggatcgccttcggaaatctcacctgagtctagacacaccgttttctccgtttttttacgctctagacaaacagtttccacccttttccattgcgctgtcccgacactctggcgtccgagcgagtcctttgtgtgtcgggatgtttggagttgcttgtcgttttgccaagtggtactgatcagactagcatctgagtagcagttgtctctcgctgttactacgagtgattacagaaatgcatatattacgcctagaaattaaccgatgtccttgatgcatggacgaggaggaagcaagaattgctttcatgtaaataaagagctcgtttgcacacgcttgtaattactgttcacctgaagtcgggtcccatggaaaccttgttcccgactcacagagtctgcctttctgcgcgcaacgatgttcccgcagactctccgtccttttcatagacaatcgaagttgtattctctcttttctcggagagttcttctcattcttcacgtgaacagcgaaatgcagaggacaacgcacgacggaagagattttggaaagtgaacgaccgtcccccctcaactttccccggaggagacacggagcagcgcggagagacacccgcgaagggtgccgcgtcgaggctttgcctcccggttctcgcgttttttcctctcgtatccttatcgtctctccagcgtcagttgtcgacgcagcaggaaaaacgcgtggaatttcaaagaccgctttgttgctttcttgctctgtcgcggctggccagatggcgctgccggagaagtcgccgttccggagagacaaagtagcacgcgacactcgagagacgtcgtccacttcttctcttccgtctctgtttccccgtttcttcgcagtgaaatgcagtctgtttgcatgcgggggaaaagaaactgcagttcttttcctcagcgtcaggtagctcagtggtcctcgaaacggtccgcgttcgaagtcgagacacacacatgcgcgttttctcgtggaatcaatcacctagaaagacatctggatctgactttgtgtagacccgaggtctttctcgcttgcgagtgcattttcagaaaactgacttcccgccgacgctgaaaaccttctccccgtcctctgcagtaccgaaggagaatccgaattagcagtcagccacagaaagacacccccagcgaacgcagcgagaagaagaactagcggaaaagagacgaggagaaggacagagacacgaggagggctgttgcacaatcgagaaacgaaggcaagagaagagagaagaacagaggagtgagaggaaaagaagaaagcatgcaagtggcgtttgcctgtacacctcgtctgaggacagaa

SEQ ID NO: 555 - DNA, 2122 bp, Toxoplasma gondii
  source 1..2122: mol_type = genomic DNA
accattttgctccattatggttctgggtttagcaatatctgctgatccagaccacgaagtcagacagcccgtgcgctgctctaacttgaatggagtcttcttatcaacgtatctcttcagatcggctggactgcacgccagagctgacttcattcgcagctgtatcgcccctcttgtcttaggccgataccaaaattactctacacgaaagctaggcctcccgcttcagtgtgctctgaaatgctttaagaaagataaacctggaactactgtcgaaagtatgtagtcgaaggtagacagcgagtccctctctgccccgttgaccataaataccctccacatggtgcatccactaaagactaggtaagtcggttattttgtggcagcagagaaaaatgaaataacgcggttctgatgtccggagccaaactgctcgctcctagcttttgcacaaaaaggccagcactataagtggcgttacgcgtggccatgagcttaaaagagacccccccaaaattgctcagtgactgtacgggaacgtggtcccggtaaaataggtcacatctgttttgtggttcccacacctgagcagtgcccctcaacagattttaggcggaggacggatagccaacatccgccagtctcagggcggagggactctgtaagaaacgcctcagcaggacctgtgacagaaacgagcgactgtgtccatttgacaccgctgaacgatttcaaaaacccgcttgtgtggcgccggaaagcgtgcgatgtgtagagtattgataatgacaccaccgctttgcacacggcatgaaagtcagcactgatgtcaagcatcggagttgtactggtcacatcactccacatgaattagagctttaagagcatagggacttttctgtacgcttcagtgaccacacgaaagatgccgcgtgtcttgaaacgagacacgggagcgctagtttttcgtttatcgcgcatcaaagagccaaaccataaacgactgaatatgccgctctgctggagtcatcccggaaactatcgtgatgctttgtaacacaggaaacacgttattatgcgaggacgtctgtggtttacgtcttaaaaatctcgttagcttgagtcatccgctcttttggatcggctgcgtggttactgtccatctgttccacaggagtgactatatcctggctatccgtgtgtgagtgcccgatgctgtggaacaacaatcacgccatctcaagaacgatacacacaaaagtgaggggaagcagctcgaggcaatcctttaggaaaagtttgatgagcagaagattctgttgcaccgaaggctgccatttagagcgtttcgggggaggacggctaactttcaagcattgagcactgcatgtgcatggacagggacgtttgtgtcaaccagaaaccgttgccttgtatgccactgcttgaaccctgcagggaggtctacaggagagagaaaataacaatgttggttctcaaccttgtgtcccagtactcttaaaacggccgtttcaggctccattaatgctattcgttagcgggacgagttcttccaccacgccaccgcattatttgcgttgttctctgtttccctctagatcatcttggtgtcttgcccttccggcagcgtgtgcccggacttcatgacgtgtcaaaatttgtacctttcgggagaggcagagcaactcaatgaaacctgcttgaatgaacggcatgctgaaagcattttaggatttgctagtggtataaactgttggtcccaaggaacgcgaattgacgaacgcttgggggtgcatcgaacttgagcgggtgaacaggccgctacgggcgtccagaactctccgtcgcacagtcgtcgcctggagttactgtaacgggcgtttgcggtcaccctcatggaatgttctttacttcagtgctcgcttgtccagagttgtagaagaagtgtttatcgctttgtgaggctcacttttgctgtcaaactgtccatgtctggtcgtgttccgcgcactggttcattctcgtgtgcggcctttcgtgatgaccaggactcccgcgtgaagtgtgtcgcgatttctagcgcttagttcttcacgtcgaa

SEQ ID NO: 556 - DNA, 4744 bp, Toxoplasma gondii
  source 1..4744: mol_type = genomic DNA
ctctttctcgagatgacacagcaaatgttgcctaggcatggaaagtgcacggctcccgtttttcttcagagagcccctgaaaagaattcgccttctctgacatcctgggtggctcttggaccgtctgaggaaactgaacttaccttaaaaatcttgttcagttcccgctgtcggaggtgcttagactcgtcctcgaggagatacgcatctgcgccttgcagccaggattcgtaggaaaacgaaggggaagaccaagaaactgcatttgacgagggggcgtctccggccttgccttcctttgaatgctgaggtcttcctgaagcctctgtctcctccgcgtcggaatttctcctctcttcctctgcgccactgtgctctccatctgcccggtgcgtcatgatcgtcctgtcccgctgcggagggtcgccgccctcgtccttctctgtgtgttctgcatccttcatggcgccgtctcccgtctgaaatataatttttttcaataactttctcttccgcgccctctggtcactttgaacctcgaaaacgtggacgaaaggaaggcaaccaggctacgcaagggctccctccaggggaattgtgacgcgacaggcgcttaagaggcgcgtcgaatctgccttcagcgcaaccggtggcaggcggaggtcagtgcaaagcgggtcgcgatttttctcaaaaaaaccaactcgctttgggagaaactaaaagaaaacaagaaaacgctgggtcacgttgacacacggggccagcgcgcactgccaccggcccccgggaaaagctggtcaaccaacagaaggagagcgttctcctaccttcctcagagagaaatggaatacctttgcttgtgcaccgcgctgaatgcttcgagggaaaagttcttgagcgtcttccgccgttttatttgccggaaacggcagcgtttccggaacccaaaggcgacggccttcgaaggccggggcaggcgagtggctcgggataaaaaacggaaatggaaaaccaggccggaaagcagcagctaaagacggtacgcatcgaaggagaaactttgttatttggaagttcagcacctggaggacgacacattcagaggaagagcgtctgcggaaagagaccaaaaaaagacgacaaaacaccgcttccaactatgtaggccctcacgggcgccacgaacgataaccgttcgttgataagatagccaagtttcgtaacgtcgcaagcgcgcatcataaaacatagaaaccagtctttttatcgagaagggtcttttttccatgtccatctttccagacaaacttgtctccgtgcatgcaacaagcgaaaaaacccagtcgcatgccgcagccgtccgtagcgctgcctcactccaactgttggtgtaagacacgcgcatgtatgttttttgtttcttaatgagaaatcccgaaggtactttacacaaaagtttgtgttattgcagctgtgagaggccgcgaaacgaacaagctaatggaggacagtttcttgtgcagcaacaccgtcgatgcctgcaaaaaacgagtagatctctatgcagctgtgtatacgcgcctttcaaaacatagactctggcgggggggggacacgtgccaatatcgatgtgtattccagaagcccgctgtttccaggcaattctgtgtctaatgctttagacagtgtcagccggccctttctggctgacatccgtgggcgacgcgacgagtcatacggcgtggatttgggaactcgaagcgagtattttcccagaaagagtttaagcgaacttgtcaagattagtgcacaccgttacggcgccaactgggagaactcgtgcctttttttcgaccggagtctggtcagatctagtacggcgtactggactacgaaatgatctctggtacatttgaagggcggtgactgtctaaaaaaatatagtgcaaaactgaagagcaccacaggaaagcgcagactccactgcgctaaattccgcctgaccattgcactcacgtgcaaaagtgtttttttttgtcgggacagagaagaagtgccaccacctgcactgagtgctgtcaccaggcaaataatgatttcctcacgtactttggaactgactgcatttcggttctcacacgcaaacgtgtattctattctaccatgactttgcctctttactgccttgtgcaacggtgagagaaggcaaggtaggcatcctcttgattgaggtcccctcgcggtgtcgcctgagacagggaagacgcgtagagggtgaagacgactctccacttcatatacactttttacaaaatttttggtcttccgccggagtccgccggcatcgatttgaagattgggaatctctgtgaggataaacactttcccggcaacggaagaaacacgggagcaggaaacagtcttgaaagggaatggtcgtcgcctctcagtttatcggaggcgcagcgcaccgcagtattcacatcatcgggggactctccgacgctgcctgcttttggcacaaagtaaagaacaactaaaagacacgatgcatgcctccaggagtgcgtttaatggtgttagaagaaaaatcttccgttcacttaaccaaaagtgccaatgcctcccacatgcacgcaaactcggccactgttttcagtgtcgaagtcacgcatgatattttccatcttacggaccagcactgcaacttgcggcaacacgcgtttctaaaggaggtcgacgtccgctgttcgaaaaagtaattttcctgcagcagacgctaccagtagaccacgggctgaccactggccttgttacagttggatacatgctgcaaatcagagtgaccattttacacgccagacagacacgggatctgcagacgtttatgggctaagactgctgcaaaatgccaacgcatgcccataacacgatgaggcaggtgagttgttattgcactaggttgtacgctgtctcacgtaatggcacgaatgagcaagagcagttctcggatttactgctactgcagtccctgcaagacaagccagaactctcgcttcagagttggctgtcgccatgattaaccactgcatgctgtaagaggactttccgaaatgatacacgcaggaagcctcgactcctcgccccgttcggagcactctgtgtcgagtctgattcaaacttgacaagctcttttgtccaatctcttctccatctggcaccttttcagcgcggccacgtctccctcgccactttttgacgcaggacaccaactgagcaacctttttcgctgaccacagatgaaaacaatccaaaacattgtgtgtgctctgcatggatccgatagatatgggcatgcgttaaaaaatggtttgccttgagaaactgttgtctgattgccaaccctcacgatgcaacagtctcggcctccactaggaggtagaatacagaattaaacggtggtcgacagcgtaaaacaaactttaagatactgacagtctaccaaagaaacgctgttcacttgagtcgccctcgcttctgaagaattcagcatactatcaccacatgctgatttcccgtggacagttctctccttcgaggcctacttcgccgagacttgtcatcgatgtcgcagcaaaatagactttctgttatctcgtgctgcggacctatcctcgaacctttcggcgggacctcaccagttcccttctttatccaaagactcaagaacagaagttactgttttatcaaaatcacagcgcgtaaaacacctcgttttcctcttgtaagcgaatcgtgtgactcaacacattcagcgaagtctcggaagacgagagtaacaccaaacacgacacgactcactggatacaagtaagatcaagaagttgagagcaatggcagcccgcctcttacgtaagggaatctctggtacctcgcgagtgcctacggccgttgcccctccgcggggcagcggttgttgcccgccaataaaggagactgcagtttcaaggcggcatcgaaggtgagttgcgagtagaccattggatgtgaagactttttttgatattcgctcatccttaatcgttctttttcaatgttttattgggcatagcgtcgaacagggagcatctggcacagcatccttgcctaggtgtttctgagagtcgaaaccaccgcgtacgggtccacccggcgctcccgttgcccggggccagctttctcatccgagtcattgccgcgaaattttagcgcggctgatattccccgccgtagggacctgacaatccctgtgtatcaacactctctgcgcttattgtgaagttgtcccgctacgcagggtcgtttggctgggaggcctgctgccgacgaacagcgggccgtaacatgtttctattgcctagcacagccctgcgcgaagggaaaatcgtcgctgctccttcagccacttgctgttggaataggatgtgtgcgtgttcccgatccttcctctctttctatcatgtcgcacgtattggtggctctaccgtcctgcggagacccaaaaccttgatctgcgtatcggggctcgagtgttccatttagtgtgggcggtttccatctcctgcgcatgcgtcaagtggggaggtttgaacaaacccaggacttcaccggaagtcctttcctcccgtagaaaggtacccgaatatccccccggaaggcagactgctgaaggcagctgcttcagaccacgatttcggcacca

SEQ ID NO: 557 - DNA, 1884 bp, Toxoplasma gondii
  source 1..1884: mol_type = genomic DNA
ctctgtcctctgccatcttccagtttctctttccttcgcttctctgcctccccggaaagccggctccgtagctctcacgtacgaccgccaaaagtccgcggcggctgccagcgcgaaagacgaagaagaggcagagagagaagaagaagacgaagaagaagaagcagagagagaagaagcagagagagaggaagcagagagagaagaagaggtcctgtggagtttgaggtttgagagggggacctgcgtgtggggtctcacgcgagactgcggtttcggcgagcaaggctgcagcggcattgcggaggtaggggaaaggcttctcacggagtttgcgccttgtacagcttgtatgaaaaaatacttccgggtggagacttgaaacgcgtttatccatacagctgctgcagctcttggcgcgacatgtggatccgcaagcagaaacgtctgcgccgaaaaacagacgatgcacccatttgctaccttctacagctactgcatatatacatatatctctagatagatagtcatgtatatagatgtatatgtatacatagtcatctatggatttgtgcatgtacacaaaacacccagaaatctgtgtccctcttcatacgtacacttgagcatccatggtacgcaaatatacaattatatacatatacatatatatatatatatatacatatatatatatatatatatttgtatatatttgtatatatttgtatatatatgcatacacatgcgagatttgtctccctttgcacgcatatctaaatatataaataaatcgataaatgtgtaagtaaatcgatttccgcatccgcgcacagaagggtgtgtgcatggagctgctcagtcacagaggagggagggcaggcgccctggagagagagggaagttttgtcgtcgagaagaatgctgcatctgtctaggtgggcagaacaaacgtcgctctgaaagagagggaagccgctctgttctctgagcctgccttctggaaacgcgtagctcagtctgttcgtgaaacgtcaaggctgcagtggaagggcagatcgagcggaaaaagagagaaaaaggaaagaaacggagaggaaacgaagggcactggcgctcggagtcttcaccctcttgaccatcgccttcttgcgcgagtctcttcgttgaagagacgaaaaatggagaaaagacacgaaaatctgcgttttctgcttcttcttttcgcaggaaaaaatctcggccggtggcttctagcgccagctgccccccccccccccgcgtaggttcggagagacggcgaaggcgggagaagacgagaaaggaggaaaagagaggggagaaagaaaaataaaaggtcattaataaatacacgagaacagagagagatgcatgactcacaaacagcgctcgaaaacgaaagcgggtgtcttacgtgagcgcttttttggaagacaccgaggcaccggcgaaaagcggactttggcgtcttctacacttttccttgcatttgaagttttcctttcgaatcaattcttttgcttccttcttcgcttctgatgaaacaaagaaagccgttcctcgtcgcctatctccatattcgcttccgccgatcgtcgtcgtcctccttcgctcctcttctgcccgctgctgccattctcttcttctctttttctcccatagtctttcttcttttgtagtctccctcattctctttcttctctcctaatttctctgcttacctctctcctcccttctttcttgtcctcccgtattccttcgttttctctccggatctctctcttgttctctcctcttttctctctttggaggaatcactcgccttcttcgttcctctaccttctccctaagagagcgacaaaa

SEQ ID NO: 558 - DNA, 4838 bp, Toxoplasma gondii
  source 1..4838: mol_type = genomic DNA
ctgctcacattgcaaaagatattagaagggagaaatgggtacggcattacgccggccattaacgggggtcagaaatacgttgggtctacctctagttgcgctatcccatttgacagaacgctgagaaccttgaataaaggccactcttcagcaatttccggaagatcccgggtcagttcacggagactggtacactctagaccgcgcaatttgcaataatcatgagtctgcttgtcgatcaacaccactgcatcctccatggcttcattcaggggcatgcccgcgtcgacgaacttcttcaaggcgatgaacagctgattcgtcgcattctcattcacagacccaacaccaaatgcaccaccactgctgggctgtgaatacccatattcagccaacggtcgagtgggcgggatagacccagagccttgctgtggcggttcctgtaggtgggtcaagtgtggcgctatagcaccgagcattgaacagtggatatcggagaaccacttctggtggtcttcgtttgcgtggtgaagcagcgacataatatgtgtcttgtccgaagacgctcgtcctgtctcgagcgtagcctgagagtaccgcggcataccgctgagcaaatatggtaaagcggcaagtaagcatggaggctgctccactggcaatgtcccaccggggaggcggctctgaatgtttcgatacagtgtggtcaggtggccggggacgagagagtcagagagtgtattggggccagtattttcgtcgcccgtagggccactgcggtaaatatgagagggactcatactttggggcaatatcaaaaaactgccctccctgcgtactccggtccatggcattttgccttctccgagaggatgacgagccagcacgggcagcatcgtggattgcagttcattgctccatgtggtttcttgaagcgagacaggattggaaggcacatacgctgaccaaacatggtccgaaaaagcaaaccccgggtgcacatcgcgagatgccctcatggatgatgctgtgcatgtggcgaacgagctcgagaccattaaaacgatgagcacgatattcagccagaccgctggtgtagatgtccttgcccgtgtacgatgttcggaatccgcaggtgtcattttgcggacaccacctctgaatgaagagtgggagacggcaagcttgcaaggctggatgcggtttagaagtcatttactgagccatggtgtgaataaccgatggactgcagttcatagtctgcaggtgtgccagtcagtcaaaacaaaaagcccgagctgcggaggccggatacgttcatctcagtagactttacgcccactgttttcccctgacagatactgtacaaagaaagaatggtgatatttatgtgattgaaatgacgactgaccacaaattacaagcaacaggctcaacggtctggcgcagcaggggcacacacagctccgcaggtgaccacgaaaagaaccgttaaaatggtgccactggtgactcacggtggtcttacgattttcttataacagctgtacaattccctccaaataacgtgcaacagggcagcagagacaaaggaaacttcgtcgtcacgaacatgaacatgtggaaacaaaggaacacaaatgccgggtgcactgcagcaggttcctgtcgagtgatccaggatactggctagcggcggcggccggccccaaacgtccagctcgcactgtttacggggtaggatgggcaaaactcgggagctctagcgttagtaaggaagaagtcacattatctgttaagcgcgcgcagagctgacctccacctcctcatctgtgaacacagtggaaaaagaacaagtcagggatagcggtaatcggcttgcagagacatatcgcctgtgactctgtaaagcagtgaacacacagtcacctcattcgcgcagtgtccaacgatggccaccttacataaatcgacgctccccccccgacagccgttgcgggcagactgttgctgagacgtccgtgcggtcaatttgattgctctcgggtatgacttgacgagaaccagccacaggactcgaatttcaactctcagatgcatggcgacctgaggctttcctgttgcagttttttacttttttgtgtccccgttgacttaccaagctgccaaaagtcatgaagagattgttttagttcaaaaatcagtttgtcgcgcgacatcgtcgcgatgaactagaatcctgccctactcatcatctggcaccacatttgaatcagatcatgatccttccactgcgtggagaaatgtgacgtggtgaggtagctgccagtaagttcggtaagcttcatcgttcttcgacgcagatgtatgctaactcttcggaaacacatatcatgccaaccctgcgttacgtcagtgttttctccatcaggaagtctttttgcctctggctaatcctaaccgacacctcagcagcgcgcacaacacatccctgagaaggtcgtgcgtgtcccgacgctgctcggagtccgtcccgtttgtttctggtgcacactgtgttgtgcctgaggggttgactgcctcactgcagaacaacacacctttttccaggtctaaatatcttcaagttgaccagttccgcttcgcgggccctcgtgtgtgtccatcatgagcggctgccagcaaaacgactggcagcgaaggaagtacattcttggtgcacacggtctctctcattgtcgctcatggaagcaagacttcgtggacagccgcgtgctgaagcccagcgtcgtcggagagaaatgtgatcgagattgggttcgcgttctcgtactccagccagtagatatcaagacgaaatttgtgcaagttccggtggtgaagaaagttgacagattcgttcctaaagtcacctacgaagagaaactcgtcgaagtcccacggctgatccataagacagtagagaagttcgtcgaaaagccatatatcaagtatgtcgacaagtatgaagaggttccagaaactcggtacatgtataagtacgtaccgaaagaggttattcacgaacgagtttcgtacaagcgaaaaccagtgacatttgacaaggtgacgtataaggagatgcctcagataaagtacgtcgatagatatgtggatgtacccatgtttgaagaagtggttcgttatgagccggcaccgcatatcccgcctcttcaccaggacgacgtcagtgaatcaaccattcaggaacacagtcctggcactcgtcaaattcctactgatgaccaataccgcgtcaggtgatggaggcatgctggaatcagcaaggaatgcttccgagaagagcgtgtcgtccagcgagttcaccagtcagtacagtagggaactgcggatcgtgccgtgctgctgacactcatggtccgaaacttatgaacactactttaactgtacataatgttggtcgtgttggatatgctgcagcgaatcccgattccagtctacattggagaaatccacatgcaagatgcgctgcggctgctgcgcggcgctgcatccaacgtagtgagtgttcgtgcatgtaaagtgacaagaaggccactccctgtctgtaaagcatgagctactgaatgtagtcacccacgcgagcgttgtttctccatcactttattgcagtatgttccgaattcagccagagtgaacccggggtcggagcactccttattcttcgaacctgttttgtcgcgagccggacataacaagaaagtcgcctgctgtgcctggttagagggttaagtagaccccgcagaataaactactagtttgtcagtgtgtcacttttctcatgaacgggacggagtgtacatcattcgcaccacttgctgctcttcagcgactacgtgaagaggctgttgtgcgtttcactaagccatcagcgtaggacgtattgtcatctgagcatttcagagaggaagggaccacagctgcacagtctttttacgcgcatgtatttttaccatcaatcgttaactgagcgatgggtgcgccacgacagcgttatggtcgtgtagttgccaccagcctggccacacactgcatgaaggtgtagcatgttaggccgctttgcagcattgtttgaggcgtcggtcgacccaggcatgcatggcacccgccggcatcattagcgccgttagtacgagaccctgctgcgtcttgaagttcaaggccatcgtctctttcgatattcgatccagcatgacacacggagcacttactcaagaagcaccaactgtgccgaaagcaagtatcgttgaggaacttcccctgtgagtagagaagatcccggtttacagtgggatttgtcagcgaggagccgtgtgcctaccagcagagccgtaccttagagcaacgatctgttgcggtcgttccgcacacactgatggttgcctttttgattcaagagttattcccgtttgtcgttgttcagacccaagagatgcacaccatccttctcttcctcaggcagatagtgtgagccgtaaaaagcaaaagaaatctctcacgggcaccgatggatgcattgggcacgctacgagtgcgcgacagtgcgctcgaatttaagccggtcccccagtacaacatgcccgtcgccagctactcttcgtcggcgcatgtaaaatctcgcgtcgccgacgcttttcgtgcgacctgtatgtcttctctgtggcaaagaggcttctttggcaacattccactgtgtcgtacccgcagatctttcgtagttaggttccagatttctctgcccgctctcttctcacttcttctgtcgatttagaacagaa

SEQ ID NO: 559 - DNA, 3727 bp, Toxoplasma gondii
  source 1..3727: mol_type = genomic DNA
cgtctaaaacatctcgcacccgcttcgacgacacagtcgcaatcttccattctttctgctgacggagtcacctagtagattgtcttcactcctgttgcttggtggatgatggcattcttcttaaattcacgaaaggaccgacttcgagcagaagcagaggtggattgtgtgggctcaccgaaccacgtacactcttctacgtacacctgccagtggcggtgatgatcgacgcgacattctctttctaaactcgggaagcaaagattctcacacggacgcggggcttccgcttccgacggtgccgacctgtggcacgagcagcactttgtgtgtgggtccgacagcggaaattccagattttctcgcgtatcttttgcaacacgacagtagcgctcctcactgctgtctagccacttgcagtttgcagcgacctctttctttttttttattgtgtttcgactccagaaagctgagagagaaaagtcgcacacgcccgacttaacaggatctcgtcctccggtcgtgctgcctgctggcggcaactgtgaagaaagacgcatgaaagagagcctctagtggaaagcaatttctgaaaagtgtgactttctgtggtagcccgacgaaaagtagaactcacccgtttttcgccttccctttgaggttcgttattcagatctccgttgctgtccatctcgacatttcacgcccatatcttcctctccaaaatagccaaaaaaacaaggacaccccaaacaaaaaacaaacgaaaacatctctctgttcaccaggatacgacacctgtgtggatgcacacatcctttgccacccatttgccccggccgcatttagttgcacgtatatacatatatatatatatatatatatgcatacttatcgattcatacaaatatctatttgtatatttatatctctgtatggatatggttttttacacggtggaccattacgagcaagggaaggagagcgaatacactacaataccagtctgtgtgtcgaagcacggtgttcctgctcttgttcgcacctgacttccctggccatttccagctgttaagtcactttgtgagacacgcctaccgagaggtccgaagaatgtatcaaagtgtggactatacaagaaaatgctcttaaaggaaaggcacagaaaatggttcttttttgtaaagggacagaactggggatcccctgcaataagtgaaaggttgcgagagcgtcgcaacttggaaaagggcacatcgttttgattcgtggccagtactgctctggtttcagagcttttccttgtgttgacttcctgctctttgcttccttttctaataagtaacgctctagtacattcactctcgtgatagcaagggtctgtgaaagatctcgtcgctctcccctgtttttccattgaacgagaaactggcagaccgacgcgactcttacgcgcttgttgagagacacagaacatgagacgcgattcttgtaaggaagccaattcgcgggcagtccaatcgtgttttcgagtctggtggaaacttcgctccagagaaataccctgaagaaggtggggagatcttcagcaaatgcggtcagaagcgcagcccacggacagatgccgagatccgcagtcagtcgagaagacggttcaagttgtgtctcgcggagtgcgccatttcgacagagagaaacaagaatggccttgcctgtgtactttctgtcgtgaaaaaccttcatccagttgcttgtcaggcaggccaggcccacacgaatccgaaccgtttatatccgtgcagtaaacgaagacgtcgtgtgctatttccctccagtagataaacagaagcacgacatcctaatggccgtctgcccaactgttcaccagaaactcaacaaagcaaaagaagaccacctcacgactctttcttgctggacaagccccgattttcacgacttctatgtcattttagtttctagaagcacttcagtgcagatttccttttcaatttccttcgttatacctttttcgcaacgttcgctcgaaagttccgagccaggagtgccacagaccagttagacagaaaacgcgcagccttttcctctttggctcgcgacggcaaatctctcaactttctgcaccatccgcagccccgaaatcgctttttctaggccgttcgccatcaatgacttctttcaacgtgtggaaaagccagtgccggtaagtctgtttgtttttgtgacccacgcacgcgcgcggattgtgtcttcgcagacgaaagccgtgctgcagaggccatctcgtgtctccataacgctctatcgactggcttgtccgtctctttgtcgctcctattctttttcctctcttcgcgaagcttccttagccatttttcgccgaattttttctcatttctgtcctcaaaattccgtcattgcctcgccccagccccgagagttctgagtcgagcatgcaagccgctagctcatctgtgagtgaagagcttggcactggctgtctgggcttttgaggaactcttccggccctcgcgtcttctctttcgtgtcgatcctgtggattcttttcgctttttcgctctccttttgttgtcttctgcacagaacgcggcgctagcatcctgtcgagcgcgcgagaacatgcgcggggtcactcttcctcctttgactcactccacacaggaaaatagacgttaaaaatactacacaagtttgatgggaagtgccgtacgacccagagttcttttcgtcccgtggaaacgatgaaactgtcgtttttccgcgtttgttcacgacactcgcagcatacccctctcacggaggctggacgacacccttgaaggtgactcaacttttacgaagtgtctaaaatgccctgcttctttgtcgtttcacgcgcaattgagtcgagcccaactgcgagtgctttctctctgaaggatctgccgctaagaacagagactgcaattgtcgccgactttcctttgctctttgtccagcggctctgtgcgaacacagtgaaagtctcgcatcatggtctgaaactcgactgaagaccgtttctcgtgaaaacctttcatcatgtggcttctgtgtgcaccactagaactcgttcctcctcttcctcgagctcacgttccttgtgaaaggccgagagatctccgcgtttacgccgtctgcgtcgctttgtatcgttcgtgtctcgccctcgaaactcgcaccgccgcctttcgcctttgaagagacatggacggaagacagcgtttcccccgtctttgcatgtcctattcaggagagacctctgctttctgtttgtttcctgccacacactcccccatcctgtgctggccttaggcagatctgggtccccaggcgatttcgccgttcaactgactgctcgtttcgattagggtgtccgtatttcctcagcagaactgctcttttgtttcttcctctggttgggcaaggtccaccggcctagagcgagaccctctttgtctcttttttgcggtgtcttctttcggctttccccagctatccttctctgcttcggatgctctttgccttctcaaccgcgcggggcctcgacctcctcctttttttcctcgcatctctgtctcgtcttctgtgcctccacctgctcctcctcctccatctgcccttgttctcctcttcgctctcattcatttcggcgtctctctctccgcga

SEQ ID NO: 560 - DNA, 2863 bp, Toxoplasma gondii
  source 1..2863: mol_type = genomic DNA
gaaaactcatctccttcagctttccttcccttcacgcgtctatgcaacagcgaaacggtgagcgcgacgaaagaggcgagagagagagagagactgtttcggcttcgtcgtccccccaaagatctgcgcatgcactggcacccgtcacaacggcttcgagtgccgtcttaacgaggtacatctctaccgaaaccgggagaagcgcgcccacatcggctgcatctttcaccattcttctctcgttaacgtgtctggcttctatcgaaatcaaactctcgtttgcccccctccctccccctcttctgctgtgaacgggtcgttgacgcaccgaagaagagccgcacggcttcgggcgcgagttgggctccagtccgtgcaggagacactggagctggagttgcggtgggggacggcggggcgccgtcgcttgctccaggcacctcacgcgcagtcgcgttctctgaagcttcgaaaatttgaagactcaaattgggattgtggtaccgaataccaggaaggaagaaagtgcagaaatctctgcgagaaaaaagagaaccaacaaaggctccaacgtagctgttcttcaccgctccccacaaaaggtggatctggcagttacggcgaaaacagatggacataaaaaagcgccttgtcacagtctctacaggaacagccgacggacttgtacacactgtgttacatccttacatacagatatgaatatatataagcatgtgagcatacacacttacacaaacgaagagggctgtgggcctctgcattacaaataccgaatagatagacatacacacccggatatatatttatatagacaacaagcgaaatacacaaccgtcctgcaaggtgtaactggacaactctgcatacacccccgacaggtgagcgaacaccgcttacacgttcgctgctgtctagattgagagaaacaggaagcatggaagacaacaagtacgcaaacgagtacgttctatcgcatgtatatcgcgtggacgcagttgcatacacatctccctttctcccgaccagtaggtacaggagtatatgcgtatgtcaatatatttatacatgtacatatacatacatatatatatatatagagagagagagttaggcagagaaagattgatgtcgatgtgcagcggattttacgggggtccacgaacgttgggagtgtacagaaaagacccgacacctggtcgatggtggattcttcagtgaagtgagagtacgtcttacttgacgagtgcgttttccttgagaggcttgcaaagaaaaaactcgacagctttgatgttttggaaggtgctccccgcgcccaggacgaggcgctccagtcgtcgcgccgacattctctccccaattcagcttcttctactctttgcaacttccggtctccgcatcgatccttcgtccttcgccgtcagcgttctcccctttgcgttgttctgtcctacactctctttctgcacttgttctgcctctgtctccccacttgttctcctcgttctctctctctttctgctcgctctgtcccctcgcgttctccgctggctctctgtcttgctttttctccgccctctcctcctctctcctgttttcctagagggtccgtcgtgtctcccttttaggagctgtctcaatccagcgcctgtctcgctgtgcattcacctgccttcgtcggtcggagcgaggcgtctccttttcacgcggatctgcgcctgcgaagaggactgcccatcgtccccttctgtgttctgcgaagcgcgacggagaagagagaggatcgccgacgcatgcaggagctcgaacggtgtttctttgcaaaaaccttctttttgtcaacagggaacgctctctacagcgatacctctgcaggcgccgacggttgcgcgggagcgctcgtccggcacttgtccttggcaggaagactttttggaaccctcctgtgttgttcagacgatcgcgtcgaccgagagaagtaaactgtgcaaattgttcagaggcgagtcgcctctctggcggaaccttcggtgccgttttgtgtcgcagtgcgacagcgcaacgcccactcctcctgtgcaacggtgtttttgtttgcatgcacccgttgtcttctcgccccgacttcattcgccgctggctgacagacttccccgaaagctctcctcaaccagcgtcggttttcgccggctcccgggtgtctgtacactgcagaagcacgccagaggacctcccgttccaccagtttctttcgtctctgaatgttgcgaaagcgttgcacacttctccagcttcccttgtccttttgacttttccgacttttggcttccccagggcgcagctctgcggtccggtgtccacacacctcaccgggtgccaaaggacttcgccggcgaaacgcggatgtcccgagaatcctttgtcgaaccttgacttcctcttcttccgcagcgacggccccccggacgcggtctctgcgcgaccttcaccctccttgcctccgttctgtctctccggagcgccttcctctttgctgaattttctcgtcgctcttcgactcggaaaaaaccaaccctacgtgcagagcgctttcacgcgcgcttggcacctccacagtttggggaaagcagtcctggctgtatctcgccctccccagtcgcaaacagccggtctttcaactcacacaaaggcttcttctctcctcgcctttcttctctctttctccttcctcgccgcggtgagagctgtccgccaagtgccgagagctttccgaaagaacgggacctcgaggagaaccgaacttccttttcttctgatcagactgaaaaacggttcgacgcca

SEQ ID NO: 561 - DNA, 2002 bp, Toxoplasma gondii
  source 1..2002: mol_type = genomic DNA
aagaagggaggaggtacacgtcaaccttccaagccaggagtcctcgatggagaggggatgatgtaggtactaacggatcgccggctttagacaacattcctctcctcatcccctcatgcgctaaaaaaggtcaccaaagtaacgctgatgcgtcggtttctgaaaacgtattacgccaacggtcggaatgaagcaagcatgcatacaccaggagtcgtggcgacgacagatcggcctagaagattcgtctgcccgtgaatgggctagggacgccggcgagggagaactggctatgcattctacttcgcagctctttgcagagaagctccggaacaccaatctcgaacaggaggcaagaaaaattccatacactccccctgcaaggctcgcctctgcgaaggcgctcgcgacacagctaccacccttctggcgcgtttcagcgcgacaagggcgaagcctggcggggtgtagacgccgcggcaagtgtatgtacactacagcaggtgaggcatgtacgcactgcttggacttccagcctcgcggtcacgcagatggagtctcgggcctcaccactgagcaagaacggcggcgaccgcccgcctgaagacttcgtccttgtctagaacagtcatcgtgccgaagttgttgggaagaagtggaaaaaaacgaaaggcgagggcggaaagaggcgacgaagacaagaagattcagacgagtcgaagtcgagagtccgggtgtttcttcgatgaaatggatcactccgcgaaaaaaggcagtgacttcgacaccttccctagcgccagcgggtgtctccgccaccaatcagaagtattagcggttctgcggtgtacatacacctccaggaccgccggcgctgcccgcgggatccgcggtcttggttggaaaggcggctgggcgcggagaaaaacgcccaggaagtcggagaattgagggcggcgtccgacggagaaggtcgcgaactggaaaagagaggacatgcggcccagcgcctgagaaactcgctcgaactcgaactcggttcctgtggggacctcaaaggtccccaagggcgcggcttgaggcgtatttacagcaaagcgagtgcctgtgagagggtatccgcgagacacgccaacgcggaggtttggcaggacgggcaacctcgttttccgctcgacccttgcttttttcttttcgagctcaggccagtcgaccgcagccgcgagaaaccttcagatgcatttcttgactggcagaaaagcgcatcaagtcacagcgcagcgagcgcagcgcgaacgtggagaggcggtcaagctgcatgcgcagagtgagacgaagtatagtccgattttcgaagaggcctgctgttttgccaggcaagtccccctccgcggctggaacgccggtagccagtctttttcttttcgcactcggcgcgtagacttctctaattgcgtgatacaaagtgcaccgcagtgtgtacactcggtcctcgttttcccctgactttctgcagcgccttttgatttctggtttcggcgcttccttgtcttgccggcgccgacactgtcgcctctttttcatgtctttttcgccgtgccacttccctctcccgtcttctacggtctctccactccgttttcgactggtcgcgaaaagaacgcaacggcgcgtttgctttgtcttctgttctcagagaccgacgactgccgcccgcagctcgcaaccgtgtctatcctgtgcgttttcttcctcttttcctctcctttccgcctttttctctttgctttctctgtttttcacttcggtccaccctccgtttgcgtcttctcttccgtctctctctttccctccgccgtcgccgccaagtatctgcccaggttcctctctcggctcaccgcctgtctcttgtctggcggctccgcaaattttctgtgaaaacctttgtttttgttcgtagctcctgttcctcttttgctctctccttttccatttttcttta

SEQ ID NO: 562 - DNA, 4286 bp, Toxoplasma gondii
  source 1..4286: mol_type = genomic DNA
gtatggcggcgcttcgccttctcactccagttgtaggttctcttcttagcgttggggtatcctgaaaagacgaagaaaaaagccagatttcacaccattcattgcctgtcgcctctcgaaacttcccaatgaaaagaaacggcaggcgcggccttcggggccgcagcagcgaaaacacaaacgtctgggaaaaagggagtggcgcccccctccttttagttctccaagtggcgacgcaaagattgtgaaaagatatttcttgagtgagaaagcgacagagaacacgatacgcgaacagagcatcacacggagcttaagaatcgtggtgcccagcgtatacttgaagcgcccagttgtgtatgcgcaagctgtacatacgggtcaaagacagcactttgacagtcttgttccttgaacgacaaaaggcgtcagactggagacaacggataaatctacatcccaaagcacaaataaaccgcagtgtctctcccaacaggattccgacaccgcccttcttccccttctccgtcaacgccatcccttctcacacctgacgcccagggaagttcacaaggagcgaaatggcgaaagaccctgttgagagcatttttacgcgtacggatgaaaacgagggggagagaaaacaaagggtgaagtaggagaaactccatttgcagaggagatagcagtgtacgccaggtagacacactagaggtggaaagctcagacaagcagagggagtggcgatgggctgacgtccacctcaaagatgtccacaattgagagaaataagtgcgaggtcacagagaagagaggcgagagacgaaaagagactctttgagcagagcatgcagaccagcgacgttcctggagaaaagcggcggtggccgagcggcgtcggccgacctaggtcaaggtgcgtggaaggtgtggcaatttcccctcgactgaaaaaggcgtttctggttcctcccaactcaagaatcgttctctttgctcagtcccggcggtcttccaggtgaagtggacgctccccacacagcaggcagcactgggaagtttaggcggctttgcttctttatcgactgcagtctggtgcgacacgggcagccggagaagaggtcacaactgtcgcgaatggctcttcactctggacagacgacagaacgactcgttcttttgagaaaacactcaccgcaagcgccgcaggtcttcttctgggtgtggtacgcacggcgaccacaccgaatgcacaggaagtgggtcttcccatgcctcttcccgaaggacccagttccttttcctgctttccccattttccttgacagcgatacttcacgcgggaaagagaaaagaaagtcgaaaaggaagaaaaaaataagacgccttgcgtcgaaacggcaaacggctgcggcaccccttctccattcgacccttcacatataagcgtgcgaacatcgccggtctctgtgtcatagcacagtcgcagaggggttcaagcatgttgcggaggggcggtctatatccggaaacggtttttctcccacagtcacccgcgtttcgtttctgcccgcttttcccggcagagtgtgcagcgtctggcaaagtttcccggagatctaaaccggaaaacacgcgagtcgtctaatcgccgccaacacagccacatccggcgcgagacactttgctgctagtcgagagaaaacgtgcaagagcggggaaagtcgggaaagagttgaaactcagtaaagcctcccatctcggggagaggttaggtactttcactgccggtcctgttaccgcgggaagaacggcgttcgatgaaatcacacaaagcagcgagcctggcaaagaagacaacgcgccaaacgcaactcttcagagagtgacgcacgcagagagtgctgtagagcagccacactaacgagtcccgggaaagccaatccttcagaattgcttgctttcctgacagacccggaagcggcgggacgagctgtctggttggctactttcttttcaaatgctttccactcctgcctagcatcgaggggggagctctcaaaagtcacatgaatgcatgaaatcgtcataagcggtccagtgaggtggtggtgtacagcaatcataaagaactcggttgcctgtaactcataactggagtcgtattcagtatcctaggtactataatgtctgtttattcggtttgacgatagaacgggttgagagctcgtgtcctttcatacacggatcgaacagcattcatatctggcacaactcgtcgtggatggcgttcgcagttagagctacgttgagattcctcaacagaagcaggctgcattaccgctgtgttttctgtggtgacagaattgcgcactcgagcggtgtgagtcctttcacgggagcctgagggttggctggtgtcggcaagcccgcctgaagtcaggcaaacttcctgagaatctcactaccaagaaggaagcagtgtgactgcacatggacgagggaaacgaaggagccttcttagagcgaggtgatgctgccccgggcaagcgatctacgttcccctgtgccttgacggctatcggttattcagtgtttttctccatgcagactgaatttcatcgacggtcattgcatgcagggagccagagggcgttgagtgaagggatctagggttctaaaacaaaaaatcgcgggaaaaaaactgcaaacggcagtggttacacatttgaacagagggtccaccacctaggatctcgcaaccacatttcttctatagagcttacacagacacatgcgagcacacgactccgcgcgaacctgcatgacagtaatcaaaacggatgacagtttgtgatttgcttgctttgttgtcgtggagctcagagggttgaaggcgccggaactggcagcctaaaatagaagaagcgtggctcaaagtcccgtgcgaggcacctgcaaatcctctgtcacggttagactttacggcgaagccgtcacaccttgaaaccgagttaccgttttcttaccgcagtttcgataacctatccgagtgacagaactacaagagcgagtggcatgaacttctcagcaagggcaccacgcaatccctagttatgatggtagactgctggcggataccagaaagattcgagagggcagagttctttcagaggcattgtctgagcgcggttcctctcacaagagagacgcacaaccataagacaagcaggtggagttttgcgaacgttttctgattgatcctgctgcatactgagatcctaaggaagttttcgctggcagttgtggagcagccattcacaacagaacgttgtctccccattgaattctacggaagagttgcagaccaataagttcgctgaaaaaagttgcagcttctgagaggaagggcggtgctggcgtaactagtgcatctggcaagacgtgtcaatccacttccctacctgaagccgcaactctcaacaccactgcactgactgtgcccgcgtctgaggagctgtttctcgattctactacgagcgaacacaggagtccatgcatgacgcccacctttacagaatgcagagactctgtcattgtgagtcgtttaggatcacgagacactaacatcagggcggtggcaaaggcgaacgcacgtggaattgcgtgctgggcagcggcttccaccgacggcggcaaaagagtacgagggttttgcgcgacacagacggggtggtctgaacaagtgcgcaaagagaggaaggaaaaagatgctttaaaaactaaagatggttgggtttggtgaagaaaccgaaggaacgcaaaaacagcagcggcgctgcggcgcgtagtgaaactcaaggcgtgcaagacaccgacagccgcgaggtgaaagtacacataataaaccgaacggcccactttcgaaatagcgtgggcgacacctatcctataaatggtcttttgtactttcccccgttttctcacagggtaatcccccttttttcttctgcaagctagcttttttcatcgaagcgccctgtctccgcttttgtctcgtctctctggctcaacccagggacatcgatgggattcaatagagaaatgtcgatacttacttctgtcttcttggagtcgtgagtttccctttttctttcggacgaaacgggcaaaagactccccgttcgaagagtgtatcgggaaggcggccaaggctgcgtgtgtgttctcttcgccgtttagtgagcatcttttccgcaggttgcattcctttccctcgaggctca

SEQ ID NO: 563 - DNA, 2156 bp, Toxoplasma gondii
  source 1..2156: mol_type = genomic DNA
gttttcccaagaaatagcgcgatctccaacgtacgcagtgagctaaaaagatgcccatctgtgcatctacgttgatactcggttatatatattagacgctaacttcccggctaaacatcccttttctttgaaacacacttcccttctcgccgttagtgtgatctgaaagtatcagaagccctgccgaggcatcagcggcaccctgtggcgttccgtcattctggcttcactgtaagcaacgtcgcaggcacgaaacgcgtccgtctggggagatttttccgagactcttgtcttcaagtctcgaacttacacactttgtggtaacctgtcctctcggctgtaacctgttcatgggcgtgcggtttccgacgcctgcggaacgtggacacggtaaaacacaacaacgctccaaagtgtttcccgttcgagcgacgaaaatgcccacgagtggcggttgaaaactagactgacgagaggatttagccacagtgggccggcgcgacaaggtgactctccactttctgaagggattgaacggtgtgtagacacggctgtgttacagctttatcacgacgcattgcggctgaggagctacaaattggcgtacattctccgcggccaacgcggtgattgaagggacaaggcagcgatgctcatcgctcagtctctctacagaaaagacacgtgaacacctagcaacctcctttctcgcatgagtagcaaggagtccgggatcagtgcagaggcgccacaccaacaaggatccagggattccgtgcagacgaccaccatcaatgagcctaatgaaatccttcaagtggagatgtgcgtgactccagctgcctcctgcaagttgcatacactatgaataagtgaaaaggatcagtccgtccgatttatcatgcaagatgcattctgcggtgtctcttgtttccgactacgtcatgctgagaatgtttttttatgtcagttctcgattcttgctgacagcgcccatcgtgtgacaagtcgcgttcctcctcaagcaccatggaacatcttttcctcgtcattggcgtcccatgtctctgcctattcaatttgagttatagcgagctgcactggtacaatggactacttcagcggcaggctctcggctggagaactgcaggtggttttccgtgtagcgtctagcctccacacaccctcatctgtggacagcgtttcgaaaagttcccgagaaaagaaaaccactttcaggagcgaggatgaggaagcgggttggagaccagaaaaaccgtgaaaaagaatctcgagtggaggaaaggaaatcgtcgccgcggcctcgaagaacagtggcagttcgactccacacttggagacggaaggcggcgcagggaagaactggcaaacgtcaaggaattcggacgggaacaagcggagacttcggtgacagcacgggtgaaaaaaaccaagacaagaggactgtcgtccaactcgcgaacccctggagctgcatgcgcggaaaacctgttcggtcccgctgggcacatgcaactttcttttgagatccttcctcgatttttcttctcgtctttcgcttcgacttgtcaactcttctctccttttttcgtgttgtaaaaatcctcccttctctgaccatccgtcgctcatgtgcggcgtcgcctcttcctccagctttcgtgcaagtgcgtgaaattcctccgtttcggggcgtttccttcctcaactgtgtgtctgtatttgcatcctgtcttctttccctcctcaatttttctctgcagatttccggattttcacgttccttctcttgtccgcgcttctgagtcggggccgcttgcacccttcgtggacaacttctgccaatgcagcctagtcctgtgcatgtttcttcagtctgctccgtttccctcctactcttctccttccatcgacatctgttctcatgcttccgacctgcagaagagtgaactccaagttcaccgagtgtcggtggagtatctcgtactccaccttcctcccctctcagcttcacactgtctccagttgacttccactcggcctgctctctgcggtcaaaactgtctttgcactccctcccttgctcactcttcaactctcacgctgctcttaatgcgagaccttgacagacagga

SEQ ID NO: 564 - DNA, 1618 bp, Toxoplasma gondii
  source 1..1618: mol_type = genomic DNA
atgcctgagcctttcttttacacaggaactcggaaaagcacattcagcttgcggcgttccgtggagtgtgcaacccacggggagacgaggctccttcacaacatgtcaaaggccgagacggcacaacacagaggaagcgctgtttcggcctctagctacagagctagcagcaggatgggacttgaggatggcgcatgctacagcatcttgattcgcattcttgtgtatgctgcaagggtctcaaggattgagtgcctggagttctagttcattaactacccgtgtcagtgttctcgcctctgtggtatctctttttttttcgttttgcgccgtgcggttctggatcggattaaagcacaaatcgacccacattcacattctgcgtactctcgcgtttcttcaggaaggtgaagaaatgtgctgcggaaactgaaggtacttcctagaacttgtgtcccgacgtcaggtgcagtgtaagcagttctttctaagaacctccgcctccactcactgtcgtcaatccaaccggtgacccttaaaatgaataaatcgattctctctctgtgtctcgagacgaaacgatggtttgttgacgccatcgcatgcgtcgattcacttccgaaaaagccacgtacgagggacatggttaaaccttgtacggtttgtccctacttgactcctcagtttaaacataactgtagtttatcgggactcaagtcagagacaacgtcacttggttccgtctctaatcttctcatcatcaccgtctttcagcccactagtgacgaccgcattgttgacgacacctctttctaatcatcgtttttccttttcgtcactctttccgccagttctcccttttcaccggtactgtccttccgcggcttcccgagctgccgtcgtcggcgttcacactcgaagctccttgagcgactttctgagcgtctaccaggatcgtttcccgtgttttttcttttttcgccgtcttccctgagggagaaaaataccgccttgcaagcgcacgcgaataccgatagagggttgagccgtccactggcgagtgattggcgcgcacgagacacctcaatccctagaacctcatatctctttatgtatatgctggataatttagtttgaaatactagtggaaagcaccgtgtgaagagccggatcccctttgcggcgactcggcgctgcaaggcctgtctcgctgttattttctcgctgcatgcatgcgcgcgggtttctccatctggcagctgcagcaaacactgtgcgtttttttgttgcatgcgcaaaaaaccgtttccatacaaacattgcttttcatgaaacccacccgctatctggcttacctgcatggggacagccaccggtttttttctgtctctcggaagctgttgctgctgctcttccgttcctgtctccctcgggggtatacaaatacctcggctgcgcgtgaccgcgcttagtgtcccgtcggtcctcgcgccgtttcgggtcgtttcctacatgttctgattccgcagcctttccacgcgttgacagaagatctgtccggtctaccctcttctcgcggccgtccccctccccgttttccccgttcctctcggccata

SEQ ID NO: 565 - DNA, 2419 bp, Toxoplasma gondii
  source 1..2419: mol_type = genomic DNA
cacaagacacatattggagagtgtgagtctgcgcagagaatcctctctgaccctgcatgtctctgtccagctcgcgcgtcgacccatgcctctgtgtgagcttctgcatacatctgcacgcatctgcatgcatctgcacgttggttcgtctaccgagctgggggcggctcttcgccgacgcccacttcgcgcaccgatgcagtggagatggaagacgtgcccgcacgcgccgaaggccgggggacaggcctcgccaggtctgtcgcatgcactgcagtgaacttcgaaggcgttgctgcagatgccacacttctcgtcgggaggcacccctgcccatctccagccgcccacgaagtggacgtgccggactcttacgcgactgtggggcgagagacttgcggcgcgcagcagcagcaagtcgttcgcggagccagccgggaactgtctcttgtccgctgcctctggagacgcagactccatcctgagaggcgacgttgcctcgcttcctcgaggccttcctttcctcgctcgtcagccgaatcgcttcagcgcgcgacgcgagcgagaagaacaggggaagaaacccgagcgagaagaacaggggacggaacgcgagagagaagatccggggagagaacgcgagagagaagatccggggagagagaaaagaaaacataacagaggggaagaagacgaagagaagggaagagcgtagaggaggaacagaggcgaggtagaagcgagtagaggaagaggagagtagagcaagaatagaaagacgattgtagagtccgtagggactttgggaaagtggcggtctggaggagacaagatgagagtggtggaagcatctgaacgaggagaaaacggcaagagaggccggcgccgagaagagagagagttgtggagaagattgagaaaaaagaacttctccctatggagtggtggcttataatatctatccggaaaaaaggaacgaaaaaatgactccagaaaaatgaattttcgctttctccggggaaaacactcagcacaagagtcaggaaagccgagcacgatacagaggccgttgatcttgatagccgactccccaagcgatatacacacatctacatggatatgaacgcaaacatgcatgcatatatatatatatatatatttatatatatatagatatagatatataccttcatgtatgcgagagggcacacgcgatacacacacttctctttcacacacttctgtagaatacattatggagacattgtctcttctcgagtcttgtcggaagcgagaaacggattggtgtgaagaaaatcgtgcgtctctggaaagcttttgtcgcgtcagagtggaggaaagatgacaaagggaacccgggcagtgaaattcagcaaactcgagagcatgcgtgagacacacgcacacatcgttcttctgtttcccctcttctcccttttcatcgcttctctgttattccttttacagggaaagggtgacttcttttgttctttctatttcctctctttcttcgcttcttcgaccgtagctacagattccagttccactctctgctagccgcgtccgccgtgtgctgtttttcgcacgcatgcgcgagaaaacgggccaggcgactctgccttgttccgggacctctttcttcctctctgagcacaaacttctgtttctctccgctgtgcggttgagtctgtcagtaacccgctttccggcatctctgcttgtgtcttgtctcgccgctcttgtttcctgaccatcccccggccagctgcgccgcatctgtccgcggttctcagaaagctgcgtctcgctgccttgtttccacgaaaacagtcaaagttcctaaagagggcgcgaggacccgccagggcggcgctatcgtgtgtgcacttttaccttgtctgtgtgtctcgcggacgaccagagattctcgcagttcttgtgcgccgagcttcttttggacagactcccaggcctgcacttctcagctcctgcaggtcattccaaacccaccgcgtgagaggtctctgttgaaacggagccaagcccagtcagacgaattgcgagaagacttcgtggaaacttgcacaaaagagcagcgcgcttccggccacaccgcgtgtctagacaccgcggcgggccggactgcagtcggccgctcacatcgctggcaagacgctgacacagtaacgtaaatttctggagcttctgttcttctctgaggagcctgtagcctctttctcgttttgtcgttctgggtcacgcctctcccgtttctgtttttgtgcctctccacatctcgagtggacttcccgtttcgctcgtgctctgtctgtcgacgcgcacgtccccccctgtcgactcggatgcctggttcgtgagcgccgcgtcagcgccttga

SEQ ID NO: 566 - DNA, 2379 bp, Toxoplasma gondii
  source 1..2379: mol_type = genomic DNA
tctttcttttcttctgatgtgtttgagtccttttgggctcgcagctccctcctcgcaaccatgtcggggtggcatgccttcgctttctgtctgtaggcgaggcggatgcactcctcgctgctgtcagcggggatgccgaggacctcgtacgggtcgaagtacaggcgctcgctcgcgtcttcatcgagatcctcatcggtttctgcgtctgcgttcccgccaatgtaggacgactttccatgcgccttggacgcggatccaccatgggggcaactctgccccgcgcctcctccaggctgcacttgcgcaccctcagtccccgctctgcttgtgcctcgggaggtcgatttgttcggccgacgctttcgaggttcgtcggacgcgaagaagagcgagacaaagtcttcggcgtcgaaggacggcctgccgtgaacgggagggatcttggcgcgttcgaggcctcgaatgtgtgaaacctcgcaggaggacggcggctgagaagcaatgtgacacacgccctttttcggaggaggcgaagaagccgacttccgcgcgcagttcgccgacgaattactcgaaccggacaaacattcgtcagctgtcgatcgacgggactcactggcagcttctgcgaaaagaaacgagtccacttcggcgttgcaagtgtcgcagagaggaagggagggcggtgaggtgagagagagaagtacgacggcaaaaaccgtgaagaaagtcgaggcgaatcgaaagaaaatagacgggaggaccgcactcggcgctcctgattgagagaaactctggaaagaggtggaggtaggtaggcgagacagctggtgagtaggcgacgggggcaaggcagaggaagttgagacagagggagagggacagggtgaagaaagacaagacttcgaagaagcaagaaaagaagaagagtcagaggacagacccgagggtcctccctcgcctgttctctgagcgactttcatcttgcccattcttcgttttttcggaaacccctcagaaaactttaaagccgacgcaggtgcgactcagtctcgctggacgatttgcgaagtgccatggacgtccagaagaacgactcgatgtacttgttagaattcacgtcagctcttatttaggtattttagggtcttcatattctttgcagtacgtcctgaaaaacgaagctgacacaccaggcctgcctgtaaagctacaaaaaacgcattgtgcgacacgactccaacctacatgcaccgtgtggcgactctccatccacgaggcgccatttccgcgttttaaggaatgctttgtggtatctattgcgaacaagtgagaaacggaacgaaaggaaaagtgcgtcgagggccggcacaatggcctagctctcgcagcgccgcaggcgctcgcgtcgtcggtccacgagttcgatatccgaggtagaaggatgcccgcgaaactctggatgcgtcttaaaacgccggacaagaaaatgtgtagaccgaatgccacgtgaagcattcgctgttaacgcccagacgcatgcaaaaaattgccagtcgcctacccgaccgaaaaaagtcctattcccctcaagcagacagtgcgcttaaaagttcgaactcgtctgaatcgcaggcattgctctgaaggttgccttgctgaaattcttccgcgattcccaccagagcacactacgaaaagacctagactcgtggacttgctctgcagctccagtgcaactcctgttaagagattgtgcgtctctagggcgcctcttgaggccgtctcgagcagcccccctcttcaaagcgtgtgcagatgatgtgcgtagattgctcaggggatatgttgtttgattgaagcaaagaagaaaaaggcgtctgttccctcatttagcgtgatctgtctgagtcgactgcggcggggacaacaccgctcgagtcttcctgcacgtgcgatcgcggacgcatgcttgcatcgatcgtcctcacttttgctcgatgcgtctctgtttccctgaaaacctcggttctttgtgtctcctctctcacgtctcgtctttttcgcgatcggttccctcccctcacggatcgtctgcagctcctcagtttctccctccctgtaagtgtttcccgcctgtccacgagtttctccgcgcgacagaaaaaacgcctcccgcagtcgtctcccatgtctattcggttggacctgaagcgtgaaacttggaaaaggaccacccagacatctacgcgaaaggagagaagtgagaaccgcctcgtcgaaggcgaggatggagaggcggcgcgccattcgtcggctgttccagtcccgctagcccctcgttccgcaacttcccgctgaagagaagtcccacga

SEQ ID NO: 567 - DNA, 3674 bp, Toxoplasma gondii
  source 1..3674: mol_type = genomic DNA
tctttcatgagttagttcaggtccctctcgctttttggacgtacgtggcttgccccatcgaaagaaaaggaccgcctttgtggggagggagaagtgagagatgtcgagtttcacactggcgtgctcggacgcagcgacttcccgttcagtttcttcttcgctggcctccgcggggtcctgtcgaatctgcggttctctgtgtcccgcgagagcgtcgaagacgcttccttcccccgtccgtttctcagctgcttgtttgttgcggcgattttccgtctctgcgtcacctgaagactccgaatccgttcgacttccacgctgacggtcgacgggcaggtgcacctgcatgctgccgacggcgacagagcgatgaggcatgtttatgtttctgacgaggatatccaggttgtcagacgaggcacctttccccttctccttctcggcttcgttctgagaaaacaaacgatctgacccgcgtccgcgaggcggggcaaagagagctccacatgcgtgctgcccctcaaggtgcgaggagaatggattgtgttcgcgcaacggagaaggtacagatgcaggtaaagtcccctgattgtggtcgttccatgttggcggcatgctcttcgcagaatctgaaggcggcaagcgacgctgcgtccccgcttcttggctgacagcggctgcaagacccgaggacagacgggcgtttgacggcgccgcgcgtccgggaggctgtctgtcattttctccctcggaaaaactaggagacagccgagtcgcgacatctgcgaatgtggatggagcgctttgtgcagaggaaagcgaagagaattcaggaccggcgccttggcgtcgttctccagcttcgcgagatatcggcgagctggcaggagctacggaagccgcagcatcgcccaagacgtttgcttctgacggagaaaccgagttggctgacggaaaagggagggcgggggaggtcgaggaaaacaaagagaaagggtcctcggagccgaaaaagtccagaggagtgggactaggacgttgccatgggaagccgccagtcgctgcccctgtccagaggagctggtacagcagatagcaagacgggacgaaacagcggaggggtccggcagccaggaaaaaagacaggcaagccaggaaacgcagacaatacgccatgcttcgacggcgaagaaaacgcgtcatcgttccggggatcgcggaaacatggatcaagcacgcggcacggggaaatgcaactgcatgacacagtcggtgctcctcgggaaggcacccgtcccccaaaagctgttttgcgttatcgaagaatcattgctgcctatggagagcgaaaaaactttgtggaccgccagctcaggtgtggcgaggttgaagaaaagcgacaagcagtggtaagttactcgcgcgtgatacacgtagcgttgctcaacggcacgaagttcgcgaagggaaaatctgggagctgctggggacagagagagaggggggctcggccgcacccacagatgaagaaacgcgacaaggcacagcacagtcctttcaggagtgatactgcataacagcaaaccgttgctacacaacctgcaaaccggaaacgcaccgacttctccgagacagacaagccaggagacagagagcatgctccgagttccccccgcccgccacagaaaaggcagggcgtcgttggccagcgatctgttcaagtgtttacagacgtgtgttttttcttatccttctgaagtgacacaaaaatagttagagaggaatcttcccgcgatgaaacaagaagcgtaccttgcacgcgtgcatatattttcacgtttctttcgaggcaagaaatgccacacggcattgtactggcgctagtcagctgacggcaccttcctcagaatcaagactgcacccatagtcaagggaggcaatgtgtctcttttggctttaggagcagaaatgaaggttgaaacacgcacgcgtgtgcactatctctagaaacactgaatatactcaatgactgcacaggacgcgtcgatgtgcttcttgcggcgcgaaagtgcaccccgggtgacacttttcagataacaggtttgtcgttaccggagttcgaaagcttcagtacgaagcattaactcaaggaagcgaacaaaagcatagcaatagaagaagagatacgatgatttatactaaaaacaccgtctcgcaagctgccctttaagccaggctgcggttcaccgtttacagccatgcgaatatgttcttggctggcgttgtgctgaagttcagcagagttgcggcaggagcctgcgtgttacatgaaggagcgtgaaagcagaagaatgggaaatccagacactttggcacaccactactactcagcgttatccgaaaggagctacgcttactttcgtccacgctcccgataggccactagaaaaagccgccagtcggaaggacagttgaaagtgacagggaatgctagatggaaaatagataattccgttccgcagtttggtatgcttctggacggagaacaacgtgcgatagtagcgcatggttgtcgagaggcactcgaggtcctaccttcagtgataagtgggtagttgtctagctgaaacgtagtctgaacaggagttgcggtcaccagggactctcacgcaagcattccgtacagactaaaatgcagatgggactactaaagtgaatatcatgatatttgtacagcttgtatacaagtgacggtttttcacctctacgccagattcctctacacttatcgcgcgatacttggtcatgaaagtgcacaagagatcttggatctgtttggaactcttcagttgtcagaggatcgatatcacttacagcaggaaccacctgttgtgcgtcgtttcgtcacagtgtgtcctgaatcgagttacgtatcctattggaggtgttcttgcgtcgcttctccttcgtgcttttgcggtacgagtccaagaaagagataccgccacaccgggactgcgtcgtccgtagggagagaaccgaaagtgaatcttgcaaaaacggttacttggtaacaggccccgctgcgatggagtctgctttttaagttttatgtcgcaaaaaaatacggtaaattagcggaaaccccacgagcgaccccgagagaatcgacggcaaacaaccttcatctggcattccgcgcagtcacccgagtctctcttccctggcaaatcgttcctgctcgtttcgctttgactaaaccctgcagaagctgcctcttcccccgccgcttctttcccgcaagcggagaataacgttgacatttacgcttggagccgtttctgcattgcaagtgttcgacacaccactgagcgcgacgccctcacagctgccgcgtctcttctctgcaacgtttgcgccagtgtccaacagcacatcagaaccctctgcttccgttcccacgctttttccccccggcgcagcttttgtatctcgatatcgaccaccgacattgcccgttgctgtagcgtaaacgcctgagtgatgggtggaatttccgctgctggggtagagctccagcaggatcttcgcgctaccctcacaaaggcggtccggtctgcagactggctgacagtttcttcttgcacatgtgtttcatacgaacaaccacgcca

SEQ ID NO: 568 - DNA, 4672 bp, Toxoplasma gondii
  source 1..4672: mol_type = genomic DNA
gagaacggacaaaaaggtgaagacatctgcacatcgattgtgcgtgtcggggctatcctgagcgtcttccacgctcttgtttatcagcttcctctccacccttctcggggtttgcatttctctccagagtttccgctcggcgcctcgtcgaagaaacggaagcgcgacagaaaggatggacggaaaggggccgagacggaagccgatgagagctccgtccatggcggatctttattcttttcagaggcacatctcgaacgccttctgttcttcgttatcgacgcggcgtatcgatgctcgacagttattcgaggcggcgaagagggaggccacaagaaggaggcaaggaccgactctctgctgcttcaactgctgagtaccgaacgaggtgaaggcgccttcgcagccgacgggggctcttccctcgcggcgctgtggcagggcctcgcctctttgtcgccgaaggaacagcaaagagaagtcctcacgggtggcatgttccttctcggcgaaattcaagaagtgcttaaagacgggggacgcgaggaactggccctcggcctcctggctaaagtgcgcacgtctgtgctgtcctgcaggttgaaacggaaggtcgacagccagcaacaggccttgctccagccgcagaaatacgcagagaagcgacgccggcaacaatgcaagaagaaactgtcaaaaaaaagaaaggtcgcgctcctcattgcgaaaaaccgaggcggaaaacgaagagagaaatcctgataagcagctaccggcacgactcctttgtttgcctttttcgaggtgtcctcttcttgttgaggaaagtcgggtttcctttgccgagcagtatgttttttgacgtgagtgttccgccgatggcctgattctctggacgtctattttttcttttgcagcgcagtggttctgatgtgagtgtacggataatattgacgcaccgtcgctgacgaaccgcctgtaacactctggaactgatgtctccagtatttgtagacagaaacgtcgctacgcaggttcccgtttgactccgtatccggaacagcaacgtgatttcggtattgctttgagaatattggattgaagtcccaaaatctactgttggccagggcatacacacaaacgtgcgcgtttcatcgtctcgaggcggagttattcctgtttcttgtgtctgacatcttcaaagcgtcaacccgctaatcactctcgtgttgagatagtttctgcaatatttagttgacatttttagtcgaatatttccaggaaccacaggttaccgcgacgaacggtagctgtcttcactgttaaatcaacactacctctcattaaccgtgggaaacacggcacaaacagagaagcgaagcaaatgaagtgacgtcacagcgttgcgcggctccatggcagcacatgtaaagcagcgacagaaattacaggctcccatattttgtggtatagttccgccgcttcgctggtttcgtcacgctttggaaatcatctttccgaaacttctgcccccgagtctggtgcatgccgagacatcagactgatgaaccgaattctctacgaaagagacaaaacgcgtacagaaacatatctggtcggggtcaaaggtgcagccctgcctttgtaaagaaaatgaaaacaccctctcggttttgagggtcacgaggtattccggagctctcccaaaaacccagtgacgttctgtcaggtgttaaaaaaagtcacctaatgagaattgtgatacgcaattaattgagcacacttcaagaatcccggagtaagcgttaagtggccaacatagactcttgcgggtgaaagaattcctctgcgttgccaaatgcttggggtaatgcccctgtggtgacctccatagagttggaacgaaggaaaagcaggctttcgtacacgccgtttccttgtccagggaaccggccgcagctacgcaactctttcgaccctgaagtgtcgagttattcctcatcatctctcaaggaagtcccccagctccgctagacacaggctgtctcggcctcagttacacaccgtgggtcaaggtttttcacctgcctaaacaaagttacaaggcatagctgccggggcacccgtgaaacgcagagtccaaaaaagtgaatcgcaaaaggctgactgatatttgaccgcgagaactcgcagtattcgctaccgtgtggagcctcgatatatctctggttcttcgagcaaatactccagcccggcactctccgaaactcttatgtacacttggaggtcaagtgccgcgactgaagacgtggttccattcattctgcagctacggttcctgactggcatcgctcggtttgtcgtccgactggcgggcgccattggaacgaggcgtcgcttgcaaaataacgcccccgcagcccggaacagctataacattaagagcacttttttcagcggggtccgccgatggcgttaaccatctgttggcatgtcacgatgacgcagacgtcgttttctttccgtgtcgtttgggttgtttggggttcgaggcatgggcagacacgcgaagcccctgcctccaccgaaacggatcggtacgccggacttgaagaaaagcgcggctcgacgggatcaccgaaacccgccagtcgccaatccgtgaagaggacccgggcgcctacacgctgtcggccgttcacccttcttagtcttggacggtggaaccgtgtacacaccaggtccagtactcacgtgacctcgcgtgacctcttcgccgattcgcttatggtatatgaacaccctaggcgaggcgtacttgtctggccccccgtttgtgcgtctgcaagttttgtgccaagagaggtcgctggtttgttgtcgcggttggatcttcatggaattgtgtccgattttttccctacagggctgagaagaattgtgggaggaggccgaagcaacgaacctccgcatcggtcgcaccggcgatgttttccgccgccgctccattctcacccattgttgctctctggcctggtaggattccgcagtgactctcggggagtttgtgcctgtcacctgtacaagtcgacggatgcctgtattttcgaaaaacgacgtgtcgagcggagagaaagcagggaaactggtaagaagcgtcggaggtgcacggccagtagcgcctgagaagagactggtcgagactggtccggtgtcgcgccgtccgagggccgaaacggggccgggcgacgcatttgcgttgtctgtttcggcgctcgcgtcccacctgtctcttcctttctctgcaggcggtgggtaccggggcacagcgacctgagaagagtgtggggcggaaaacgcctggaaaaggcattctgtggaaattacttttacttcttgggaacgagtggccaagggacacagctttttttttcaacccgtcgttctcgtcaacacttggcgacactcccccgactcacgggactgagcgcaggaatccttgtatgcggcctgtcccttctcgtagatttggaacggcaaggatcgaccggaaacgctgagcacactacggaggcgtatcgtgccttggcatcgtgttgccccccgcatttttgccagtttcgttgtcagtaggggagatgccaggtcgtttaaattggatgcgtttcgtgatgttttccaggggcattatcgagtcgatgggattcgtggtcgcgccacatcgcatgcaacgggcgccgctctctgcctcgagtaccgacggtgctgactgaaaggtttcgcctctcactcttgtggtgctgcgccttctttctcgttgcttccacggtatttcgtcgcgtcccacggtgtttatctcttgttcgtggtgattttattggtgcgtggttctttttcctcctgcgaagcggattccgcgcctcctggctcctagacgttcctactccctatgcttcgccgggccgtagccgacggtgtccttgctagggaacgaggagttttccaatgagcaagcttccggtgttgggttaaccagtgacttgttaaataactgcagccaatcctacccaactgttttgagatgctaccgtgtttgtcttcgaccccgtttcctgtgtctggtgcgggacggatagccttgttagggtgggccttcccggtctgagagtgtcaccgagtgcttgtcgattgtgtttgtcgtctcctttctcatttgtctttcgtcaatcctattcgtacacggcactcgtttttcaactgtacggtccttgtttgacgcgtcttgtcggttttattttcccccacgtgcgccttcgccgcgggtgaatgcgcggcggggcgttttgtcatgcgtgtactggatacctccaaacggcgttttgttcgaataagttaccatctagtttttctcctgaggtgtttcagtcccgcgaaaggaagggcgattcgttcatttgcgttggcttggtaacgttccgcgtctgatttgtcaagcgttttggttcaggacagcgtttttgaaaggttgagcaggcttccctgtcgatcgtagggatttgtctcgttctccatcggtgtgcgtctctgtgtgtgtcggtttcggtggtggctccccttcggagagtctgcctcccttgtcgtccctggctgtcgtaagcaggctcgtccacta

SEQ ID NO: 569 - DNA, 1635 bp, Toxoplasma gondii
  source 1..1635: mol_type = genomic DNA
gagttcagttattcatttcagcagaagcaaatacattttatggtgccacgaaagaggagagcccacaggaaaggctgacaacgttgtccgctgttctgcgagttgcatacgcaccatcccgactgggacgcactgaagaggtgaccttgcttgtaagatgggttcagcatttcgttctcctttacttttcagtgcataatgtcaggaggctgtgctcaagacgagaattcgtctcataattccacggagaaaaatggactgtttcttggaacagtttacggaaagcttctgtattcctgaatttcagcgtgtgaagtggacccacaccgagaagcacggaagcaagtttttctcccttatgccaacaaacaaagagcactcaataccatgtaacgagcatgttggacacgctcgctgaataatcatgctctcccgtcgcaactagttgccgttagcgcaagcgcatcagcgctgcaaagttaactttgttcgttccaaaggtaacggtggatggagaagtggttcgtatttcttctgcaacagctgccatgatgtttccgtggcacgtttgtggcttccagttactaggtctggtgtgcgtgatgaaccggtgcgctgtatgttgtggtacagtcctgcagtgtgacaaaggcgtctccgaaagcctcttgtttcctgaatgaagactgtactgcaaaagagttcaacgaacgaatattatgaataggtgcaggatcttgagaatgatcaataacatcaacgagtaagaaaattcgaatggctcgtagtccgtcaactaatgtgtgcatgctaatggtttcgtccgctgagttactggtgccttgtctttacaaggccccgcagccaaatgacttcgacacgagacagaatctgtgactcctcgtagttagtggctgacgaaagaaacatatgtgtcaggttaatccgcttctgaatagcggtgcgaggcactaaacttccagtttggctaaacaagactttttcttttgcatgacccccctttgcatgcactggcgtatagtgccaactggcagccttcttcagaataccgactttacggaggtaaatgtttttgcaggccagtgttgtatttgacaaagctttagaaaccttgccgtccactgctcttcctgattaaggtccgtcttccgtaggaggacggcgaagtgtcgtagctgcgctgtcataatctactgtttggaaatccgaagcctcaagctgctgacaggtgtcccgtagaaaatttcgttgtaaccttcggtgttcatgctttttttctcgtcgcagtggcaggcaaccaactacataagtgtttatgtccacaatgaggccctgcggcgctcgttgagtcgcgttgtgattttcctgtcctcagaaaacttccagaatctgctattacgtctcgtgttagtggaccgatgtgagccatttgttttcaattttgtgagcttatgggtcgaaaggtgtacgctttatgagctcaaattattgagggaaggaagtgcgttacagagggtggatgcttgtgtgtttatgattgagagagcgcattggcttttgtgtcgatatcatctggtacataccacactcgcatcttttacaggtgtttcaaga

SEQ ID NO: 570 - DNA, 3330 bp, Toxoplasma gondii
  source 1..3330: mol_type = genomic DNA
cgtttctgcctcttgtgctcacagttgcttctcctctactttcgtctgcttcttctttctcggccttgttacttgctgtgtgtccacggacatctctttggtggttgtttgcccgcctgtgagaagtcagcgcgagcgatccctctcttccggcttgtctctcctccggaatgttcgggacatacaagagaacgagaggccaggaagcttcgtgcctccgcaagagcttctcggcgtcagcgtcggagaggtgatacacgtaaaaggagtcgtccgtgttttctttcttccacttgaaaacgctttcttcctctccacagtgaggacccggtggcgagcgagacgagtcgctcggtctcgcagtgggagaacaagaaagggggaaagaaacgacaggagaagcggcaggccggggggggagagagcgggcgggatcgcaccggatcactgctaaaggaagtccgtgaggattgaagtcgggagacggaaggagaggaaaagaaggacccgcctttgaatcgctcgcccccatagtggctggcgccaagcagacgagtgagacagagctgcggaagagacttaacgacgaaagagcgagaatggcgtctcgacggcaggtctgtgctggacagctactagagcagagggagaagcgggcgatatcgaggtcgccgaaaggcagaaaaaacaatctccagaaaggagggatcgggaccgaacacaagagaatcgagtttcagacaacatcggcgtaagctgtctcggggagaacctgccgggtgagaagacagcggggaaacgcggagcgtggcgtcggggagaagcatttaatggaagccgggggcaacattgtaggcttttttatgtctaaaatgaaactgaaaaaaaagagacccaagacgtctctctcgtctcaactctccacgctcgctcagacgcacaccggaacagccctcgctgcagcgggaaacgcctttgtttttcgtttcttcgtgagattcaggtagtggcattttctctaaaaatcccgctagtcagacagatccgcaattgaagcgaccgcttcctcgtgtgcacgccacgcgaccaaaggtagaagcgtaaaaacaattcaggctgacggccgttacaccgccgcagactgttttcggcgccttctgcgggtcgtctggagaactccatgagaaaaaaagaaaagaaagaaaaagcaagaggggcagacagcagacgcggtcctcgaggtcgagtctgggtctcgctctctccacttcccagccacacacccacgcattgtcgatgtctggagactttgctcgacttcctcgatgctctctgtcgcggttctcgaggagtcctcttgaacggtagcgaattaaacaaaggggcaccttttcttctgccttgttcattttcgcgcgtttctgtcgtttgctctgtgccctctaacgagcgaagggttctttctcgaaggaggagcagcaagcgacgggagggcacacagcgtttcactgagcttcgagagcagtagagaaatatgcacgaagacatgattgcttttgccttggctttcccgtcggctctttttctcgtctgggcttttcctgccctacctctcaagattcgcgagttcgcagttcatgtgccgcgtgaccttctagccaggactctccttgagccccagaacttccgccttttctgaggttgtggcgcgtcttctctcagtgtccttctgtcgagagacgcgatggcggcgtcgacgctgggtatttctgctttttctcccaaacggaactataatcagacacttcagggctacgatctatcgtcatgaattccggcttgtggttgtgtggtgtttttgtctgttttcccgtcgatttgtggtatcctgctcttttgaacgggcgacccccgaatataagccgagttctccctcgcggtcccgttgcctcaaagaggtcaagggtgccgccgcagaaacgcagagccctctcccctgtgaggctcgttcgcccaactccctcaactggtgagaaggaaatttctggaaggctttcgtttcctgtgtgtgagataaattagaaggagcagtcacggaacacagaaccggagagccaacgaaagcgcaaaagccggcacactcccgtttccgcgggcacacaccttgcaaacagccgtcagcaagggccggtgcgcggcccttgccatgcgagtgtcgatctggcatcttctcgtataaaaagagcgatggagaaaacgaacttgaggcaaatgcgaagccaatttcgtttgttttaatcagttgcgcgcgagaggaagttctcccggcctcaaatgccgggtgccctgtccgcttttcgcagcttagccagtgctctcggcgcgcgtccctgtcaaagtgacccggctttttgctcgcagttttttgggcttttcctcggcgaaaacacctgtatttctttaccgagcttcacttgggataaccggggaaggcgatgacttgcacgccgaatcgcaggaacgagctcgcctgataagcagtccgcgacaaggttcttgttcatgccagacctgtggctgtttgcgaccgaggagaagtgcctccgattccggttgggttcgcagctcttctctcgcaattcatccacagccagctctaatcggcgtaaggaggcaccgaagaccaagtgcacagcgctcgtcttgtagagcgcggccttccaagcttgtcaggcttctctttttccccgttcagcggcgcacctcggtagcaaccacacagacaaagcaaccactgagggtttcgtatcgaggcggctgttcccagagggaacgctggatttcttcggcgctcctccacttcacgaggcgatttcgagcgcttcgagcacgtcgcgggcgttcttgcctcgccgtctcctcactcgatgatgactgccccctctgttggatttgctccagtccgtctttcggaagaaatccaggagacagtgtcagtggtggaaacttgcggcctcaccggttagacggttctgtcgaacccactcacgttcctctcgcgtgtatctctgtgtcgacaatcgcctctgtcgccttctccgttctctatcctctctgcatctcttaattttctgatttgctccattctggtgcttcgcgagcccacgcagctccgcgcttcgtctccccgctttgcctctctctcctcaactcgtccgcaattcgatttctacgtcccaacctctctgtgtcgtgggatagaagcctcacactcctctcgcttatctcgtccgtcgtccgtcaatctgcgtttctttcgagaatcaacca

SEQ ID NO: 571 - DNA, 1721 bp, Toxoplasma gondii
  source 1..1721: mol_type = genomic DNA
tacacgtaatcatgcccgtgcgctgaagctttttaccagttgtgacgggagtttaaaaatcatatattctgaaatgacgtagctgctcacaatccgctacgcttctgctcgggtgaacaccgagcaaagccttcacacgttgtctttagggtcctatggatgtaagtgtgctttgcatgcatggtcacgctcgactaagtttctgcgttcatagctgcctatcggtacgtacatgccggcgagttctcaacgcgtgagcggtacttttggaggttaggaagcatgcgaacgcgagtcttcgatgtgatactaagcctgacagggcgccaaaaactggagaggatcccgcttgcgcggagcgctcgccaaagtggagtggcattatggttgaccccagtttccgtaatcgaatgtgcctgaaacgccttatgttttctatgtcgtggaagaacttgaatagaaaggacggaagcggcatctgacaactccgacgttggggtagcgatatttacacgtgtggaaacaggtcggattacagaggcgctctgtggcatttcacaaaaacattgccgtgtagcttcgtagaagctttgggttccaggattaacacattttcgatacacggccaaacgtagaggaaagaaaacctgtcccctcgtccgtaagtagaatgaagcacgcagcttgcaatattccaatcaccggcaccggaacacactatgaaaatcactgttgaactggtgggttcgtatgaggctaaacggaccgccgctttcgaatgcgcttattgggggtgatgtcgaatcgttttttttacaaatgatataatcgaaaaggatgctttaacggggctgagtcggcgactctcaacaggcgagtcggccgtacaagcggccattgttgctggaacgaggttagaatagtgaagcagtgcatatctcgaaagcatcgctctaaaacagttcattttgttgtgctacttttaaagacgtacaagtttcaccttcatgtggaacgcaaagatgcaagcccgtatgattttttttctacgcctacagccttcgagcggggatggcacgcttctagacgagtgtgctcgagtgcctccatgttgatggtgaatcgagtgttcgaagtggaaattcgtcgctccccatatctagtttttcttgtgcaaaagtctagttcgtgcgtttgccggtttgtgctattcgagtgcgcgtcggttcccaggccaagtgtgcaaggtactcacaaactgtggataaagctagtctcctcaggctttcccagcagctagtgtgtccttgtgtgcgttctgttaaagtggaacgccctttgggtacctatcacagtgcagtttctcttgacatacacaagtcgggaatttcagaggctcagttctacctgtagttcgtgaaatcacagacagcatgtatgacggaacaaaaatactaattctggccgttgtggccatcttctgctcgatggggacggcagaagcgcagattatgattttggaaccgcctggcgcagttctgaaaaacaattccacaatgattgaaggatcgacggcgtcatttggggctccagtaggtgtctgcctttccttatcactcagacaaaggttttgtaattttcggttccgtgcaaaaccaaaaacgactgttctagactctggctttttctgcggcatccacgtagcagtcaaactcacggaa

SEQ ID NO: 572 - DNA, 1967 bp, Toxoplasma gondii
  source 1..1967: mol_type = genomic DNA
ggtttctctcatttctttttaggcgatgcctctgccgacggcttgtcctcgtacgcctccgagtacgtgtgatcccaggtccacttcaacagaggcggttcctgagaaaaaacattttccatgagaaaccacggattccaaattgacccctcgcacacactgacacagaacacaatctagtcctggatgcaaccttacacacacgtatcagcatacaaacaacatatatatatatatatatatgcataggtgaatgtctctttctctacacttgtatatatggtgagaaaggcgaggagagtttctggctggctacgaaaacttcggttattgttacgtagttccactgtgtggagcgagccgagacgcctggccgaggctggacatgcgctgacgggacagggaggcatgcgcacgagcgcggagggctgcttctgagatcgagagagtttgcagatatttcttacgacgaactgatggagaggggtcggcttgtccacgacgtcgagaatgtagaggcccatgacggggatgcatgtgccgtctctcagacgggtgtgcatcttcacgagctgcgagtccatcacgtggagaactctgtgcgccaagtcgtccgtctccttgaaacggagaggctgtttgaagcaagaaacatacagaggagaggcaaaggcactttgacagcaaaggggaagctcctcggaggtgcgcgtcaccacgggaaggcgacgtggaaaggagccgtagaccacagaagcgaaagccagcggtagccactcacagagtacgcctgtggacagggcgtttagctttttcgcttcagaaaccgtcacgttgctaataaacgagaacggggattcaaatgagacctgcaacatctgaacctgtcgacctcgtcctagacgacacaaattcagcacacaccttatctgtctcgtgtttgctgtgtgtcgaaaacttgttccaagtgggcctcttcctggaatgacggcaggacgaaagtacacgagaaacagccaggaagagccacagaaggatatcgagtcgcatctggcgttctcaaaagatggatttccatgccccgcggattgagctcttcctgccgccctgtgcttcgtagtatctttccccggcggatcgactgctgccaacagtgtttttttctcccggtgccagctgtgctgaaactgcttgtcggtccttataggtcaatgcagcacaagggatggggggagcagttcccgtgctcgtcgacagaaatcgaacgcattaaggttcatcgtaggtgaaggccactttacggcactctatgtgatgtgtgagtaagagcatcgaagctggcagtttttgccgcacccaggggtctcgcagtcgcggaccagacttaccgcagtgcgcccaagacagaagtttgtttcctcgatcacccagtcgtcagactttttgataagttgctcgctggtcacgggctggccatcgtagccgctgaaaggtctgttgaagacgcgccatgcggagttttgcgcgagcagagtggcggccatgggtttgccgaccgacccgcgggcgagggcaggtagcttggcgcagacggaagcgaacgccatggtcgtggcgattagtgggaaaaaaacaagaaagaggaaatcgaagagacgcgaaggcgcaggcacgaaaaacgcggaaaatcaaactcagacttgtgcgatgccgcgggggtgccccagtcggctccggcaagatacgcccaggagatgttcgggtgtacagacaccgcacgactgacttgcggtcctctcgggaaacaagttgagggttgttgaacggtttttacgagtggaaaaacgcaaaatctgccggggaaagaatcgtagaggataggcgaacttaagggcggccgaacgaggaagcctgcgtggaaggcttggccaggggcaagacttcttttcgtgaaaaaaccgagtgca

SEQ ID NO: 573 - DNA, 1947 bp, Toxoplasma gondii
  source 1..1947: mol_type = genomic DNA
ctcatgaagtacttgtccctgctcctgtcgttaggccttcgaagagcctacaatgatattggcggctcacctttttgtacaccgagactcggaagggggctgctcgatgctgccatgccgacgacgctctctcccaaccctcttcatcggcgttgtgctgcgaacgatgcgatgtagttgagacaatcttacgattcgtagggaagtttgcgttgtacattccggcttgtcttctgttcgcacgttcgattccacttcgagtctttacagcgtcctcaaattcccggctggctatttcatcgtttgacagggaccgcttgtcacgttcttttgaatactgaactgtggaatctctctgaagagtattcaagtcacgagaagatccacataccaatctctgtcctgctgaccccgattcttcctcacagccgcagctgctgtgctgtacggagcaactgctcgctggatctggcgcttcatcgccgaaaaggcagacatcgaggcagtggcaatcatttgaaggagttagccgttcctttttccagagcgacgaaggaagacgattaatgctagattggctactcgaaccggagatcgacacacgagcagaggtgggacgtagaagtctggaaaaggcagaactaagcgagcccctttggcatgccgatagagacactgaaggcggaaacaaagctgagatgcagttcggtggtctcggtacggagctgccgccactgctcaacaacagcagtgccatcccagcaactgacgtaaagacaaacgaccgcggtgtttgacggagcatggttccacgtgaacagcacatcagagccaagcgagtcggcatacgtaggaacgaatctgcaacagacacttgcctaaggatggggaggcgaaaagcagtgacaagcgatcgctttacgcgcgtgacagggtggctgctgattaccgcgacgcccccgaagccacacctgcttcgcgcacacgcccatgaaaccagagacaacgaggcgggaagttcacgcgaagcctcacgaaccagcacaaaaaatgaaatacgtctgcaaaaacaaaagccaacttctcgggtcttcgtaataactactttcatcaatacagaaagactgtatgtaaaacacagctataccagccatgatggaccgcagagcgacccacacgaccggttctcagcacttttcatacgtgaaaaataatctcttggcctactttcgcagaaatgtgcaccacgagggaaatcagagtcaagatgagcatcaaacaggagtgaagtgtgcagcgtgcatgttatttgccctgcatgcgcgatggctctcatcttcgaaactgcatgcttccgattagcatggcacatcgtccacaacggagaggaaagtacagaaaccaaagaatgaaagctctgttttgttgcatttattctcagaggcatttccgcttccaaggaggtgagctccggacacgctgtaggctaccctgcggcagcaggctcgtggtcacagcaacagcagagtccagctatttgccaagagctgaatacagtttcgttttctcgtacagaacgatatggtgaatccaaacagatctctcgcacgcgactccgtatttcgcaaacgtgaacagaggccgagggcgctcaaaaccgacgaactgccgaatattttgttgatccacccggggccacgaagaccctgaatgccaggcaagtccgcgagtctcgcgagactgttgccacgtcttggcgttttggtaatgtctctctttgtgcatcattctaaactgtcggcatcactacctgaaagtccacaaacacagcaacccggctctgggcgcccttctgatgaagtcaccatgggacaattgcgttaccggacgaggaaaacttccctggaagcacagtacatgcgaactggtggctctttctttatataa

SEQ ID NO: 574 - DNA, 4739 bp, Toxoplasma gondii
  source 1..4739: mol_type = genomic DNA
cgaacagattttgtttttgcttaccggcaatacgtgttggttttctcctagctacattagaaaacagcaaatgagacgtgtaccgcagctcccctccgttgtgaagcatggggcatgagatacacgcacagaaaactttaccaaccttccaaattctgtcggcacgatgtagtttgtcataatgaccggtgaagcatccgaaaaaacagtctggcttggaacatcttttcgtgttgacattttccgctcagtgtcttttctccgctgttgagagggcaattgtgcctcaactgaatatcgtgacggcggggtccattcttgaggcagcagagagatgcaaggcactgaacatcacttctgcaggtgcgtcagggtgtgtctgcaaactttcccagtgcattctaccatgtttcccacagttatcgcatttctaccgaattcatttgcaaacatatcgtttctggttttacaccgcaaaccaatcctctcctacgttgctcaggcaccaacaacacaagtgatggtcgtgggcctctttcccttattttttgggtgtttttagcttcttccagaatgcgttttcagacgtcttcagtcaaagtagtcgaaagtgcttttgtgaatatagatgcatttatcggtctcaagcctgcatttatcttctgtatgcagtgcctgccttgagaaatgcacttcctttgcttttcaggacaaagatgcatacctaccggtacaatcgcacccagttgtccgcgtaatcatttgcatgcgtactgtaccacctacatggacacccaattttgcgtatacttgattgccttcataaaatgtaattagcaatgaaaactagatagcgaaacgcgaggtgaaccctgtaatgtgacatgccttagccttctccggttttctgttttcagcgcgacgagtcatgggcttggtggagtctcccgcatccgttcgccaggtgggtttgtgccatcggccggaggagattcaagaggaaactcacgtgtctcatggtgactcctcagcttccatacctgatgttgttttcaaaagacaagacacggattctgcggctagcagccactgtcttccggacggagtcagtgccggcggctgcccgtctcccgtggtgtcgcactagaagactaactgtacagtgtgttcctattgtctacgataaaacgaggcttcctatctgagtttggtgagatacgtgtgacctgaaaatgtggctgttcccaaggccacgcggaagccgtgacatgcgtgtacagcgctacagactcgactgtaatttccattcgacacataccaacagtagtgtaaaaccacccatattttccctttaacgtaacgaatacttttgacggagagatgggtgtctttgctcaatctatcagcgggcgttcgcgaggcgaacgtgtaaaggtgtggttcgagtgttttatgggaccatttgcccagagtttcgacctgcgggaccccttaacgtccaactaacgggtttactttcctgtttcgttcatgtagcatgtatgaattgcttacatacatgtatatcccaccggaattttcttatctcaagattatccacgttgcaaagagctgccgatattccattcgagcacttccttgaaacatttaaaacagtcctgtaaaggatcatgtatgaggaaggaaacgatcgagcgacaggtcgctccccaatgtcaccaaacgggacaaagtcaggatgacgaccgttgactgcctctgagtctttgaaaacggttgtcctcgttagccgtaaggtaatgtcaaacgctgttacgagggatcccactttagaaatactacttatattaaatagtatccaggagcataaggagatgctggcatgcggcgaaacttcacaaaatgcaccacggaggcccgtcgtcgacaaaagagacaactggcggcagcatcatacctgacgggtacacagaaccgtcaaatttgccattccctttgcaaataattgcaataattgttttcttccgcattttagccagacggttctacgacacgaagctgagtcctgcagggaaacaaatttgcagacaccctcccgtattctcagcctgatgtgaaaacaccatgtgatccctgcaagctagggttgccgacttcgactggctaatatcaaatatactatttctaagactgccacgtaactcgctgttcgtccacaacttagtacgtgttcttccacttcttcaggtcattacacgctctttatatgtcggttccgtgagggaaacgtgcacttaaccaactcggcggcgagcgtacatacaccacaggagttggatatgcagcaaaaacttctgttgctcgcataggcgcgagtcacagcatcgggattcgtaacctgaaacgcaccgtaggcttgacagttacgacgaccaactgtcccttttcaagtcttggttgttctttctttgccttttctcaccaaaagacacaacttgccacggtacaaaagtgtgcgccattctgtcagtagatcacaagaggcggatacgatcttcaacacagaaaagccaactatcagatgccagctgcctcgaatggagaggtttctgccagcatcctccctcgcagcgttatccgaggtgataaaccatacccgtcttccggtggatctacagaaagtctcaagccgctggcattggaatcgccggactaccacttccacatttttcgtacatacctcgtcccgcgacccgcatgaaaccgtccgacctcagctacacaaccgtgacgctccacgaaatccactcgcgactcgctcttccgccttctccggcagtttctgtgcctgcgtacttcctgccgccttctctctccacacaactccaccgtccaaactgacaccgctccccgcctcaaaaatccgcagcttcctccgtcctctatgtccatatttaaccaactatttccctcctctggtaccacgctttacatcggttccctgacactgacgccgatggtttcgaggcgttgcatcaagtctcggccgttgggcatgcggccactgtcgagagtggaccacagcaagttttctccgatgaaaatttcgaacgcgttgttcggaatcaagacagaccggacgacctgcacgccaaagaaggccgtcacgatcgccgccacgcggttgttctccagcgcctcagcccacggcgggagctgctctgtctgtgcacctctttcttcgcctctctgctgagtcaaaccgagagtagaacatatcggccgcacaaagacaacgagggcgagtgccgcccaactcagggcgtccagcagccgtcccagagcctggtgaaacagcgatggcttgtactcgacggcaacgaaacggaagccaggcaggtgacttagctggaagctgaggaactccgcgagctgcctcaacgctcccgccgaagatcaggacgtgcagagttggaccgtcacttggtgtggactgatgccagtgggcagagggttgtgtggcgtgaagaaccggtcaaccaaagtcgagggagcgctctgcatcggtgcgtgattccccgacagaaacagcccatcgagcaccgtccccagaggcagcgacagcagcagaaccaccgctgcgacgacccacgtcgaagacgaagacggtaatggggaagaagtaccgggagaaactgtcgaggcgcctccccctccagagggggcggcgccctcagaaggcaccatggtgtctgcgggaaggtccacagctgagtgagaagtgcgtcttttgaggactgtgaaggcaagaattcagaagggtaaaaatgaaaaacgacgaaatcctgagaactctcgggagaaacctcctcacagctgttgtcgcaaccgccggaggaagcccttttgacatcatttacacaagcagcctacgcatgcaccagccgtctcgcttcgcttttcgaaaaaaaaccctgaaaaacgactctcgtccgcggtttcaaccgttcccgtttatctttctctcattcaaatcatctttcgagtcttctctagggttgtgaggggcgccttcgaggagtgttgacagcctttccgttttgtcctctctctccctgaaaagaaggtttgcctgcgagacaaaggacctccctctagctggctgctctgcccagcgacttcaggtggaaagagtgtgtacacgtgcgttgccggcgttctgtttgtcgctttccccaatctcctgctcctctgactctacacatacacagagaattgcgtttctgcacactgatcactgaagtgcacaggtatcgatgtaagtaaagcctgtccgtggtgtcaatgtagcgatgtgcacacacgcctgtacaccagacagcacgtatgtggatatttctctttcgcgactcgtcttcgagttttctcgaagaggagattctgactggatcagtaaaataggaagcgaccgggaaaaaagtatgaaaatgagttgagataccacacctcaccggccttgccgcgtgggtcctctgctgccctctcgtgccttcctcatccctcgccttccccttcttctctttctcctctcttagtcgttgctattcgcctgtttctcctctcgctctctggcacaatgacacatgtctctgcgtgggaatcataatcccgaccctctccctcgcttctctctctgtcgcttcctttcttctttctccgggtgtctcttcacctcaaga

SEQ ID NO: 575 - DNA, 1918 bp, Toxoplasma gondii
  source 1..1918: mol_type = genomic DNA
acgcagacgacagacggacgacgagagagtgattgtcgtgcgtttttccccgttcaggcaatatttcatgcgaatcgtggagtggtttagttgcgtcagaggatcttgtggctgtggtcgaggcggataggcattgctaccatgtttctgtgaagagaattattgttaattttccgcgtcagttgggctcacgtgcgtgcatgtgtgtgctttggcgcgaaagcttctttccgaggccggtacgagcaactgggttttacgtggtacactctattcccgcttattcataaaccctggttctttattaggttattgtcgaaggcttgttggccaagtgctgaggtcagcactgaattctccttaaaacgctgtttgtgaaacaatggacagttgaactgccgttagtgccggatcttgctgtagattcattttaaagccaaactttcacggaagatgccgtatcggataacacacgcagatgcctgacgtattactgtcctgctctccaggaattgtaaatgttcaaagatgttcgcacactttcgcttaagtagatcgtaacgcacagatgtacatacacagagagaatactcttcgcactggcgaaactttctgcgaagcagaacacatgcctcactagggccacataagatgtttcgcacacgtgttcgtcaatgcatatatcgcgaggcaagcagacatattttcaagtgttgaaactgacaggtcaagcgaaaaaaaccgtaaaaagataaattatgcccatctctgcatctaagttgatacttggttatatgttagacgcaaacttcccccctaatgccgtagttattgaacaggcgtgggataacaaaagtgatacgcgtgctttaaggtagttttcctgccactgtcttattcgaggaaagtatgtcacacggccgtgtcccttcgaactcttgtaacttggtgaaagtcgcagattcctgggcggtgttgcctcgaagtcagaacaaacccagactaaactaacacgaagtaccgtgatcaatcgttccaactaagcagcctgcaagtcggtgtacgaggcagaggtttcttgttgtcagtgtgaagtctccggcgatctcacttcatagggcgctcggtacgaggtggccccacgagaccgcgcgaatcgtttatgctgaatttcgaaataaggcgggaaagtgcggagaaaaagaactatggaacctgtactgaaaaccaccttaagaacgcaaattaaggcaagacagaaattctctggttacacgagagaggtacagtaagcagcgtgacaaatcggtgtgctgtctcgtacatgcccgtgagcggtgacttcgcgaatgcggtttctactcaattctgcggacaccaccttcctcaaatgtctgcatgctgtagatacagtagccgcactcaagtgttgcttgaaactgcgggagtttcttcgattttctgaaggaaacgcaagcgaaaagagcccgcttcttgccacgcttcttgtccatcgtaatactgagggttgcacctgccgtgaatctgcgtagacatttcttcgctgagttgtaagccgtcgctgcacctgcacacacacagcacctgttctgcctttgtgtccttcgctgcactgcatggctccaaatcgacaatgcctacaccgttaacccgacatcaatgtggcaagaaaaaaaccgatggatctttcagacttagctttcccacgtaggtctcttaccgctttctgtccatccgcctgaggctcaaagccctgttttctcctggagaggcgaaaccctttccgacccgacacactgggtactggtggaagtaaatgtgtggtgtagacaccatttctacggcttctctgcaacgttctgatcttttggactttacacccgttttgcagcaaaaa

SEQ ID NO: 576 - DNA, 3078 bp, Toxoplasma gondii
  source 1..3078: mol_type = genomic DNA
gaaggatagagagaagacataaaaccgtggaagggaggagaactttgatggtttcggcaagggatcattccgaggggaaggaagcgacttgtttgccccgagagccgtctttgccgcggcaaatcaggactctttgttctgtctctttggcacgaattcctttttttttctctcgacaccactgcctcttcttcctgctcaaagcaacagagagaggagactgtgataagcacagcatcctccgtctctggaggcaatgcactctcctccattctcacagttcagccgtgaatgtcagctggtgtagttgacatccgattggacattccgtctgcgcagccgccacagctttgatcgctccagcctcttaaaatcgtccaacttctctcttttctgaggctcgctctctttcagtccgtttctgcttgacgccacacagcaagagagggtctttctcaggcttgacgttccctgtttctctccttctcgcgacctccgcggagccttctctcccgactcgcggttttcttactgaggaaatcagagaagccgacgacagcagtgacggcggagaaggacagggggaagaggagagccagcgacgaaaagaaagacagagcagaaaggacagagaaagccggacgagagacagagcaggagaggagagggcagagcagttacgaaaaagacgaaagacaccgagcgaggggaaaaatcaccccactgaactgccgaaaagaactgaaagcgcttcgtataaattgcattcagtttatgtccacatcgtctacgtcccagacgtgaaactacgggcagttgagagaggacaaggaaacacaggggagacgattaacgattaacaggttgcaaagaaagagtgagcgcaactccgaagctgtccggtcgtcccaagaaagaaaattcgcctgagaaaatggaaccttcgcgggtcctctgccacccagccttcggcagaaaagaggaaatcgaccgactccgagactcttaaaaggattacaagaggtttaaaaggcgaatcgcgccatgctttttcctcgcttggacactggggttgacgcaaacggcattcacaatcacaaaagaagactttgttccttgtgaaaagagaaggcgacgatccttgtgcttttctcagcataagactgtgactttgatcgcgctctgcatgtgcccaggttggtctgccgtcggaatccggcaaccaaatgtccgtaaattcggggtcttcctggccgtcgcaaaagaccttttttcgttttttcccttcgacgcaacgcgttgagctggagcctccgtctccctctttgcttcacagtctccagaatgtctccagcctctctctcgtttccctgtggctgctgccaggcgacccccagaaaaagtgacttgcagccttcgctgcacccgccgtgctcttcccgttcttgactctcgcccactgtcgcacctggcgaaacagggatttccacgtcgccagcagcgcctcaatcgtccttgaactcctcgaaggacttattcatcgtggtggaagcatcctcagcaggggcgctacggggctgaaactgtttaaagtgacttcgcgagtcgcggacttccaccgcccggggggtcacgagctgagcagctggcgactctttcaccgcggaggcgtggaggagggaggcagggtcttcgttgaaaaaagctccgaaaacgggcatcaacgaactcagcaagaaaggatggagcgttctatactatcagagacgattttgacgcacacagagagacacaaaacagagtttagggacaggtgagggctgccgccgcgttggagcaacacccggttcccggggagctctgagagacacgactagcgagggagacaggagaagcctgtgcctgctgctggggtaggaaacacagacggtgcagacgaggaactccaggaacgaaaacgcctttcacaaaaggaactagcggaacttttgctttctccattctctcgccttttttctgcggcaactcctcgacagcaatggtcaccgattcccgggggtgcgctccggtgtcgtcacacagcagccagatcgagagttgatctttgatttgtggtgtgcgtctttggctcttctgtccattgaaagacagatttaactttgtcgaaaatctcccctggatgttacctcccttttaccgtcctccccgttcgccctccgatctcgctgccgttgacctccgcgcacacaacaccgtccctccccaccgcgggccagggctgcagacccatcgcaggcagactttttttcactttttcattttcctcagcgttctgtctcgcctttgtcgcttccgctgagttagctgcccacgaaagacggtctggagtttcgacgccgcttccctgtgctcgctcctctgcgggatgctctgaaacggccgttgacgcccgacggcaagagctgactctgatttcgaccgaaaaagcgcagtccaggacaagctggcctgggtcgcaatcagctggctgtccaacttctccgggtgagctgaagaaagcctcttctctcccgacagacgcggccttttcctgggcgtcgtcgccgagggacgccggggcgagagcgagaccgcacggcgagggactcgaagacaggaggagcgcgcggaaaagtttcatcagatgcgaggagaaaggcgcctttttcatgaggaaggagcgagcgcgtagggtgtgatcatcagggaggcctgttctgtccagtgttgagtgggcgcggcggcggagacgccgcggaagagcaccgaagtttcctgtcagagttcagaggcactcttcttttgcttcttcagaagggggtttgcttttttggcaggaggcgcttcgatttcttccgtttcctcctggacgcagaggagaggaggaggctcgaatttgcgccggaaacgaaacggctcgtggagaagaacgacgccaggacgcgaagaagtaacggtggaaccgcctggtagagaagaagagctcacgaggaagctacacgagagaagaaagcagacgccagtggagatcaggaaaga

SEQ ID NO: 577 - DNA, 1674 bp, Toxoplasma gondii
  source 1..1674: mol_type = genomic DNA
tcaagacgcttgataggactgcctcaagttcctgatacatgtctattatacatgtgtacacatatatatatatatatatatatatatatatacatatatgtatatatatacatatatatatctaggtatatatggatttatgattaatgagtatcgtacatatagacgcacataaaatatgtatattcatacatatctatgtatagatctatatctctatatatgtatatgtatacgtacatatgtatctacaaataagaagcctgtgaatgtatatacatcaaagtggacaagactgtttaccagtaggtaggttgtttgaacatttgaacaagagttagttttgtctcccttgtcaagttcgattgagaggtcaagaaaagggatgcttttttacagccagcgtgcccctctctctccggttaccagagtcggcaggcgggaacgcgagatctctctcgatccgttctcgcgagctcttcctttgttgtgactctgagatttcagcagaggaagaattcttgcctcgctctccttgcctgccctctctgctgtcttctaacctcgctgtctaccttgtcgcctttccagcaggcggcggagacgcggtggagagaaaaagacaagatgcgaaggcctttcgcctttctctgctcgctcctgcgcttttgaactcgcggcagcagaacatctggggtgtatgtacaccgctcgcgcctgcgtgtattattttttcggcgcttcttcccgcaaagctcgcggcgcccagcgcagcttcgactctcgcgccacagtttctgttgcatgcagagattttcgtggactcttcaacgtgcgctttgcggagaaacaattgcacctgtttctgcttttcttttttgcgtttctctccttctccccactgcttcttcgctgcccctccccggcatctcgctacggtttcttcgactctgcgtgtctgaaaagcgcttctcggttccaaagaggcgaccgtcggctttctcgttctttgaaaacctctgtttctcgatttctctggttctgcacttggaaagacatttcttctttctgttccgttgtgcgtccagtttcaagacaagccgaagactttcttttctctcgcctccccagtctcgtctttgttgcctctctctccctcttcttcccctttcttcagttctccgtttatattcccctgcgcctgtgccgttctctcgtaattacctcccctttgtcttttcctcgcgttctttcttcttcttcgtgtgccttcgttgtcgtctctctcgccgcgtcagtaaaacggttcttccggtttcctcgcttcgccgtttccctcgagaacgacacagagtgaagagccagttcgtcgatctacgggtgtggcgtaccctctgtctctccgtcgctttccccttgtttctggtcttctcgccttcgctgctgtttcgagttctcggtttctcgctttcctctctctttcgcagcctctccattttccaatttctctctctcctgcaaccgccaaggcggcagtctttcgcgctctgtcgaggccagaggagcccacatatgagggcagtctagaacgaggccaacagggactgcacgacaaatcccgcgacggaagaacaaaaaacaaaggacaagaagcatttcgcgacaagagcaaga

SEQ ID NO: 578 - DNA, 3319 bp, Toxoplasma gondii
  source 1..3319: mol_type = genomic DNA
taagcatagatacgcgcatacacacatgaacagggtacagagacagagggatcgacgcattagacacgcaaatatacataaatatatatatatatatgtatatatatatatgtatatatatgtatatattttagcatatgtggtgtaaagcgagtttttttgggtgtacgtacagtcggtagggtgcctggtttcggtccttcgcagcaaggacaagtcaagtctgtgggggcgttgacgacgaggcaaatagggcatctccattcgacctctggcggcgacccggttgtcgttttttcttccttctccccactttctttctctttttccttctcgttcagctcttttttttctccttcttcttcatttcctctgggcttcaatggatcttcttcctcagccagctgcggcgctccgcgacttgagtccccagacgcgggtgtatagacactcggagcttctggcgcgatgccctgggcgagcggacatgcatggccttcgcctccagtttcggctggccctgagagcgcgagtcgctcgacggatgcgtttgcgtccattgtcggcgtcgtcgtttctgcagctcgtcgggagaggaagagcagcgaagcagcgagggaagacccaaacgaacggcggacacagagaactgccggcgaccagacctacggaggagcgtgagaaagcgagagcaagcgagcaagactgcgggaagatgttgaacatgagaactggagagaagccgagaaaaacttgagaggagcgcgaatcggagagacgaagagccggaaacagtgcagcttctgacaagaattcgcgcgttcgttcttccttacaaaggacaagtctgtcgcttctccaggacgatgcagctgcgaggtcgtgatcgtctccagcggctggggtgtacagacgacggaggagagggtgctttttgaaggcttggaacaggaaggaaggccgcttttctcgggagaagcgcgggacttttctctcgcagaacagcgcgtcggcgctgaccattccccaacgcttcttctcgtgtcaaccgatccgtctggaacttccccagacaaaaagactgctttgtcgactttccggaaacgccccggccagccgcaccgagccgagagagagtgggaaggagtggaggaaagcaactggacgcaagaaggaatggaaggcggaaaaacggagcagaacgcgaatgggaggacatgaacgggagaaaaagcagagaaacggaaagaaacgcagagaaatagaaagaaacgcagagacagccgaggagaaagagcgaagcatgcgcgcccctgaggtcctctccagcgacaagtcggcagacacacgagaagcgaagccgcgggaggagactttggacatgtttcttcgattcaaacggggtgctgtggctgccgagcgacaggagaaaaacaagaaatagtcggagagtgaggtcagttctcaatccttcgaaaagcgaggaaagcgagggaggggaacggcaagacccatcgcgccgcagagaaaagcctcccttctctcccaggtgctgctcgctgctggaggccggcgaacagtccgttctcagcaggtcggaaactctggaaaacgaagaggcgaaccttccacctcgaacgttcgaagcgcgcagcaagcaattccgagaagcgtcggaacctgccctgcagcaggaaacgcggagaacgtcctctctggttccctcctgcggaaaggctcgaaagaagacgcagaaaacgccgcgggggagggatgagagagaggcggcggctcaagcgacgacacccgcggagcggagctggaaactctgctgctcgcgcgagaagtaccccccaaagtgcagtttcggtgctttatctgaccgcctgactacgcgttggccgacgagaacagagaacccgctccaagattgctgcgaaaaagcgctgtagtcgacatacgaaaacgcgagaaaccggacgagcgcaaaaaccgcaggcggccgcgctgtctggacgcacaccgcctcccgagggtctcgcagtcacttttgcttccggttcctccggtgcagccaggctcggacgttcgcagtgaagcgagccaggcgggagaggcgcgcacaggcgagctgaactgtgtcgtagaaaacgcattttcccgtcgaggcgtccgttttcatggaaaagggacaaaaacgcagcgaatctgaaccgccagccaactgccggttgactgcgctgcggagagcggcggagcgcagctgtacatatatgtgtgtgtgtgtctcgcttgaaactcgacgttttttctctcgcgggcagaggacttccgcaaagtccaaagcctccacgtcgacagatctccggcgaagaaaatgtgaaggacgcgtcgcgttcgacacacaccgatcccaaaaaccggcgccctcaaccagctccggcctgtgtgtatgtatctatacgcatgcaggaaggagaaacggccgccccattctcgcctcagcctgtcagtccatgctttctgcttccgccttagatcgaaaaccgtctctctcaatgtccgagaaccgccgcagaaatcagtctcacccagctgtgcaactgcagaaccggcgaggtgtaggtccaccggcgctgcagcaccgtcaggctcggagtggcggtcccctccgcaaattcttttttttgctgacagaaaacgagccgtttcatgttcgtttcgtccatgtattgcagaaagtaagaggactcaaaactaatcaaggttcctcgttctatcgggatcgcacagcgccgcgctgtgtctcgtcgtcttgggcgttcctgcgccggtctgtcgcctcgagagagtttcaggcgtccgcctcttttcgagtttctttcctttttttctcctcacttgccctggtttctcttcctccttcagtctttctgcttctcaagatcctcgggtgcagcttttcgcggctctctcctccagaaccgcgcatcatctcgttgttcctgttctcctcgatccctgaaacgtcggttgttcctgttctcctcgatccctgaaacgtcggttgttcctgttctcctcgatccctgaaacgtcggttgttcctgttctcctcgatccctgaaacgtcggatttccatcctttctcgtctatctctgtcattagtcttgcaccttcctctctcctctcgtgatccttcgttctctctgcatctttgtgagagtcgtcttctctcgccgtggagaagcgaactgttctgcagtcttctcgcacaagcgttcctgtcgtccctcgcgtcctcgccgacttccaaca

SEQ ID NO: 579 - DNA, 1278 bp, Toxoplasma gondii
  source 1..1278: mol_type = genomic DNA
gctactgttgactaaaccagactgtgccatggagcatccaattcgagagctgttcgtacactctacaaccgcagcccatctgacggaacagtggccgtttagtcggtgcataaagcaccgctgacgaagaacggtattgaccaaaactttgatcacaatgaagtcggttttgattttccctctctctctgtgggttgtcggcgcccttgcacacgctgccattcctttgaatatcggggaaccttgctcgcgaggtcatcgaggaatcttgttccgtgtcactgacccaacagattttgctcaaggatgccaagtcactgcagttttgaaaaaagactgccttcagctttttaggtgggtcatttgattcctgtaccttggttgtgaactattcactgaatttctcgcagaggcaacaaggaaacagcacggatcgctctcggtaggaaccgattccaactgaaggcagtcgtcagcatttgttcacgaatcctcttcggtcagacgccatcgagactccggtacacattgtgccatatcataagacttgtctgtcaatcaaacccgcgtcaagggatgccgagatcctgtggtaacgtgtgcctccttggatactttttcatattaggcgtagctattcttattttcagctgtgacaacgagaactgcagagacgcatgggtaaggctattcaccaaataaggaaaaggcatcgtcattaggagcgtttgcttcagtggatggctctgtctgaacaaatcctctgcctgcacaaaggtgccatgcggaacgaagtgtccggtgaaccaaccgttgaggaagaggagcgtgaagtaggtggtcttacttgatgcttcttcgtagcatgtggatgcagctcatgcttgctgcaacaggtcctagaacaagtcgttgagaaaccatcggagggtggtgttaccattcacgttgagaaggtacgccgccctgtcttgcatgttgcatgtgggtttgcatgtgaattattttgattctagagtcccgagggcgtcgaaccggttttaaccgtgcaccccagtttcaagcagagcgatgttcacccgcattaaaagtgtcggaatagcgacggcgaattttgtgaacctgcagaaaatgtttgttggtggttccccagtgaagtttcgtttcgatgcacagcggcatgcgcatgctctgacaactggccagctgtggccttttgtctgaaaacccttcgtgccccctttcctagaaaaaatgtcaattcactagtcatactaa

SEQ ID NO: 580 - DNA, 1973 bp, Toxoplasma gondii
  source 1..1973: mol_type = genomic DNA
gggtaaaacaggtgtactccctctctctgactactgtcgctcttctccttccctcttgttcactcttgtctttttctctctgctcctgccctcttttccttttttctctctcgtattttctccactcttctacttctgttcttctccacagaaaacgacggggaagccgcccgtcaggcgtcctgttgcgcagctaacccacctgggagtctgtgttggactccgacttctccaaactgctttcgtctctattatctacgcaacgtgtaaggctgtgagtatcagcttcgtgaagacgtggattcggatccttgactctttctctcttttcgtgacgtccaggagagatatttgcaaacgaggacatctctgttctgctgaggtttctccactgagaacagaaagttcatctcttcacacggaactcaacgagagtctagcgcttcgtcagaggcctcagaatttccctcacaacacagacacggcgaggtgcgtcagtcccctgcctcaacaaagaaaaagacagagaagaagacgctgacgcaaggagcacaggcctgcgctcacgaagactggaagcagacttggaagagtgatgaataccggagactttgggggtgtcactgtgtaagtgtacagagtgcttagtgcatcaagttctcctgcgcgcttgactttcctctggaaatctaaacgagaaacgcttccctgttaagttccgagctcccaaagttcgttcgtctgcgaagacgtcgacaaagtaaacgtcctcatgcagtggctacgattgcttgagcgaccagtcaaaggggaactgtgaaatgctgcagagcatcgagatcgcgaccgccatccacgtacgattcacaaagactcaatagcgagcgtactggccttcgcactgcagccgttaacgatgttcgtctcgtggaagctcttggtgttttctactactccctatacagacttcgacaaggcttttttttgcggagttcttcgagccatgcactgagggcgaggaatgtccgcggcaggagaacgcaagacgtcgagaccaccctcgttggaaaaggaaaagcctcagaaatacaggggcagagacgaaaaaatccaatcaattttgctgtgtacacgcaccgcatgttcgcgggcgggcgttgcaccgcgcttcgtagacgggagaaaagtcgcatgcctcgtctttctcaaaaagtcgtcgttttctctgcctgtctcgaagttcgcttctttcctgcagctttcttcaggctttctctggagtcctaggtccaccgggtattgtgcgacagccggcgacgaaggcgaaagaagcgcggagactcaggccggtagaagaggagacatgcgttttcttccggcagcgggaaagtgaagaagcttttctttctcttgctttgacagacgaggagccgctttcctgcgcttcgaagttgctgctcggccgcgcattattcagatgccgacttcctgttggaataaaccggtcgtactttgaaaggcgattcttcgctgctgcgcggaatcgggcaactctctctcgtctcctcgcattcttgaccgctcttttctcagaaagtatcaaacggacgctatactcaccctgtcggtgtcgtttcttcgtcaacggcggcggcttcgtttctccttctccccagtttcttctctttccggctcatctctttcgacgcaaccgcgtctgcttctctctccgcctctctcgttgctgacgccttccacccgcaaagaaacaggcgcagtcttctcctttgcctcctcctatgcgagcaggcgcgtcttgcccttgcagctcctccgtttctcatccgacctcgatctttctccctcttcctcttctccagatccttgcttcctctcctctgtctccttcccccctctatcccttttcctttctgccttcttcttgcttttcttctgccgctttcgctccgaga

SEQ ID NO: 581 - DNA, 1833 bp, Toxoplasma gondii
  source 1..1833: mol_type = genomic DNA
gaaacatgcggttctgatgctgtaaaacagttccacgacaatggcgaactgctgcaggtttgacacgcacagctaccatgtgtaatgaagtatgcatatgctggattctcagcaagcgggatgtgcgcatgaatcgttatattatcgttccatctcggttgtgcttttttgccgcatgtctgtttcaccgctaagacttcctcgagtctttcgagccaacacacgtgtcagggtcagtcagcttcatcccgagtcgttgagggaggtcgtgtttctcaaaagcagagcggtcgaattctgtgctctccgtcagacttctcatggagtttaccagggccacgtttcttctgggagagtatcatctccgcacaaacggcatacaaaaaagttaatttttcttcttgttgagcggacactgtaattcaagcagcgacacacaggcggctctcctttgctgttttgttctgcggtctgtggagaagacttactctttcagacacttccacgagcggaaatgttgggcacactcagagtcttaccgcggagcagaactgccccacacttttgtttaagagagctcatgaaaagggccgcggttaagagcacagaaaacagcacaaacccctcgatagctttaggtactacgtgtcacacgcctgactcctggaagaggagaataacgctccaagatcggggttctctccaccccaaacagtgttggtttcggtgagcagacatttctcgggaaccgcacatggccggagaaaggaagcgagcatatgccaattgcgaggattatgacgtgggcagcctaaaacactagagaggagccggaggcaacaatttgttccactctgttgccgatgaatgactcagcttgttttctgcagtactgcgttaagaaatatgtacacatgtgtgagttgggtaacacatgctgctgcttcacctctttatttgcatccgattacgctgaaacatccccagggtctcgagcctcgttccacgagttgtcgcgagacctgcttctgatgcaaagggggaggcgtaccatttgtctggccgccgctttctcgcgattctgctgatctgcccgtcgtttcggaaaatggccatctcctgcgcgagaaacaggcttatacgtttgatacatcacacgtgattaacgaagtgggttctgtgttcttctgtctcgccgctggggcacagagacagagagacaatgcagagaaacaccccgctccgccggtgttgcgtaaaaacattgttttcctttctacacgttttgcgcagaaaaagaggaagttgggtggaaaacagtcgggggaaagaacgtttttccccgtgggaccgttccttaaggttttcgtggggacacgggagcgtttgaatctgcatgtcgtcagcaacaggtgtgcgctcgggggcagacaaaatgaccttgagttcttcctttcttcccaccacgacggcatataaacagtcgagcagcttttgactacgttcgtgctcgccgactctgccccggtgtgacttttttcctcccgttttttttcgcgtccaagttgcttcccaagacagacaggcatgccttcttgtcaagaggaagcggaccgcgtggaaatttcctttcctaattttctgcgacttattcccaaataatccttgtctcgctcgacaccgcggggggggacgttttgcgtgggggctctccatctgctctttcctggttctcttttcgtgaaaaaggttttttctgcggctggttttcttcgctttgcctgcgccgctggcatttctcgaaacagacaaaggaaccaggcatcgtcgcca

SEQ ID NO: 582 - DNA, 1858 bp, Toxoplasma gondii
  source 1..1858: mol_type = genomic DNA
cttctctgtgctgttcgtccttctcgtttccactctcttccctcttcgcttgtccctcctctctctccgctctttctttagtctgttgtctcgcctgaaacttctcgcggtcctcttctccaccttgatcctcatcatcatcttcatcatcttcttctgctgctgcaaaggggaagctttcagagagaggaggacgaggatttttctttccagagagaaggggagagggacgcaggcgaaaggagaccgcagacgcagtcgaggcagaaactgaaggagaggaagagaggcttggcggatctgccatcgttccagcgagaagagagaaacagaagagaagcgagaggaagaaaagcccaggagaacagaggagagaaggagctcaaggacagcggacaagaagaaggaagctggtgaacagaaaaggcgggcagtgtcggagagaacggggagaaagaacgcgagacacggagaggggaggcaagaagttggtgacagacgactagaagaggacggagagataccgagagggagacgaagagacacaggaaacacaacggacaatatctacatgagtaattcgcaggagagatggtctcctgagacaagctcatgaacaacgagaagactgtttctagaaagtaaattcagaagcggcgagatggaagccgcgacagcggccaaagtattgggccgagagaaccttccagaaaggccttcagcgaccgcggggaggaaggcggtcttcgctggccaagaagacgacttttcgaagaatggtctggcagagaagacgaattcctcgaaaaaaatcctttgtcgcgcggcctcactgaaaaaagaagacctgccttcgctggttgcatgctcgattttcactgcccgcgacaaagggtgtctgacctcccgagaaagggagccgcagccatgtccttttgtgccttttcctagaaaaaagagatctgttctccattcaatactccattcaacagacagagaaacgaagagaaggaggaagaaaggcgagaggggaagacgaggctttcaccgtgctcagctgtctcgataccccgaggggggggggtcacttcatgctctctctggatttgacttttttctggatgaatcgacgtctctccgtcctcgacgcggccggaaaaagagttttttttctaaaaacctgtttcgactccccttgtcttcttcttctccaactcttctcctcctggaacatttcagtttttccgatttttccgcgaaaacgtcgtctctctgtcgtggagtccatcctcgcagagtcgcgccttctgtgcagaaggagactcacccgcgattgcacaggctataaacgtaacacaacttcatcttcttggaggaacgtctcaggaaaacctttcagaaaaacgcgacggaaacgacattcccccgaaaaaaaaactggagaaggactctccacggccctcgctcgctgcagctcccgcggcacttgagagtcgctgcaggcgcggttcgcgaaaacggaacaaaagacgctcggagaaagtttctgaagccgactgtggcgcgcatctctccatgcttgtatacatgcgtcgtctcgacttgttcatgcattttgcatgtgtaagtacgtacgtttatgcatcttcatacgtcgaaagtccacaaatacatgtacgtttgcttgtttctctacatagcgatgtatatttttatttgtacggatgtcgatctgtagagatcggcacgcgtatgcgtggagggaggatttcctcggactgaggaggcgttgctctccgttctgcatccttttccttcctttttcgcgtctcctcctttctccctgaaccgttcacca

SEQ ID NO: 583 - DNA, 4639 bp, Toxoplasma gondii
  source 1..4639: mol_type = genomic DNA
aagatgagacagaggcggactcgagcagtgcccatacacacaagttgcctccacagagagtcgttgtggggaaaggtggagacgcccgaaccgagtatagagaccccgttgatctctctgtgctttcccggtttctcgcaggcgagaaggcgccacgagggatggatgacagacgaaacactcagggtattcttcaggattgaaggaggcctcaacctgatgctccaggcgcgcgactctggcggtccccgaaccggaggacattcggcacacagacgttgtctctgacgcagacggggagacgcggagcaagcggcaggcggcggagtcccgctgtttggagtgcgtcgaggaggagtcgacaagactctctgcctcctttctccgtcctttcttctgactcaacagagaagaagacgagacggagagcgggagagcagctccagggcgagacgacgagcgagaagaggagacgacgccactggacgggcggagggaaggcgacgcagaggaatgagactcagtggcagagtagtcgcaggaagacgagatcggagaggtgcatgtgccagacgaagagtcattattttgtcgggaagggaagttgactctcacagtcgccactcgctcggcagtatccgtgtctcgtcttacacacgagtctctgaacgacgacaaatcgtccggatgcgaagcgttttctgtgcgattcggctggtgagagctcccggggaagcttagcaggcgactcctacttgtgccggacacagagaaagaatctctgtccaccctccacgttccccgagaaaccgacgctgaggagctgtctcgtgatccccgacagaaactggagctgtcagagctcgcgctcccgctgctcgacgagtgactgctttggcaccagtcatccctcgctctccgcgacgaggaagactgagacgaaacggaggtactgttcacctgggaagaagagagtcgaccgccggcgacgtgctgctctgaggaggaggacgacgaagctgcggagctcctggctgggctgctctccacgctgcgcgaggacgcagaactcgacatggtggcctcaagaaaaggcgagcaaggaaggcagagaaaaggggacaaagaggcgaagggagtccgttacaaaaacagttgccttggaagaaaacggagaagcggacgccagtctgcactctcctgttggcggcgtccgagttgtctacagtgatcccaactgaggggcggagcctcgccggcttttgaagacgctcgtcagcgagacatcttccgctcctggagtgggcagagagtcagaaaggagagagacgaaatgagaacggttctgcatgcagagagaatgtcgagagggacggaccagaccaagtcgttcgcatctcatccgaagccgttgggtcgttcggtgaagtgctcatacaccgcagggccggtgctgcaccaggcaagtcttcggtcctcaaatctgagagcgcgctaaaacgaaacgctgaacttgcatacatggcattgtagtgttcaagagcaagacatcaagaagccgcacaatttgtatctcgttcgcaaaatttttccgtccggcgaaagacggctcaaagcgactgcggcacacactgcttcgtagcaacacagaagaacttcagtaaaacgaaggcgaaatcgccgcttcccgtttccacaacatagatccaggaccctccttcgaccgctcgccgacgacgatcatgtgaggcgtcgaggaggtgctcggaagcggttgaactgcggggcagcttcgcctgctcagacggcggaaactcgaggaaataacaaacacccgagaggaaaagcaaacagcattctgttaaggcagcaagaaatacaggagccacaagacgcgcgcacctgctgcgccttgaggggtacatggcagcggctggccgctggtcacactgctgccgcgaaaccaagacggcagaagcgtcaaactggaggtttatggatttttaaaggccactgcggtctttgcatctacggttaaggcgagttcagcgcgctacgctgtcgagatgaatgagagcatgttgataagaatctcctccggcttccttcttgaatcgccgcatcgatatgagttgtagattcgaaagcgccggaagggcaaaatacggttgagcgaagacgaacgcggccgcccggctctcctccgcgcgagtgcgtagcaagacaaggactccgtagtggtctttagagatttttggaggaacacgaagaccccctccgaggtaagagaagcggaaatcaagcttaaagccgagggttcattcttatttgctgcagacgtgggccatttattgtttcagaccggtgaccaggcaaccgcgggacgctgcacgagacaaaggaagtcctagactgcatttgcgggtggtcgctgggggcgaaacgaggccgagcgcaggaagaaacacacaatttcccgtcggctttccctcgttctgtttcggctttttgagacgaaagtaacgggctacgtagttctaggttcgtaggccaaatcggcggggaacaagacacacaatactctggtttagcgcacagtcgtggaaaactgtacgcttttgcaaagacactgaagaaacgaactcgaacgcggcttcccccacgaaaccgctttcgttcatgttctcgtgcacactgcattctgttcgcgcctgacgagattatttcgccgactagaggccgatggaccggcggttgccgtgtcttcgtttcttacggaggtttccgtcaggaacacacacacgagtagaatcgctgttgaggggcaatgtgcatcaacgctctttgaacagggggggattcctgctctacttcggacgagaaaagaaacggagatgctcttcgcccgttgataaatgtaccagcgacaacgcacagatttcaacggaattaggtttggtatcttcccttggacaagttgtgatctgcgtgtggtcggcagacaaatgcagtgacagcaaatacacgcagacaaaacagcgacacaccctaacaaaacatgtctattgtagatgagcgaccatcgcgctgaccagaatcgcctccgtagcgtcagttggttttctaaggaaaagtgcgcagcgatcagctagcaagaggccttgcaaaatcaaaaagaaagcagagaatgtcaccctcccctcggtagtcttgagtcctaaacgaacttcgcactacgtttctttttcctctgttcacaagcatcaacccagtcatatgcatagcaaggctttcgccgagaaatgaggacggctttgcagattcaacaaacaagctccaacttagatcacacgcctgtttgtggatgacagcttggggggcagatcacctgcaaatcctcctaagaggatgtccggggggtctcaagtaggctacatggagaccatgcagaatgcctagctaagcagtggctgaagcgagtctaataaccaatacctcatgtggacacactcattttcttcggggagcatggtgagacagattcagggtcaataggggacaagagtgcggtggaaacactagacgcagttctcagaaaacgtcgcaacagtcagctgaagagggagcagcagttggcgaggcagcgtgcatcagcctcccggcattcccaactgcaatggcggggcagtggcaaacagtcagtgacagagcaacgtatgccaggggtcaataagaaagtgtctgctgtattcttgccaaatgcccggtgcctttttcctgtttgccttctcgataaatttatcagcgaggccgtaaatggcagagagaggcgaacaggaatgtaaaaacaatcatcgtctgtacaaactagccgattctactgcaggctaacccacaaaggtatactgaggttggaggtcgaccgcgagctgcctgtacctttctttgtgttgagaacgcagcacagtctgtatcccttcaattaagcgctcttttgcgtgcgactgtgcggcaaaaacaaaccccgaatggagtcacacattgacagcgagacaaaagactgacaatgtcagtgttgtcgctggacgacaggcctcgagagagaccatgtttcacgagtgctgcaaccgtgaactctagcataaatcaggagtctgttttgccttaccagcttttcacggagacgccggaactgttgtttccgtagccgtagctgcccatttgcctacaatactttttttcggcttttttcgtccctccttgccgcccgccacatcgggcagtgccctgcagaatccagacagaacagcgcagccaccagaacggaggaaaacaacaggtcgtaccgtagtcccgcgccaatccgttcctctagacggcacagattcagcaagagttaccggcatttccaaagggtcccttcgatatctcttccgtacatgccagttttcgccctgtcggcagtccctccctctttgcggatgcctgacgagacaaattaactcaaaacgttgaacacacctgtatgccaggcagatgcaatatgacgattaggatctaacttcggcatgcatgtgtatctgcagatgtcacgagcctggtatcccagtctctctgccgagtcgaaccgtggcaggca

SEQ ID NO: 584 - DNA, 2311 bp, Toxoplasma gondii
  source 1..2311: mol_type = genomic DNA
attcgcatatgtatctcgtgcgcttgtcagtcatcatgtgtatgagaggtagaggcgcggaacagtgttcaggtgaagataaaggagtgtatgtgcatttcttgcacccgtctctccctgtccggggtgcgcgtttttaagcatggcccgcgcaatactagactgaaatggatatacgcttgcgtattaacgcaccgtccgtcatcggtgacccacgtgtagacgttaggattgcgcccacacgaacgtgaggaaggatttctgggtttgcgaaggactgcgttgagtgtttttatgttagacgccgcctctcctctgtgtcttttcactttccaggcgtttttcgggagcagaaaattgctgcgggagagcacgtgggatgttgtgctctttcaacttgagaagaaggcgaaaaattacctcaccgacggtcgccatcggttctcagaagtgatccgtttcccgtcgtttctccgcgcatgcccgtcgtctccgtgcggttcgcgatgtgcgttgaccgctgccagcgacggagcttaaaacgccaagcgcatgaagccgagacctatgccgagagacagcggtgaaacgagaaattcaggaagatgcagtggaagaaaagaggcacaggaaacggctgggaacgctgtggcctctctcttaccactggctgtctttttttctgtcatcaacgcaagaggatcggagagatctattgtcctctcttagcagagcagcttcatacggtgtgacatgcagagtcattacgtgtgttttcagagacacgtgaaaggagtgcctgcacatttacgttggagacgagatgggttgctcatcgaaaccatgtaaagcacaaaccactcgaattttacgataactggagggatcttctcccacagtacctcggcacagttttctgtgtcgcagacatgtctacccggggtagataccgggatcgatcatcgcacgcgtgtgagagaagctggtgaacagttaagcagacggacgtttgttcacatctgcaaaggcgcacattctcacggccgcacgggggattcgcaggcgccgcaactgccgaaacgcatttcttctcgctaactatcgcatgcggggaaggtgtgtggcgatattttctcattttccagctgtgaatgctgacttgcttcttgtgagctgcttctttcgtccgtgcaaacagcaaggacagccgttttcgccaagtgtaggaactcgagtctccgatgacaccacactgggcacggggaaaaagaagggtggagacaatacgccgccgatgttgtcaaaaggcgaccaaccgaaacggctgctgatgaacgcactcacactcgcttttgctggctggtttccttggtatttaaacacactggaacgttgtgctgtcttgctgagtcactttacgcaaatgcatacaagttccgacgcgcgaggctaacctgctccgacttattgactccccgatcaagaacgactgaatacacagaggaaatgcctcagcccgaatgtcctacatgcagttcgctgcgtatctgcacggcaatccggaggggaagggggagcagcgggtgtaacgttgtcaccagacagccgcccttcacattggtttcgctgctacgcgttacccgcacaaactgtttaggatagcgtgtctctcccgccaacgcgggatcgtggagactgcgtatgctgcagcttatagaagcgactttctggtgtcttgtggctaaatttcgaaagaggattgttgacgcctcccaagttgtggctgcgttgataggccgcattcaagttttccccgtcaccacaacctagcaacagacacgtacactttttcctagttgaacccttgcggcgaccggttgaccgtatcacgaatacgtcggactggtctaggtgaacgtggtgcgacgagctgatcaccaccggagggcgttggctttcgtcgctgaggatgcttctcatcttgttccaccggctgcgacgcggagcaggaacggccggacctgtacgaaacacgagtctcgcgcgtctcagcaaatgcccactggctgactcttccccattagtagaatatttgcgtcgtcgaatgctgacggcaaacaaaacgaagtgtctacagcgtgttttgctgtgcattgcaggctgctttatttagacattttggccgcaaaagatttgtgtttccgagcaggtgacctgggtcgcttttttgaaacagcaggaaaacagcttcgtggtgccacgtagcgtgcttgttggcgactacctttttttcttgggagtgtcggcgaaa

SEQ ID NO: 585 - DNA, 1445 bp, Toxoplasma gondii
  source 1..1445: mol_type = genomic DNA
ctctgtccacctgcaacatgggacccatcttctgtctgtcaaactcttcctgtgtattgctcgtagtttcgtcaggtgccctcatttgagctaacatagaacgaccaggatcgtcactggtggcgtcatctcgcttccgtcgcctctccggcccaacaacggttccagaacagctgttgttgcattgcgctttcgaaacccggaaactctcacggtagattcgttgacgagcttcttcacaagtgggcgcatttcctgaaagacaccaagtgcaggcagcgggcacaccgctctctgtaaacacggtgtcgacgcagaaggcactctaatttgaacagcatgttgcacacaaccctcctgttccaaacatctcctacatgcagcaagagcacactttgctcaccttcattcggagatccctgaaagcaagcgccactgttcgtcaaacaaccaacttgcttgtcgtccagatgtgacactacacctgactgcggtgaaccatccttgaaagcaagcgattcattctgttgagctcctccagacagaacgcgttgctgttggtccattgctgcatgaccactccaggaagagagttctgagaaactgtgttgtacaattcacgataaaatacaaccgaaggtcctgttgaacatgaaccatgacagtgctcacggcggcgcgatcatggatgacccgctgaaacaaaagtccccaagtacacggaggcggtccgccgtaaacccttctactaccgatgccacgaaatgaccaaagcgtccatattctccgagttgcacgatgaaaaaaactctatatgctgtcggtgaatgactgtgtacccgcgttacgatgctgttgtacgccccgctctttgctggcgttggggctggcgcttcagggaaccattctcatcaacttttgtttccaacccctcctcgaagcgaaggggtgaagacggtaggctccatcgagaggattgggtaagatgaacatatatggtcggatgagtgtgcagcagacaacaacgattaatgagcacagttaaaggtctctaattttgcgtcactttgctgatgaggtgcatgcacggcgtcgcttgagggaatgtttgcagtctgcatgcgttgcgttcaacggtagcgtagctggacaccgcggctgatgacctcacctacgggttcgccatcgttcatcaacgcagtgtacgcatatttttctcaaaaagataattcttcggaatggtttcacgttgatgttgcataatttgcctttaaggctaagctatcctgccttgttttgcggataagcccgacaaactgaaggagccagacggcaaagccgtctgggctgcaaactttgcactgaattccttctgcataatcgcagatcccgaagagtccctctcgaagaccaaaactgccagatctgcattataacactgagaa

SEQ ID NO: 586 - DNA, 1454 bp, Toxoplasma gondii
  source 1..1454: mol_type = genomic DNA
gcctacgacctcatttaggagatgaaaagtgaaattccgcgtataaaaagtggaaaaatagcgtgctactaaatcacaacggtgcatgcacacattagatagagctactgtacactttagctagtgagaagaaacatcgttctgtcttgtcaaacgtaaacagaagcgttgtctcgtctctaaagtgtggcctctgttttgctatacgcgagggtggtagttcgactctgagatcatgtttataggcaaaaggcttgcaacggatgcatgatgatttttacacctctctcatccttgtggactacagtagtcctgctgtcgctgcccacggcacccttataatcccaaccggccagagaactggcggcagcgaagccaaaaagaaaaatgtagaagaagagaaccatgcacgccacatgacagaacgctggagtggaaaaatcgggcaacaagtaaatgaatcgtgctctctcttggtcggcaacaggaaaattcgcgcgtaaagcgacatccacgtgctcctcaagataaaggctgtgtggcagtccgccagacccaccaggctgcctcatcatggtggtttcctcttcttttgcatagtcatggaaaagtccgattcgccaacgtctatgtttgggaacggaagggcgtgggactttaatgagagcaccaagccagagcgcctagattcctcgttcgaattctatcttcctcccactgtcatcctagtccagagtaagctgatgaggaccgagacaaccactactttgaaaaacgcaccggggattcgcctaagaaacgcgaggaaagtttgatatctccggcagcgttatcctgaacgtatcgaatacgataatcagactctactgcttctcagagttgcaaggagactttgtatgatgttgaactgccgctcaccacccgacacgctcactcagattcaaatactgtgcgatatttccggaaaacgagaagcaacgcctatagagtttcacctgaagacttccctcgtataagaaggcggcctcgtttaataaggcgaatttcatcagtttaacaaaccagcccctggagggcgttaagcctgaccaacctccgggccggcagcctgtggctcacgcgtctgcatctcttctaagagaacgcccaaatgcggaccttcacctggcaaatccataccccttggacgaagcatccgaatctgtattattgtgtaaaaaacgtagaagggctatgtgaaggttgaactccggaacaagggaacgagaaaaagcggcatgaagaggaaaaacgagcacatgcacagaccctcatacgatggaagaacgagcgcatgcgcaaaccctcatgcgctggaaaaaaacggctgccgcgtacgccgtgcagagacgacggcagtggagcaagtcacgcgttaaaagaatgtgtcattcgcgttttctcccagtttgcaa

SEQ ID NO: 587 - DNA, 4370 bp, Toxoplasma gondii
  source 1..4370: mol_type = genomic DNA
taaggttttgaatccatggttgtggagttcctccagcaacccttcctctccaatgacgtaaacaagtgaatcgtcgatttccactttctcttccttcgtctcgttcttctccttcgccgcgttttgcactgttcgcattttcgctttttcttgtcggaaggcagcgcgtctcttctggaggtaccagctggcgacgacggagctgcagacgacttgttcttccgttgcatgcacaccgaggctctccagtttcttcaagaagcctctgcggctcttcgtgctgttgttcgtcagaaagtagatcttcttttgctgcgctccagagccggacgccgaagacctgccggcgtcgtctgggagttctctctcctcctgcttccctccagaggctccgaacgcgttcagcaacttcgcgactcctgggagcagcttgtcgccatgccacagaactccgtcgcagtcaaagagcaggacatcgacatccgcgagaaactctgcgccggtctgctgcccgcccacatgctttccttcttcgagtgcatgcgccggagcaagaggagtcgcagtctccgctggcgcgcgcgaagcgcgactcggaacaatcaaccacggcaaaggcgcagagaggagcgacgcagagggagaggccatggtggagaaggaggagcgtagagaggagggcagatggcgaaaggaagaagaacggcacgaagcgagaggcagaggaaaaggggagacgcaaaacggtgaggaggaagaagaagaaaagaaggaggaagagaaggaggaagagaaggaggaagagaaggaggaagaggaagagcagcaagggtgttcgagtgagagaggtttgaggcgaggtacagcgaaggcaaacggtttctgcagacagcggtggaaaggagacgaacaggtgaggcggcagggaagtcgacgcgcgcatatgctgcaggtcattggtcgttcgccgaagaaaccttgagagaaaccgacgcactctcgaagaaggaagctcgcaaatgagaaaaagagcaggacgtagatagagagtccagagagaccaatgacaccgaaggaaacagcgttgtctgcgagagacgcagagggccgcgtcgaccgtctcgaggaagaaagaaactcgcgaattgaggaagaaaagaaaaagatctctgcgctgaaaaaatgaccgccggaagaccaaaggccatctcgcttttttctgctgcacactgcgaaaagaagacctggcgcggtacccctgtgacatgggctttgctcaatggctttttaattgtcgcttctttcgtctccatttcctgcagaatcgcaagcgttttcgcggtgttttctttcctaaatatgcagagcgccgtcacttctccaagctctcgtggaggaagcggcttctgtcgcggtagcgcggttctggaccgtctgggcgtcttcctcgcctcccctctcctgcgacacagaaatggcagtacagatgagtcgacttctttttcttacgcttgagccagaaaaacgaaagatgcaggcaaaaattgctgctgccctccctccacatactcttcctcactgctctgcatgcaggtcagagcacacacaaagaaagtcgagagagacagccgagagacgcaggcgagagacacaaggataaacgcgaagcacaggagcggcaaaggcgagacaggagagacatacttgagataacaggagaacagggaagaaggcgagtcggatagatggaagagaaattggtagacgcagcaggagctaaaggaagcaagagaacacaagtgacctaaaagaaacaaaagaccgagaaagagaacacgagactcacgttgatgtcgttcgctgtgaacaggccgctagaagtttgccggagccagaggagaggagacaggggattctgttttctcgttttctgtccacgaaaaggaatctacgctttgttagggagaggaggctgggtgactgccacagtgctcctgtcggtgcgtgtgcgttcgtctgttttccttcctttttcatggcggaaggagtcctgaaagagagaattgcatgtctgatcaacgaagaagcgtctggttcgccgcactcagaaggaacaggcaagcggggagtgatgctgctgcctatcgaaatcgctcaagtgccagaagcaaaagagactttctctcggccccaagcactcaggaaaaagaatccaaaaaagatccaagacgctccacaatgtcgacatttctcagagtgctactgagttgcacagacaggccaattgtcatccacgcataaaaacatgtatatgcagatacatggagaaagatccacccttcaaagggcgtttcatccgtatgtgtaagatatatgtgtgtggagagaatccctaacttctagctatatacagatgcatgttgatctacagacaccaatacactcacacataaatctgaacaaagacataattatatatatatatatatgtccgtctctgtctctctctctctctatatatatatatataattctatattggatttttgtataggtattgatatatatatatatattatgtgcatggaatctgtgtgtgtcggctttgcgagtgtggagcggggagtctcgcagtatgaagttcgcttcgacaagaagctggagaagagcgagaaacatgcgaactgtttttggacggagaccaagagcgtctggacggagaaaccgagtctgtgaattgtcttggggtggagtgtagccaactgcgcgtcaaaagctagcgagtctgaggttcgtttggaggcgagaagtcaagtttgtggtttgttgaaagagaggagacttgcggtgctgttttcggcctacttccccgcggaaacgcgtccgctgtgttgccccaaggaggtctgtggacgtctgttccggccgttctcttgctgatgcgcgaggagaagagaaggtatgcgaagacgacaggagcggggcgacactctgcaccgagcgaaagtgaaaaagaggaaagatcggcagacgcgctttcgtctggaacggtgtctctcggcctttgtcttgagtctgaggaaggatgagcagtgcgtcttctttctcggatgtcgattcgaaaaagttccctcgctcccaaaaagaaacttttcctccacctcttgataaaaaaatgagaaaaaaaggaaacggtggacgagagagagggtcctgagaggaacgcgacacccaggactgttcgactttcctttctctctctctggctctgtctgctctttcttgtgtgtctccctctttttcttcctctccttttctttcgctcttcttctctctcgtttctccctctctccctctctctctctctctgccatgatgaggtcaagtttctggaatgtcctcctttttctccttcccgccgccttcttcgcgcgcgttcctctgtcctttcctctcttcttctccccttctactctgttgctttcgacgaagagaggcgaaaagagaaagagagaaaataaaagtcaataaaagtcacctcccgccctgcgtgtctgggctcactcgcgacgcgcggtgtcttggtccgcgctgcttctttacatgaagggtgaggacgctgtttgagaagcgaagaaatctgtttttcgttcttgccaaatgtgcaagacaaattgagagctcgcgacttttgaaagcctcgaggaatccatacgccggattcagcgcgtcaaacttttctgtctcctctgcttccaccttccttcctaactcagcgccgttttttccttgccaggtattctgtggtctcggtctcggcagcaagcttgaagcgcgcactggcttgtcttcctttcgcgcgatgaaaaccgttttctcctattttttattttttcctgaaatcgtctgtcgcgcgcagtctctgtagagggaaactggggtcctttgcaggcgggagggaacaaaggcttgattgtgttgtcgggctcgttgacatttcactttgcttttcgagacaggaggacgtctcctgcgactcaggtcgcaaacgaatgaaattccccgctccttttcttttcaacgcgatgcaagaaatcaagaaacggcgcacaaggtcttttctcacctagccaacaagcccagggaggggcgctaaaatgcgctctcttctttcttccactcttctttctttcgcttgctctctgccttccacactcttcctccgtttttcgcttgctctctttcttctctctgcgtgctttcttcgccttttcctagccggtttttctttttctcctttggctgttttcttttcgtcctctttcccctgtgtctcctccgctcattttcctgcagagagaggaggaaga

SEQ ID NO: 588 - DNA, 2988 bp, Toxoplasma gondii
  source 1..2988: mol_type = genomic DNA
ccgaaaggtttactcgtacacctgctagaaattctgttgcagtctttacagaacatttcttcattctctctgaacgctgttttaagctattgcaacgcaacacggatgctactggtgtaaagctggccgtcgtgccgacgttagtttgctgcgaagcttgtagcctgcatgtgaacttttttgcataaatcgcgaagcactggcgatcggtaggagcttgctttaggggtcaacggttgcggccgctgtagccgcgtcgttcccacgtgtcccacgcccagactcagatgatgatgactatagcttgaaaatcacgagagtagcagagatttaatagataccaacgatgtgttcttcagaaaaactgcaacgctggtccctacacgaatagaaacaagcagtttggtgaagttacggttttgacatactcacgtgctgcgtgacacgttcatttgcggcaggttccgctcatgcgccgagacacggttgcctaaaagcacatgtctctctcatcctgttgtagtacactacttgctgaatcgcccactaatcgataggctgtgagggaaagtgaatttggacatgatagttcagattaggtggtttccctgtctggagtggctctccctgccaacaaataatttgcaccttctatgttcacgttaaatcgattaaacccatgtgggtgactcgagataaacttgccatcagcacgaacgccgtgagggtggggtcaggaaggaagctggttggtaacctctgtgactggtgcgacaggagtatcaaccctaccaaaccctgtctggctggcgagtgagtccaaattaatgcggctgttgagcattttctcggtacgcggatcgaacgtgagcatcagaggaaagaaaatcatttcgcctttggcgaagacaacgtgagcatacaccacatccgcaaggtacctctgaacagcactgtctttccacaatgcccttcaggcgtgagactcaaacactgccacgtacggatcgatttttctcagcggtgagaaagcctcagacgcagctttattcaatcatcaataagcgctttccgcttccttacaaacattcatttgacacagttttttccaattcgtcgtgatgaatcaaagtacgttgactacgctgggtggccaaactgtagtcgcttcacgttgatcggtcgtctcatccttgggtaaccgccaagacttctttttaacggatatgcaaagtgtgacctccacgcatatgagtcaccgtgactgcgttgttgtttttaatgagcttctcaaaaccttgttgaagcaacatattcaggaccgcttatctttggtgccttttcgccgatgtggtggagcgcgaggtgcatggtgtgtgcgcgcaccacatgcgaacgtggcacagtgcactagactacgcactgttcgcgatctgggacgaaacttgttagaagtttaagaaagcaacgaaacttcactaattgctagctccggaaggcgggagattcatggaggcgcggacgatgtcgtaatctgtgtgttctttccccggctttcccatttctttaagggttggttatcccgttgagatagctgttctcaagtcgtgctcgctattagagcctggagggcggccccactattggcgctttttccttggtgtcgaatgtgagcccttttaagaaagggaagcgaattcaatttaaatgtgatccgtgtaacgtttcataatgcacacctgtcaagccattttctattcgtgtctaaaatgcgataatgagcacccttggcttagacttgtcaacgcccggttaactggcagcttttcaaaaccttgtcacaaacacaaaaacccgtcttgtcagttttttaactatttcgcgctgggggccaaatttgggaaaaagtgattctccctttagattcgactgctggattgactgttggttcggcctgggatggtatttttagattggtgcacgagatcggaaaatgtttgcatttttaaaccgaaagttcaatccaactgtgcacattttcaccctctttttccggctggccacccttacttttccgtcctccctagtccatgtgctctctgtcttccatcattcatctttgatcatgtctgtttctgctcgcaatttgcgctgcaaactgcgacgctaattgcttggaatggcccggtggttttcgggctaaagggaaaagtgaaaaagacacctaaagtcgtcgtcaaacctactggttcgtgcgcataactcttcttgttgtgaagccacaaagaaaggggaaagacacgcgatgactttgactgcgggttccaccggcctctggcatcatttcatacggttaccgtcactctatgcattcaatgaacgactgtttaacttgctgattccagccccctacccgtgttctggagcgatcctgcgttgatgcagctgtttcaaggaggtctttccagtgccaacaacttccgtcaaaaagcaatctgaccccatatatcaccggccgggtatctcgtcggcgcacctcccacaccaactcagtattgttgcttccaagtttgttcaacttgccgtgctcgtttttcttcacccatacagggcttttttcagggctttcgcagcttcatggtttggctgactctcaaaaggtgacacccgtcacggtagtcacgatcagtcgagttcgacgaccgtcctggagaaccaccgaggttcttgtgttctccagtgcgacctttattggattcaatactggacacactactccgtgatcatgtttgtgtcagcaagttgttttctgctggaacttataaagaattgcggcagcctgatttgcgttacgctcttgctttgagggacttgagcttcggtatctgcgtagatcgatgccccttctgcgtggattctccggtcgtttgtttccgttgtttctaatggttgacgtcagtcgcaattgaacatttgtatctgtgacca

SEQ ID NO: 589 - DNA, 3517 bp, Toxoplasma gondii
  source 1..3517: mol_type = genomic DNA
gtttgttcgcctggagatgcagaggcgtcgaagagagctgaaggagaatcggttctccgcacctttccactttcctgaggagctttctccactcttggagagagaaacgatgatgcagaaacgagggtcgaacgccgcctggtttcgccaacgtgaccttgacgagacgagacggcatacaaggggtgagacggacccacgaggttcgccgctccacttcgggcttggagggcggagacgcggaaccgagaggccctgctctgcgtcagaggagcctccgcctcccatgttcgctgtgctccaaaagatatttcgagaggagtggaggcaatctgaatgaagagcggggcgagacgcctcttctgagaaaatggaagaacggagacacgcagatccttcggcgaaatgtcagcaacgccgccagagggagctagacggacagacagcggacggggggacgggggctgtacgggtgtggccttgaacccagaggtttctagtacatgacgagagaacacaagcaggaggcaacacacagagaagagaaggccgagcgacggagataaacccgcgaaaaacctcgcgagaaaggaggaaggagtgcgcgccagggtagcggcgacagtcgagcagctgcgaactggggacggttcagctgcctgcctctgagactcccggatctgaccaaagttctcccgctgctgtagcgtagcgatccgacagaccaaatggttttgagaggccacagccttcatggtgtcaaacactcgacacttaggagagacataggcgggaaaaggacaaagtggaaggttcatttgcagcagtctcttttgggggttccgaagtcgtttttctaacaacccgtgaccttttatttcctaggactacgcgtttttgcgtgggaccctgaaggaatgcgttctacacgaggctggcgaggctccagtctatgggaaaacaaataaacgaaagcaggacgggcggacgacaacacgtcagtctctgcttttcttctcaatgtggaactcggaaacacacgcggaggagagaggagagcggcctgcatccctgcatccagtcccgtagagtgtgccgagaaagacgcctgtttctggagttcggccacgaaggaaaggcaggaaatcgtagctgaaaccccgtttcatgcagacttccatctacaccatttttaccggccaccgactttgtgtggagtgggcgtgcggtttgaaatgaaatgcgcaacgccagtaacgaaggggaaaggcggtagcggggtagagaagagacaaacagtgggcacttccccacgaaggaaaagacggtgggaggggctggagacgtacggagacaaattgtggatatttcctctgttacggtgagggagcgagactaaggaagggaaacagatcccgccaacggtgtgtcttgccagccggaacgcccgcgccggcgggagaacaatgggtgtctgttcacttcttgggttttgacaacacacaggcggaaagaaaacaaagacggagaacaaagggtgtagttgtctccagggcagcttgcgctgtgcgccgagacaaggaaattgcagcccgcatggaccaacggagccccctcgcacactgagacgtgctccagcccttgccggagtgagacaactgcagaaaaatgcgcatttctgcacgaggtggtacagtcaggaaacgactggctgaccgcgaagagaaactgagacaccccagaagacatatggcaagaaaggaaaccccagagttttatgggggacgacttgtgtggagtttcgcacctcaaccagccttgaaggcacacagggattgcagccttgcaagtcgatgtgcgccttccctagtttcggcctcgaaggcggaagtgcctcggaaaatctcgcctttcagaaaaatccctcggatccgcaaatccgatccgttgaaagcaagcagtgcgtcagaaatgtcaactccaacgcggagacagagaccacttgtcctgtctccgttcgctagagcacgttagcgtccctcactaaaccctgaagcttaaactgtaaacccttttcgcctaatgtttgagaaacgcagaggcgcttggtggtcgggctcgcgcgcgccgctgctcaaaccgcgctgctgagggggtggaatttgactctcgcccccgtgcacgggcgttcctcggcgcagtctcctttttttcaaacacccgcgagcgatgcaaagctgcccacgaaagttcagcagaacatcacagtggtgtttgaaacgaacagtggaaagtgtgcaaaactgtgaatgttgcgaggggggctgtctccggtaaactaacttcttaacgatcactcggccattgatactcgacctacagctcgagaggggggaggggcgaaccgtgcgtcgacaaaggcggcagagaaacgctacctgctaccgtcctcggagttcaaaggttttgcctttgtgaaaagtggcgttaccttttgaatgagttgccccgcttccgcgaagggtctgaaatttttgtgtcctgaattgctctcctacgaaagtgctttttgccgcgaagcgccgcctggtccagggccccgttgcacaagcgcacgagccagatattcattcgcgagctcgatccggtaatttctccacacctgtatgcatcttcgcttgttttgggtattaaggctttcctccgactcacagaggcgtagcagaaagagtgaaacacaacgagtcgcgcggagagcgacaggaacggtgtcatccgtctctcgagaattgaggctttttgtgttaagcgagccggtaggaatgcccagtggacaaaaagatgaatctgtcagcgatccgaacttcacgtgcgggggtttattgctggaactagagggtttccttgctccagcgagacattttccacggcgagctcaaccattaagtgggcgccagacggtgttttgaattgttgcccgacgctggcgggccttgacacccgtgttccggtcccgcgcaccgagctggaaaagtgtgcttttccgcccgctgtcggccgcgagaaatcactggaattttggcctccaggtttcttgtactctctatcctccagaacatgagtcagttcaacggtgaagtggctattttcgtgtgagggtttccgatactgggtctctaccggttaggccatacctcagtcctgcagatccgtaccttcagtcccctatctaacccccccccccccccaacacacacacacaaatgtgcacttgaggctaactttgtctttcgtgttctgggcgatacacagcgcggccagccttcgtgttcggtcctagtgtttggtttctgttagaggggtagttcttgggaacacgaagagggtcaaactccaagtgctcgtgcatcgtggctaggaacgcaaagctgcgatatcggaattatgtgccctgatgtactttggctttttctcactgcccgtccttctgctttctcttcagctaactcaagcacca

SEQ ID NO: 590 - DNA, 1595 bp, Toxoplasma gondii
  source 1..1595: mol_type = genomic DNA
aaaaaaggtgcgacgtttctgcatggccaaagaagacgcgcctggaagaatcatcagaagcaagcgcggtcgcggccttcatacattcttattcagttacataatgaataacggaagagacgcccagaagattcctcgtatcattgcacgtgcaagtaattaaaaggcgaccttcgcgtctgggatgttctggccctcacacaggaaggtgcttgcatccagcacgcctacatctacgatgcaagacttctcgaggaatctacgtgacgcaggaatgtggcggcgggcaccacaggagacacagcagtgatgctccttcacgtgaaagagtgttttccgcctcccgctacgacacagatctgtttaaggcgcgatgaatgatcatttcacgagcgtaccgctgtatgactccttagaggctgcagtgggagcggtcacggaaaattacctagaaaagaaccagaatgtgcgctagacagtacctttcacaaccgccctgaaagcgacctaacgtacactggctcccgcgttgtgttctcacgtaggttcagtgacggcacctattctcccgtagcggcataccggaaaccaccagctgcaccatgattactttcccgtcatctggacgcacacaagaacacttccatttggcatcgacattttgaccgtaaccttgattgtttttagccaaggtcttgaaccgtatttcatgtcgtttgacaactgggcgctacgccaggggcttggctgagcccccgcgcaggagcgggttgtcactacaaaagagaaacctgaatggattcacagaactcttgacactgcaagaaataaaccattcgcaaagacatgcttgagaaaaaaggagtcggcacgtgacgtcagtgtagcttgtccaccttcccggaacatcttctcacgggaaaactccgaacctttcgatagattttttcaaaacgttcctcacgtaaaaagtgcatgtttgcagttcaacatacgcatcttgcaatgaaacctgaactcgtaaaaccacaagcacactagagattgtttccggcatctcacgcatctaatctaaattacgaagcgatataacatggtcagcagaatgattctttccctcacagaacagccagtttctgaggcggggcaagatacagagtgcagctgcagtggtcccttgcacagacgaaacgctgcgccttcactctcgcgcttacgactggcgtctcttggcgtcgctttgccagaccgggttgttggtagtataactggcgtatgtcgcaattacaaagcatttcgcgagcgttgcttgcacagagcttctacgacggaatgagcccctttcattcatccggttttctgcacttgtgttttcatgaatgcagcggcgggtggcaatcttttgttgttttcttcgttccgcatgccggccatattcgttggtggctcgttaccgtgcggtgcaaagcgtgaaatttcttctgattttcccgaacggtgtcacaattatactatctgcgctgccatggcttgtaggaatttacgaataaaacgtattcagtgcccagactgagtgactttcagcaggatcaaca

SEQ ID NO: 591 - DNA, 3919 bp, Toxoplasma gondii
  source 1..3919: mol_type = genomic DNA
ttcaaaggacgtcgacagtgatgtctactgataatgcagacacaggccacagattcagaccgaagcatacacatacatgcatatatagatatagatgtacagatatatagatatacagatagagatgtatactctggcctactcaagaaggcgccttctctcctcgagttgttcaaaggcttcctggcgactgccttgacggattttctggagaatgtgcgtcaccgcaggtcgcgcggctcggccgtttgcgtccctccactttctgcgctcccgcttcggcagggcctggtgaatgcgaaagagaatctctgcaggaggcacagcgccctgctgcacgtagcgcgcggccgcaagctgcaggcgaagctgctcccgaatttcggacgaagacaagatggagtcgtcatcgtctccagaatgctcacacgacgcagaagacgaagacgcagaagaagcagaagaggaagaaaaggaagaagagttagaaaagaggttcgcgaaggggtctctgggatcgccaaagatgccgttttcctttccaggagagagcagcgggggcggcgaggcgaggtctgcatgcgacggcggaggtacggtggagagagaaggcagagccggcagaggagaggtgacagaacagtcgccgttgattgccgcttccacatgagaagaagccgagtcggtgtgcaagtgagagaagaaggcgttctgctgctccagaaagtcactcaaaggtccatctgtgtcaagacgagaggaggcggacgccacccgattcttggagctcacctcaggtcttgctgagggtgaaaccgccaccggaccccctccctccatctcgcagtggagacagcacgaaaatcaaaagagagaagaagaaaggaaactgccgacgcggaggtgcatctacggggagactcgaaggcagaggaaacaggcgaagaaacagagcgagaaaaagaagaagaagaggggaaggttggatgggcaggcggcgtggaaaaaccaaggcatgcagaacggcgagtgcgggacagtggggtgtctctcgttacagcaaagcggtttctgtcttcgtggatccacttctttcgcctcccgcccctgcgcctctcgcgaacgagaacgcagtcttcactctagaagagcgacgccaagagaaaagggagtcgggtggagacaggaaaagacaaccggtgctgcatcggcaccgaagctcagacagaaactggacaaggcatcccagaagctgaagccccggagatgtggagaaacagtgggaaacagtgggtcgataaggaggcagacaagcaggcaggaagagagtagtcaagggtgaggaaagggacacaaaatttcgaaacaaaagggcatgcatgcacacaagccgagaacggccgggtccttcctcctcaaccttgggaactgggaggctctttccagtcctactctgcttaccggtcgaggcggaataaagcacgatccgtacaaagaaaagatggccaacgagtttttcttgactaagcgtggaagacaaacgagcgcccaagcgagaaaggaccttttccccgatcgcgttcagttattgtccgggcgcttttttgggcaggacaaagaggatgactcatctcttctgccttcactgcatgtcatttttcgaagaaggcagaaaacctgctcgtggaaaaagtgccgagacacccgaaacaccactgtccgcagtcgaaagtagacagcaacgactttctctcggcggcagaggtaacggcgccagaaactgtggagacatggatcgaaacacgaaccagcgacgaaggcgaacggagaaaagaggtccgaaacagaaaaaggctcttattgtcatgggacatgcggtctttggcccaacagagtggaagactgaaccgaggggaacatgttgttctccaccccgcctagcgagtttctccgtcaactgcatgcagctcgtcaagataactaccggtgaagagcaatacgcgacagaacacccggacaacttcttcttggtgcaagagaggatgcgtcccttacacaagtggaaatcgttatgagaaaatcgggaccacacaaaaaagcggcggaggaacacagttcgctaccaaggaatgccttcagcaacagggagagggggcacccgccaccgggaaaaggagacgagagcttttctgaaaacaagctgtttgtgtagcgtactggaaagggcagaaggaaagacaatgcaagatttgctctcggccttgacgcaacttctgtctgaagacccagggggactcactgtcaagacctcggctgatgtgtttggccgatcttggtttttctccgttccgatggagcgtctaccgtggcgataaagatgcgggcatggcccagaacggtggcctgcagcaatgatcatttgctcagtggtggagatttccagagtccatgtggcaaagacctgggacgaatctgtcttcattcaaggacagtcacctatcttcaccgagactggctgcctacttagtgtgttactgcacgtaaatctgccttttctgaacggtgtacaatacgggtcactgactatcgctctgttgggcgaagctttttggagtcacaaggaaccttgcttgacggccgagtgtgaactctctgctcgaaaacattcagcatcatgatgccatgtggggaataccaagaacacagccacatttaggcaggactccgaagtcaatctaccccacggtctgaattcgatctttctctaagcggcctgcgttcttccagggaggaaaatgcggaatcgttgcatttcgcatttgctggtgaagaccaaaagtgcagctacttttccttaggacttaactgtgtgccaccctatcctgtcttgttcgttcagtagtatgcgttctgcaacttgaaatctacactcataccagtcatcaatgctcggtacgcagttgtcagcacagttgggcgatttcctggtgtgtgtcacagttctgctcaatttgagtagtgttgttaagagctttatggggcatcgggaatcaaggacatttcttctcaggatttaggtatttcgtatcactgaaaatagtcctgttcagacgggccgaagaatgctttactttatctctacacgtgtcgccctcgactctgtttgctggagcacgggaattgcgaaatactatctgacagttttcggtgaggagtcatccgctggtacaggctaccggatgtcagcaatgttgcctcctgcagttatctttcaagtccactgccgagcgttattccacacggttgcacggaactgtctaaagaggaggaatctcaatgtcacttgcccctgtaggaaagttcacaacaaatccgtttgataatagcaggtacacgggatccgggtccgtaagaagccgcgttctgaggatgtggaacttttggatgtcgcactgcagttaacactagcgaaaaatacgccggctgtgtcaaacgggtgcaaccagaagatctagcatgagtatgagttgtctgagaaagctttgcaacacgaattaatcaggtggaccaaatcctgcccctttgactccagggtctatgtagccggattgtcttcctgaacgtggaagcttttggttgccctgatcaaaaacatgcgagtttgcacagccgcggggaaactcggctgcttaggtattctgtgcatggttcgacttgctgctgcgacaacagttatggaaaagctaggataccaacgggaaaatcatgcttttcgtacgggctcagtaacctcctgtgctagtctattttgtgggcattagcgttgtcctaggactgctacacgcgtaccccgcgtaccctcactgacatcgttgaagttgcttcatcgacagcttcactgcgcagctgaacgctaaaa

SEQ ID NO: 592 - DNA, 1970 bp, Toxoplasma gondii
  source 1..1970: mol_type = genomic DNA
ccacaggagggtcgatacgctcgaggaagaaattgggtgcgaagtgtcaggcgacaatgcaaccccttcaccatccgaagacgtgtgcccgtctgattcaaaagcgactgctgatcgggagaccgaagcatcgtcttgcccgtgtgttggaggtttggacgatttttcagtgtcatcgtacggcgacgcaagggatatcgcggatgaggatgaggcgacccgcagcgcttttgaacgctgaaagagtgccttcaccgcatgttcgacaatttggacgcgctggccttgacttgaactagaagataagtcgcctcgggcatcttcaggtttcaacgaggcgaaagccgaagagttgcgttctgcatttgacggaggcggggtgtgtcccgcactatctggcggtactgcgtggtgcttctttttcgaggaaaaaaaactcttcccgtcttcagccattttttcaagggaagacagggggcggctagttttcgtcagacgggttgcacagtcgaaaccaaacgaagaggttacggtctctctttgagttccaacttcgacaaagtgagggaggggatagcaaattgtctttctgcttgggcaggcctggctccactagattggtgaaacctagctggtctcaaacacgtggggagcctctctgtcacacatctaggagactgtctgtacctgtgtagccaagaactttcgctcttcgtatgtcgggctcccgagaagaaaaaacagtgcgtacttcacagaacattcaggtgctcgtgtaagattgctggcaatgcttcgatttgtctctaaaagcgatacgagataggatattttcaccgcgaacggcaagcaagtgcccacgagatgggatttggaccatcccaaggtgatgggaaacgagcgggaaagattagggggaaatggcgcatatcggaatggtcaggaacgcagcgacgtcgcatgttttgctgcgatcgaccctgaactggcctgcctgttggcttgcatgcaaatacaacagcactgggtcaacgttggcggcaaaggaaagcccaaaacttgaagatatgtgaatttagaatgaaatgttccccctcgaatacgatccctctgtcggagcagcaactcgcatcctagaaagaagaatctccatttcggtggtgaaaatagtgccgccacgatatgcatgtaacagacaagaaagatgacggtgctggggattttggcgcttctgcagttcgcttagatgttgtgggaaggaaagcgtcaagcaaaaggtagagaggagaatactatgaacctcatcatttggtggtggataatcgtgtgcaagctggggactgagcagacagcttcttgcctcgagacatgcctgtacccgcttcacttttgccggcgacgcccagcgcgattcgctacatggttcgctcatcgggtgagtgcggtcatgcaacgggttttggttaacaccgacagacacactattctgatgatttttgagaagtacttttctgagaaagttgaaaagaaaatgaattttgcctcctgtcactcgggtcccttgtgttgatggagttggaaattgagacggttgacttctactgtcttcagccctaccggtacggctggtagtccacggcggctgcttcgcctttcccatcgaattggtttgtggatttcggtggtttcaccgagtttcgcgccggtgaaagagacagagcagagcgagtgtacgaaatctgtcccttcgcgttctgagattgttactcatgtcttgcaagcttgtggtgatgtccttatgacttttctaagcgtgccacgcgccaagatcacggtggtgatgcagtgaccgcgtttccacattgttcagacacttgttcttgcaccgctaaactcgcttccggggtgtcattcgcgtgtttaacttcagcgtagaattttgttttcaactggtctcaaacccaagaaca

SEQ ID NO: 593 - DNA, 2478 bp, Toxoplasma gondii
  source 1..2478: mol_type = genomic DNA
tctacacactcagcgacataccggtatctatgcgtacttacataaagacatctgtatgtgtatatatatatatatatatatgtatgctcaggtagagacactgttacagatgtagaagggatgccaatagagattttttgtgaatttcttgtggtctgtgtagactgagcacaccatcgagttttggcagaaatcaaaatgaagaggtgttgttttttctgcatctttgaagtcgcacaaaccccttcgcgcccgcagtgacgcagcaggaggcccccttctgctgcgtttcagcgccctcgtggaaacgcaaggcatttgctccggcattgaaaaagtctccccatctgcctatggacgttttcacatcgtttttgagcgtatagacgaacgtatacgcctgcgcggtgtttgtgctggaactgagtgcatgcagcgcgtcgtacgtggaatgcacttttctttgcacaccacgcactcaggagttttgcctgcttttgatgcctgggccgccacagtgccatcgcgtctacacgtttctaaaggaaacgttgttaaacgcaagacgaagtagatagttttttccactatcttttgcaggagtttattacatgtgtttgttttataaaacagtaataaaaattctgtgacctgagtacgtaggtactggccctgcaattccagcgacacacggtggaagggaaactgcacggcacacacatcgaataaacagagatattctagttcctcggatgttgaatcggactcgagtcatgacatggacggtatgtctggactacgcctctaccgccgaatcatcacgatgtcacttgtcgcgttgtgcaagacgctctgtcttggtttcagtctttgacacagttattttcaggagagagttcatcaaccagaagctccacatcgttatgccgacagggatccctttgcgtttttctgagtgttaagtgtgactgcgatgtacgccgacctccgtcgtctgcggttttctcctttcctcgtttgtgaggcttgcagtctccacagtggtctctagcgtcttcgtcgcaacgagaagtcaccttctcccgtggaggtgatgtctgtgtgttcgtctttctctgtctcgagtctccaccagaaactctggagaagaagcgctccgagtttcgactgtttttttctcgagcctcaagactggcgggaaggagacgaaaagccgtcctttcttgggggcactggggctggcctctcctcgtctcgcataggcagctttgattcatctttcgaatcaactgacaagagacagatgcgcttttttaacgaacaacaaagactgagaaaaaacggactttcaacttttctcgctcggcgaaacgacgcaccagagcgacgcaggaacctcgcgaggcgttgcatgcacgcagagaagaaggtactgcggtttctcacaccgtcttcagcgcgcatttccaatcattttcagtcctccgatctctctttctctctctcgcttcctctctcttttctcgttctcatcccgcagttacgccttgtttcttcgtctcctctcccctctttctcgccgcctccctgccagcgcgttttcaggaagcgaggcgacgaactgcttctcctttctttcctttacacaggagagaccctgtttattgttttcacattgcctgtcgttgttcgcccgttcaaaggcgtatgctttcgccattctacactggtccggctatctccgccgctggtcgtctctgggcttccttttcttctttctctctcgcatggagacgcggacagccctgaagagaccgcaaacaaacgaacgaaatagcaacaggtaccctcgagagagttcagactttttctcttctgcatcttctttctgctggacaccgagacctcttttcggtgcgcatgcagaggcggtcttcgcttccgacggacaggcgttctttcgcgtttttccaagaaaactaggtttctgtctttgctgtttcctctggacggagggaagaaatgtggacgcgcggacggcgtatcgcttcttcgcgttgacagacacccgcagaaaacggagtcacagaataacgactttcgtctgaagtgcagagaattcgatccaagcgcgtttccagctgtatttgtccccgcgcctttccgccgtttgtctgtttctttcactgtcgcccctctgtttgtgtcttgtctctctttcgccttctctcacccctgtcttcctccgtatcagtgttcgctgttttctctttctctcctctctgcgcagccttctcttctgtgtcgcttcgtgcatctcttcggtctcctttccgtgctgctctctgctttttcgagggcgaagccgtctgcgcgagcctcctccgctctaccgaacatctgttctgttccctcttcgcgtcgctggaaagcgtcagtttcactcgtcgagaacaggaagtcacacgcccggcaaga

SEQ ID NO: 594 - DNA, 4936 bp, Toxoplasma gondii
  source 1..4936: mol_type = genomic DNA
tctatttagcgaggcgatttgtcgtcacctttctcgctttttgtagcaagaagcgtcgtgagcagcccgatgctaaatgctgtgtcttccgtccgggatcgtttttcacgccgataacatgaaacccctacccgggtaggaacgtcatgtgtatctatcacaagattgtgctcacgaattcccagttgctcgagcggaagggcagcttctctttcgtgtgcacaactgtcgagagaggcacttcattgtcaacttgctgcattcaaaacgcctttctacgggacaccgggccgccgctgtgcaaaaactgtctctgtcacatccactttctggagagttggccagagaaggagtaaacactcgtacagttgttcgcctatagaggctaagcagcacattaactagatgattgctatgtcaaaaatagtggtgcatttgttgctgttttggattgcactctgacggatagagcggagtggtgctgccgaccgttctcgagggttactatcaagtgggagagcatcgcattccacctttcacatattgaataatatccacccaaacagggatgtttcagatgaaactgtcagctgcaaggtttgggccagctcaggcatgttccgctcacaatacggtgccactttacaaaaaggccggcgtacaaaactccggtgaagaacagacgtcgactccgatcagcgtaacgggatccggcagaaagatcactactctccatgttgcggcattgaagtttccctgttgaagacatcagtaacgctgccgcccgcggcgaccctctagttgtgagtttctatagcttctgacacacctcattaagattcgagatacgagtgctgctaggccgctcgagtccaaggcatctcagtgttcatttcgcacggcactacaggatggcggcaaactggaggactctcgggtcccgcgccacatcgtgtgtgacgtcgctaggctgttgtgcgttcgcgtggttcaccggcaagtctatcgctctctcggtgattattggttagttgagctaggcccctactccaactcttctcgctaagacatcgaagcctttgctcttccgcttgacgggttccatgtgggaccgaacgtagtcagcgtgcgattgaacttcttacaggtttgttcccagagactctagatcgaaatgcacataacccatacgtaacacaaactgcttggattcaactgcatttcactttccgacagaaacaatattccacaaagtgtcaggtgaggattcgagggaacggtacctatcgttgtccttgacaagcctgcggaagcagcgatcaaccgtcaccaagaagggaggaacggacgagaaaataactcctcggttcacagattaatgggcatccgagagataaacatactttgattacattttcgtgcctcttactgttgctgccgatcggtcaaggatctgagaaatatcattgacgttgccgtcaacggtgctcggaccgccattggcgtggacacctgtgtacagcgatttatcgtcatgaaacttgttgggaagggctttcgtcccactatacaccggaccactggcagaagaaatctgcgctgcaagctcttgcgcagagacttttttcttttccgcgatgagatcgatagccgcctcgaactcggcaaaagtgatagtcttggcgcccttcgccttgactttcgtgaagataaggtcggcgtccgttgtcgtgtagttcttgtcaaatgccttgcaatccttacacaacttcacgaaggtacgcccgtccatagcaggcgcatcgtgagtgaaggacttgaacacggcatcgaggcccgacatggttagctcgctgtcaaagtacttccaacggttctgcgccaaggacgtctatagcaaaatgagtctcggaaaaaaagtgtcgggttcgagtcgatgttgtgaacaagagtcttgaggggccccactcgacttggtgccaagcctcaggggtagagtgagtgtccagagacggggagtttgaaaccgcgcttcgcaccttacgggccccacaaaagtgccgccgtctattattcatactgcatcagcgtcccagagatcgatgctgcacccactgcgacctgccacctccgaggcactacaccagcttcaaccacaaactgatatgcagagggacatagtgaggaatcttcaccctactgagatgccagacaatcgaagaacgtcccttttctgtagtagtcttccagcagcgtcggcggtaaggtttctgttcaccctttgcctagtgactactggcatcactgtccacatcagaagtgttccatcagtggggcactgggagggttggtcaagaagctgcacttgtcttcacaggagcccttgccacgtttactctttttcatcagcgaggcatggtcacaccaacatcgtgctgctggatttggagaagcttttattgagaatctctgtgtatgtggttcagtgaggccgagcgagtgaaacagccgagtttgtcgatgatgcccctttctgcattccatatgacagtagcgtgttctaaaactaatggcaacgacgtttacgcctgtttggctaccgtaaacttacgttcatgtttgcagccttgctgacgcatgaagccgtatcctaattcttgtttccagtcactttcgcataggtgtctcattttatcggctgcaacacagacactgatcctcgtgtgtcatgcggaaaccctgcgtggtgtctggaggctgcaagttctgtccaggacttcgctacaagaagtattgtgccgaacgagcttgttccaagtccacacgagatagtttgatataacgtggttaatgaaacatccgaagtccgtatcgggacaattacgcgttagagacaaacaggaaaaacttaccctatctgcgtcaacattaatctctcataccaagcgaccacatcgctggaaaaggaaggacgttgtgaggatacccagtcaacttcccagttactgggaatgtcttttgcagcaaacattcgcaattccgtaaatagctgtatcctcataccttcttccttttaacatatcaacgagatgaacacggcatctctggtctgacaagtccaaaatatgagaatcgttgtagagtgaaggtcatgccgtgaacttcagttggtttttggagaccggcgagcgcgactcactatattcgaggttaccggtccatgaacaatataacaatcaactgagcaagatgcgtactctttggcagcagcaagtctcattgtctgatgcttccggcagttgctgaagcaccgcatgccacaaacatttagatacctacgcagatacaggaaaaaattggtttatgagacccatgaacggaagttgcactccactagcctgacagttacattgaggcggcgctggttcccatcaaccgggcgcatgaaactgtgtggattctccgatccccgagagtccgctttctttcatgtacgcctgacgtgccacacccgctcgagctttggtcgatgctcagtgagccgaataaagagtgagtcttactcctcgaaagagcatatcgttcaggatagaaatacgtggacggagctatttttgcaaacaaagagtcgttctgttgcacttatatctctcacctcgaaaatagcctcactgaccaggatatctagagcttgttccccgagccacttttggcagcatgatggctttctcgaaattgttgagcaaaaatgtcctatatctgatatacacagtcatcttttgagagagtttcatgccaccgtgaggtgtgctggcaggcacgaagaaatggtcggtatctccgcaccgtcgcctgaggcaaccgccaacaaagcacaaatgcacaccacaatctgagacgatttacgacagatgaatcttacacggagggtgcgcggacactaccgtatgacaaataacgaggaaattcgtttatgccccaccgagttgacgaaattcctaatatatgtatatatatatatatatatccactagggctactggggcttgtggccgctacggtggccccaggtgactttgcaaagtgactgggagtagaaaggggtgctcacggacggtaggcatctattgttcggctaaatccacaacagtacgcaagagtaaaagtgttcgagagttctgaaaagccttgctatctcacaaaaggtctactggtctctctcttccaggttgtggttcactgtcccactgtcggcgggctgtttttggctggcacacagcagcttttccggtggtgtgtgtcctttcactctgtgctagtgtttgccagccaaccaagtcacttagtaatgcaaaagtgactaagagattcaacgacggttgcctcagagtatatttgcggtgcaacaactcacgcaggtgttcgcaacgaattcgtgattgtgtgactacttttctcgtctgagcaacacggaccactgcttagcagtgtgctttttccccgaaatatggcacggtagtgtgctgcgagaaggttatcccttcttgcaactttttaggaattttgttgatcatatttctcttcctggcttcaacttagcaattgtgggcaccacttgggtgtggtttcggcgaacgcgtgtctttggagtgagtggctcgcgcttgctccccggtcgaggacggaggctggcgaatttcagagaaaaccaaacatggatcagagcttcatttcataggcactccatggcaccctggtccatgttttgctggagggatgcgacagccagcatcggcttcatcagcggggaactgccctgtgtctcattcaagacacacaaacatgcctccggcgggtggttcggaatcccctcggggagaatctgccctctatagagggttaggctggcctcagagtcgggaatcggttcatcaga

SEQ ID NO: 595 - DNA, 2493 bp, Toxoplasma gondii
  source 1..2493: mol_type = genomic DNA
tgatgacggagacaagttctgattccgtggtaccggttgagttattccttcttgtctctgggcgccagcctgtctttccacacagtgcagcgaaaggtctctctgatgtgcaagtgctgaagagggagaatcgtttatcgggatggaatccgtggcggcggccaccgatagctgggagggccctcgcctgacaccactgaaatttgggggggatacacccgatggttttctcctctccacgaaatcttttttgacgggaaatttgtgagatgaacaaccctttgcggaagacatccgaaccgatgcaagcgagtgtgaagttttctccgggtggtcggcctgggaaccattcagttgtccagatttgctcgaactgaaagactggagcatttcgttgccgttcaatccgcatttcggttccaacctctttgcagctgtgggttctgtgttttcttggtctccagagaagaaggcagaatcatctgccgtttcgacaggcaaactaggcactacgcaggccgtgtccgacaagtaaccacggctctcagccggtcgcgatacgtcgccgttcattacgaatagcggagggaaagccacagaaatttgcagcccacaacaggctatttagggcaaagaatgttttgccgaacagaacaagccactcggaataaagaaaaagcgacccagatatgttcgtcgctgccccgtgaacgtatcctacagatttgaacagcaggaaatgtttaccgcctgcccccaatgcagtggccgtaccgatatttttcagtaactatccatactacaaagtgtggagagcaaaagagatccctaggttcattctggtgaaaccggatgccaacggtaaacgattctgagccgggggcacgcgggcttgacagagtgcaccgttagaggtcaggaacatgggccgtgttctttcgcagccagaacctcacggtgggcatcggattaactctaatatgaaccatgcatgaatcctgaaaccgcctactataggactctacgccagagttggattgagccgcaggtgcctctcattaagagaagcgtggaagtgtgcaggtgtccacaagaaaagccagagtgcacgaaacactgcgtcactttcgcccacaaaaaaacaaaatggtgggtggaaagtccccagagacctgtggaaggttcctttggtgtacattcgtgacgagcttattcgtttggtgtgtgtaagagaaaatccaagaccgcccgcgatggggggagacagcgttttttccaggcagcatagtgtgttgttgggaaacagggtcgttgtcttgcgtgagagtggtttgacacgtgacgtggtacggcgagtggcgctctgctattatctgagcagaaaccaatcatgtaatacatcctattgtttttgctagcttcaggaactacccataagactatttacgtgtcctacgcagaggctgaactctgtagtaattcggttttctgcgccgaccgcggattcaacaacaagaggcttttcgcacgtgctgttcgtaaagatcgcgatacggagacctgacacacagcgcgccttgattgtccggtggctggtattccccatcgcggccaattacttgtggccgtgcgagacgggcgcgaggcagcacctgtcgctcaaagccattcgagaaggcactcaacgtcgcgcgttgtgacgacgtatgctacccgtgtacggcagcactgcacagaagggcttgtggtgcaaatgagtgtgccagttcaaatttcgagtgacttccctgcattttgttgttgttttccgcatttaagactactttgtagctaagcactcggttggttatcctcgccgtttgtacgcgcctgtggagccgcaacagaattcacctctgagggccggaggtaagaagatgatgggagctgcgctaggtatacgtaattgcggcgaagctttagcaccgtgcttcgatgctagccacgtgagatgggcatcagtggtcttcccacgttgacagtgtcgttagcaaaaacttagctctgcacgatagactatttttcttggcatctgctagggtgcagtgggcttaagggccgcttcttttctaagtttttttcctgtcctttcgactgagttcttcgagagacggccatcgttgcaaccgttccacacgccacgcatacgttcttcgggttgggtggcgtcgcagctcacccgatattttcaatccgttctctttcgtttgtaagtgtttcattggaaacttgcgtgtcttggtggaacaacatcggtgggagtagtagtttagtagaacgtgttttcgtcgaaggcagggcagctgtgctcccgctgtcgcggcagcgtgcgatgtcgagcttctggcgcgccataccgtttcgcttattcacattggtttgccttgtatttgcttcgcagaacactcttgtcgtttgacagactctggattagacgaattcatttcgtgacga

SEQ ID NO: 596 - DNA, 2492 bp, Toxoplasma gondii
  source 1..2492: mol_type = genomic DNA
tcacaagtgattccactgaaactgcaaaacgtgatattggtggtgtatctccacccggaaatctatagaggcctctccgcgcgccggcaggtcggcctcggatttcgatccctaccaggaggcaggttgccgacgtagaggcgtttctgtttgcgatcgaattctgtgtcgtgccctcgcgtggatccgagactctgcgccgcagccacggcgctctgcagggcgctagcgacgggcgcggaagcagccgccccgacacctgaggctggcggcggcgcggaaggcggcggcggctgcaggcgactgttcagcgtgctgctgatggccgctgcggtggccgtcgcagcggctacctggtcttgagctgcgccgaggacaagcggcgtcaagtacaccgtcggtgtgtctttcacagtgggcatgacgaagcccagcgaagagcacgtcggcggagccgcacccgcaggtggcgaagccgaggcggaggccgagggcgaaaccttgctgtcccacttgcttctccgcgtcttctggcgctcggtgctgccggacctgagaaacgcgaatacctcagaccagctctgcatgtgaatttcgtctcaagacaaccggagaaaacttgaacagacaccggctcgcaagctgacacgagacgtgcgaactcctgaacagctcagcttctggtgcgcgcgaggagaatccagtgggataacggccttgccgcctgcgggtcactcccacactcgggaacggagagcgtttgagaggaaacaatttctcacgatcagttgagttccgaggacaaactacaagagttcaccacattggctatcagcggacgccaaaggcaaaacgcgcgcaccactctccggaggaggcgagtgaagagaccaacaccgacgaatcggtgtaacgacatgcaaaaaactctgcacgttttggcctcccttactcttcatcgtcactcgacagccctccctgatttttccaacaatgtgaacatgtgcatagcgagaaaaacatataaagatatatgtatatatattcgtatagatagatatatataaatagttgatgaagagatagatagacataactatatataggtaggaaatgaaagagtaccgggggaaagacggcgtacgcattcgcagtgaaaaacgtgttcctattcccaggaacgcatatatgacgtcggcgacaagaagatttcccgtttctcttcttcgtgctttcctctacagcggctctgtatgtcgactgggacgatgtacttcacagaaatctcacatcgggtgttacgacacctggtctggagcctcactcacctgctgcgtctgtgtcgccccgagtctggacttcgagatcttcgggatttcgagtcctttttcccttctttgctcgagcttcttccattgctctggccgacgctgccagagcggctgcgggaccgccgcgctcgcgacgctccagaagactccatgatcctctctagtgcttccccggtagcagacgatgtcaattgggaagaggaaatatcgcgcaaaacgcccggttctacacttattcgagataaaaaaaagacaaatctgaagaaaactcaggctgcgggtgcccgccgcgaagaaattcactgctgtgccaaggcagcggatctcttgagagtgagagggccaagatgccgtgattctgcgcgtttcccgactgtaagcatgaagagactgttttgaaaaagaaagtttccgaagatacaaacgcttcccaaaaacatggaggctctgctttaccaaaaaccgcctcacatacctttcggtgtctgagatggcctgacagcatccacaagccccagcgactggaacgcgcgtatgaatgactgttcgttatcttttgttcgcgtgggatcccgattttacgtggaagaagaaagatgtcgcaagacattgcttcgatgtactcaccactgcatgctcatctgttgcggaaaaaacgggacgtcagccgcccgtctgcatgcaaccttgtgctgtcgagtgcgccgagtcacaaggcccgctaacttgagaaagcatgtggaatttcctccctcgtcacctcctccaaaaggcacactatcttataacaagtgtgcagtctgttttgtctgtagaacgcaaggagaaaacgggggactgttatccccggagccgccggcccggatgtatatgggacggtctgttcgtcagtgtgaatggcgaagaccacggacgagtcgagggagcacggcgtgcgtggcttgctttataaaaatcggtctgtgtttatcttgtgaggctctgcagctctgggaaagtggaattgtgtctcacaggctgcctcgttaagccattaagccccggaagtgctcgcctctatgttgttggttatggaacggcgcttctcctcatagtaagcaatcgtgtagtcgcgcaaacccaaaatctgtcaccctgcttctttcaaccatataataaaca

SEQ ID NO: 597 - DNA, 3675 bp, Toxoplasma gondii
  source 1..3675: mol_type = genomic DNA
agcttctctggaaaacccgagagctgcagaaagcgtggacagtttgcgaaggccccggtagatgcaaagcgtctcaacttcgtccgaaacgtcagctctcgagactctgtggaataactctccatacacgttgtgtttctgcttcctgcagctgccgagaaaagggtggctaatccaatacgccgaggctgagtggggaagagtgggccttgaaagaagccacgttcattcggtacgccagcgaaggcggagagatccttgcaacacggctgtccacacagaatgagaggaggacagttttgagagaaaacagaacaaggagcgagacagtggaaaaaaggccttggagaggcggtcaggtgggacggacatgctagatacagtgcaggtgagagggagtacggaagggaagaaggcgcgaaacacggagagaaagacacagaagcggagaggcaagcggaagaccgcaagagtagacaagggaaaaatggaatgtaagaaggagagagactcgacgcacacacgcaacaaagaaaggcaagaaaacagagtcgccatgcttcctgccaacctatataggatggtgttcccttgaacccaacgaatgggaaaagaaaacgtcgctctgctccgtccatagagatccgaaagaggtccacgtagagacgggcaggaggaaaagaagagattgaaaatgggaaaacatgacggctgaaagtcgagaaacactccagctagagacaagtcatcaccaccggggcaccggctgggcacctcaccaacaaaaacagttaatagatgaagaattgaaaagagcaaaaaatgctcaaatggttgtttcttcgatatgattaacggtgtagctgatgcacatgtcagtacccggcatgttagtcgccgtacaggaacctgttgcgttgctggaacgcatttatcgttttgatagactcacgaaaagtcaaaaaggaagttgggtccatatgaagttggtgtctgtgttttccaccatttcagaatacatctgtccaaaatgaaaaacccaaattgtcttattttggacgagtttaaagccgaaactatccgcgaactgccctcctcaggagacgtcgacgcggggtaagtccgagatggtaagtcacatgccgcacacctgtcatgaaaaatgtgttttctataaaacagaaataggagaggatagttctagactagcgaagtcactccgagtcgtgaggaagcagaggtttctcagttcttagcctggactctcggcccaaaacgcatgcggacggacaaaatcgccaaggtcacctttcgagaggggggttggtgtacatctagttgcgttgtgccaactgatgggaaaagtggaacgatactgatgttagcatgacacctgtgcaaggataaccagcacaagtcgagaactgtaagcacttgtttctttcttttccggtataactcttccaaaacgcacaagcagttacattagttttcacggggggttttcgcaccggccatgtaataaacctcttcgtggcgttgttctgttgtcgcacttgcggcaagatcagcttcgcaaccagcgaaaattgacggcatggcaaagtcaaaaaaaaagtcacccgcgcgtaccagttgctcttaaaacacatgtttggggttcctccttcactgttaagactgtcggctttttttcataaggcatgggtgccttctcttgttacttcacaactcacccttgagaaggaaaccatggatttgaaaatcaccagcgactccaagattcattccttccggtgcggcacagaccttacaaagctgaattctgaaaaggcttcataagtggtactcgattagccgtgccacaacgaagcggaactctcaggaaaattgcaatttgctaaactgttgagcaagaacatgctccacacgctccctgtggaggaactgcctgagcctccgggcccgtgctgctataattgttctgctaccgatgactgtggaaagaataatgcatcagggacggacggaaccagatgcacggtcacgataagcgtttcagctgctaatatcggcaatgctgtctcgatccccgccagaacaaggtcactggtggcctttctctttatactgtaactatcttctcacttttccttttgatggtcttgtagaacagctctgatggtagtggacggcaggagatgaaacacttggttgaagtccaccaagcctttatgtccagcacacgagtgatgagagagataaacctagcgagaggacacgaaacagtacgtttttttcgacaagaaccatacagcgctgaaaagtgacagggtgactcgtgggcatgacaagccccgtgcaaggctagcgactgagcacctttgttttggtcccggctctacaacgagtagagacggcattagacgggagatctccaacgccatgttcaaggttaccgctaccggctatatctgtctagagaagtgaggatgtcaaagtgaagagcgtcgagaaggcatggtatgaaccacgtcgttcttaaaagcttttgaagggagatcctgttcgttccacggacaacaaacacggttgtttctaggtcacggtggccggactgttgtggtatagtctcaccatctcccttatgattctggtgggacggagcgatatcgttctttgcagctggtaattcgtggtctccagtcgggcaatgaattacactacttacgacatggggccgttcagcggtgtcgtaagcccatttgcagtcaacacgtgttccggaaatagcttaggagaaagtatctgatgtttgtgtttcggctctgtgaccacgctcggttatttttacgaaacactgttctggagcagatgtctgcgggtccagaccgctcttctaatcaatctctggctggcggtgtgcaatatttccagtccgcttggcaccttgtgaaccatctgattcaccatgcaccttacatatcagtgaaaaaagatgcagctcttcaaaataaaaactaaagttgttcataggttgagggatttgatctcgtatgattaacgcttacatatcttgaggccttctctcgggtaagggctcatgccgtcttgcgggaaaccaccgatgctgcctgtctcgatgcagcgcccctagagagattgtcttcaccgcagccgtgcagtgtgacggtcaagacagcgaggatgatagttacagtcaaaacgatgttcttacggcgctcactgtgaggcaggtttccgcggaaatctgccggacaatttcttttttgtagtcagaataggatcggggcaaaaggatttgttgtatcagttagtgtcgtcgactcagagggtccagactgctttcatttctgtttttctcgacacctgtcacggccaagtcttgtggtaaacttcgttttgatgtatctacctccctacctctctactcctgtgtgagctgcagttgtatgtgtgatatggtccaggttttaagaagataccgcactgccccttgaaagtcgtctccagtcactggaaaacggtgattgtcccaccggagtttaggtcacaacggcaggattctgctgaaaagtctgctttgaagagtaactgttggcttgttcacatctgtctcttctggaccaggtgtctttacggcggggaagagaa

SEQ ID NO: 598 - DNA, 3042 bp, Toxoplasma gondii
  source 1..3042: mol_type = genomic DNA
ggcttttgcgtgtcggcgaaagcggcccttttccattactggtggcggggaaagtccatttagtgcggaactcgaaagtgtctcggctgcgtggggtgtggacgcgacgcagctctttttcccgcatcttccatcccacatgcacttgtggccgccagcagagaaaattgaagcgtggaggcgccgggacgaagaggctcggactgagaatcgcagctttctccagtgcaaattcgtcattggggtacgccacgtgatcgcgcacggcttgaaaagccagcaagagctgcatgcagcgatgacagagttttggccgattctccggttcttcacggcgccttcacattgccggttccggagtgttggtccgtcgagagcgtcagaagtggatggcgctgacccgaagaaggcgcaaataccccgcgcgtttcgacctctcggggaggaagaggcctggccgagactggaagaagacctttcgacagtcggtgagtctttactgaaaaacgacctgctcggggaaccgcgaaaacgccgaggtggaccgacgctcaaacctccggcgaccccgccttcccagcctgctgtttcgctgcttccgcccggactttcggccgggcgaaacgagctggggaagactcgggcggaacctgtctctggaaattcacctggtgctcaaaacggcgcgcgaaaacggactgatatgttcaggccgactgccgcgggcctgagcgacgattctgcgagtctgcagccgcgtgtgagagttgagagcaaggcggagaacgtggactggaactccgttcacttgggtgagcagacgagcttgtagaaaagggaggagaacgggttatgggggggagaagggctttcatagcgtgtgacaggggacggaaagggagctccatgggagaatgtagcggacgtgaagcgcacaggttgggtctgctggccatcacgccggagactccacgagcgtctgctcgagttgcgcggatggaagaaatggtggcagcagcttttttctttggaatgaaatcagatgggaaacagaaaattgtcgcagataaggctgaggaaagaagggcggcgtgactgatgaacggttcagttctctactgtggacgtggacaggagctgcagagccgttagaaaagaagtgcagtgtcagtgcctccatcgtttgcgaaaaaaacgaaacgttccccacacagctgcgacggagtgtgttgtgcaaaaccgaatgcgaaccatgtttctaatagacatgtttgtacggggttctaggtccccggtgaatacagatcgttctttccaaaccgaccttcggccgtttggacttttttaaacgagcaaacaggcatcaaacagatgtccgcggagtttttcatgcagctagaccacaaaacacaccaactggttacttctggctagggggtatgaatccgtcacggacgcacgaccgggagtacaactagatatccataacaaccgaagcatacgatgagtttagtaggaaacttcggtgcaggaattgaacagataacttacgaatctctggatacgcgtgatatcgcgttttaattttgcccctgctcgcattgtcttccatttgtcgcctactgaaagagattggtagtgaaccttcagtgatgcaaacactggggggttcacagtccctcaacaaaacgcgacggagaaaaattacaagaaccggtgctgattctctaggagacgttttccttatttctgtcctgcatctaacactgaaagaacgtggttatgtggagtccacactggggacatgcgttacggtcacaatgaactatgtttcttggaatgatgtaatgcttgcatgctcgtggtcactggcacctctttccgtcgtgcgcatcaaacgagtttgcgctttgagaactctccaactcctgcagctcaagcgactacaaatctttattccaggggtttggatttctgaataatagaacacgcttcctcaaagagcgaatgacatcatgctcgagtgtgtccttgcttgtgtgtcttctcatctgccacgatacatctagcgactcttcctttaccaaaagaagcaagtgagatccgacaaggactgccggggtgcatgtctcgttctcgattcagcgaccaatacccctgcactagtctcgttaaatatatacgaaaaaggtttagttgcactcgacaacttaggcgtgtgattctcgctccccgtctctgctggtcctcaactcgacaccgtgcttccgtgtatgtggaaaactacagagactgtcgctcctgagaaacatcgtcctgcgtcgagtcttcgagaaagaaacctgtgtttgaccgtaccctcgaattagcaaccgcggacaaggtgacaaagatcatagctaaacgatggtaattttcgcattgaaagtatattgcctcgctgcattgaggccacgagacgctgaaggcatgcgagctgtgaactgcaagtatatgatcacatgcctctgccgtctagtatcggatgctagtgaggtcagcataccatcgtactgggatgccagttctccacaaatggaattctacatattgattcatttacataaacgtgtatttacaaaacaaatggtactcagatgctagtatggtccgcgccatcgtaccgagagtcatgatctatgcggactatttataagcttttcaggggagcatgaactacgagttggactacgggttgacagctcaggcttttccgtgaaccagaaatcgcaccttcacgtcgttttcctctcatagggacttcggaccgtcctaccttatcgacaggttgtttctgtttccgttagagaggcttttcccatgcactttccgtgcgttgaaagcacgcgtccagtctcggcttccggacggcatgcagttttgactggcgttgtttgagtccactatctgtggggcatcttccctgcccgttgccggtgaggactgaaattcgtaagtggtccctggttcctcaagtaagatcgtgtcgtttttatcttcaaa

SEQ ID NO: 599 - DNA, 2096 bp, Toxoplasma gondii
  source 1..2096: mol_type = genomic DNA
aggtctcacagctctctgcatgcgagcgcgaggctttttcgtctgcgtaccgaggcgtcttgggaggcgtgagacatgcgcgagagagaaagagcgccatcacgacagctttcgagttctcctcggcgacggttcaccaagtcctgctgtctggttgctgtggacgtcggagcgagacaggggaacaggcagaggactgaggcttcgtctccctccgtctctctcgccttgttgatgagtgttgaagagtcacgaacttgttcgtttctgctctagctcgtcttctcacactctgcgtcctgtcatcccaggggaaggcagagaaacatggagtaagacgaccaggtcaggagcgagaaaaaaggtgaggcgtggactgcctggaagtccccctcaaattgaatctcttcctctcctcagttcgacctccctctcaatcacttgttctcaacctctctctgccgatctcctcctacttcctctcctcgctcgtcatcatcttcttctgctgcttcttcttctgcttcctgttctcctcttgattcttcttgttcttcctcgtcttgtcctttccaggcgtcgccacctgcctcgagtctggtaggttttttgaacgcgttcttcacatggagctgacggagacgggagagaagcgaagcagacgggagatagtgtctggtggataccccagagaaagacagacccaccggacgccaagagagaaagaaaacagatcagtcgtcgccggagagcatgcatgcgctgcagcgttcgaagaaagcctttgcaagagaagaagagcctgagatttcggctgtccctcacccgtcgtcgacggccgaatcgagacagcgaaagcgagatctctgcttcttctcaaacgcaggcgcgcgtctgccctcgcgccgttcacaagcctctgaggactcgcgcagcggcccaggaaaaaaacggttcgtcccggacactgaagagtgcaggaagtcgttctggttttttttcgtctatcgaccgaagcgttgggatggaaagcacgaacctcgccgtgtgacgagctcctctcccgagatccgcgttcctgcgcgagggcatcttccgggagaaatccacgagtctttgcggaactgaactgcttgagaggagagttctggtctctgtattgtgtcctcctcgtccgtgagggatcaaaaaacgcatgcaatgacgcccgagagccttcgcaagcgagacaccctcgacagcagtcctgcctccgccctgtagttccgtcctgcttcgccttggatcttttcggcttccttcctcttttcctcacgatctgcccttctctctcggctgccagccatttctttctcacagggtggaaacgactgcggcgctgaaactggcctgggcgcctttccgcctcgccgcagctgcagttgtgcgccgctgcgaaaagtcgaactcgtgacagacacaccgctgtggcgtcctttcccgacagatatctgcacacaggtcccgacggctttcctccttcctcttcgcttcggcgcggcttttgctgggagcctcgccagttttctcggaagaaaaagactttttcagctgcacactcggctgcgacgggaagagatgcctttgcggaaaccgcctgcatctcctgtgtgtgtaaatacagagattcggtcctcgcagacactctgtggaggcttcttcgcgtctgggtgtctcgtttcttcgtttctgcaccagcggaaaaatctcgggtgtgaaacctctcgtttttccgatatcgcgccgcgttcttctgtctgcgcgcacagctcaagcgaggcctccaagctcgggtgacctgacagctgctggccgccgccaccctccggcgcattcggaaattctttttctgcgccgacacagtctgtctggctcgtcgtccagcggaacagccgccgttgaaattccttgaaagtcctctggaagaaggccgcgtctccagccggtgcttggatctgtcgactcagccgtagtcctttgttccttgcactcccaggtgtcgactctttttcctgtcgtttccctccgccgtttctcgccgtcattcttctttcgga

SEQ ID NO: 600 - DNA, 3730 bp, Toxoplasma gondii
  source 1..3730: mol_type = genomic DNA
cgcgtgtcgcgcatgcactccttttgtttgctgttcctccttaggagttggactctgcctctgctttcctgcgtgccgcaggtcctcgagctgtccgcctgactctgaagcgatgctacgtgggcactgtctctccaccttgtttacgcactgggtcggtttctcactcctgaggcgacgaaaaacgtctttgggggccgttcgagacgcttgaaggtgtcgaccagaagccggatgctgttgacgcgactgtccatgatttctttctttttcgcgtctgtccacgcgccgagggaacgaagccactcctcgccactgaggaatgatcgaagcttctgtccaccccaccctcctgagaagtccctcgtcgggacctcgtcgtctgggcctgtctccgctccttggccttcaacgccagacacggcctccgaactttgcgcgcctcctcgcgaggaggccagtgacgcgcggtcaggcgccaactcgcctgcaacttctcccttctccgctaaaggctctcctacaggggaagcgaaaaacgaaagtcacgcgagtctaccgacagaggcatcgccgcaaatgcagaaaatttgtcgggcgcatgaacgtctctctctgcgtttgggtcaacagctcgtggtcacgggagacgacgtggacaaaggtatacagcgtcatcaactcataattcgtgaatattaaaaacgaaaaagcatgcaactcgtcacgcattccaggacacacatacacatatacaagtatacatataaaagtatatatatatatatatacgtatgtttatacatgagtgagtatgtatgcggatgatgtgatgtctggcgcacccgctaagtggatgacggcgtcgacaccttcgagtttctctgcttcgatccattgattggggatatcccatagaatctcgtcctcctctgtgttgtttttcgctgtatggtctgcttctgaagctgcctgccgatctgccgtcgccccgcgtgtctcttcagcagacgggtctgccgggacctgcgcgtcttgtagctctgagggcgacttcgcgtctcgtcgcagcgtttcctcagacgaggagctctctgcggagtcctcggctttttctgcggcgtccacaaaagatgcagacggaagaaacgcaggacgagggggcagcggagactcgccgggagccgtgctgctcttcgtcctcgaccgcgagaacgacataccctgcgacgaacgccgttttcccctcgtacgcaccagccgccggcaccgcactggacggccgtcgatcttcacgttgccatctggaggcggaacgccacagaaaaaactctggacagacatgcggagtttctgcagtccgatccgaagcgccggcggcggctagtgtttcttccacttcccgtttccgaggaacgcgactgtcagtggcttcgctgaaatatcggtttctaggtgccagatgagatgcgcaaacgcttggtgggaacggttttcttttcgttagcaactgttccaaacacggcgcctgaacgcgtcggtcgggccgagaaacagtgcatacctacctcggaacatgtcgatgagaaagccgcccagcatgccatgggatccgctgatgacaactgtaaaatattcattttccccgtcactcccgtcgcggaaaagcggcttcgcaggggaaaacaagttcgaagctgccttgacgagagccgccatcgggctcgcgtgtccaggcacaagaggaaggcggcgtctcggtttggcgcagattagacggcgagaaagaaaagcgaatggcagttggcaagcactctttttcagtcgcgttcggctcctgaaaaaagcactctctgcgtggccggcgttcgccaggcttttttgtagtacacaagaggaaacagcctcgacaggtagccgcgcgaacgcgcagctagaccggcagtggtgacgtttcccttttggcgggtccgcttggcggggaactcaattgcatgaactcggcaaagacatgcgggtcgtggaaagtcatgtggaagaggcagagttgcgaaaaactcaagttcagccttcgttccggtgtgcgtcacaggctcaggcgaaaaacatcccgtgcctgcgccgcccagctgccggctgcggcggggagaatcgcatgagttttctccagttcttgcaggcaagagcgcattttgactttcagcaggttcgctgaagcagaacgcgtgaccgaaggtaagggaagactctcggaaactcgaaatacgttcgagttcgtctacctcgactggagcgctagcagggaggcgcagcttccgggcggctgtgtgtcctgtgcgaatgactcagcacggggggcagagccaggaccagcgtcgagtgagctccctcgttcttcgagcgccgccttgcctcgagtcagtttctttttcccctcgcttttccccgagaaccggcgcgtgtctgacggccaacgcctctgcctctcgccacatgttgcgggggagattttccaggaggccgcgcgggcgagatccgtccgccggtcgttgtgtgcacccgccaagtcgccgttgcttggaacacccgcagaatcgccgtttctccccttcgaaaaatcttcacttgcccttcctctgcaaatgaactgggacccagacgcgcatgtttttcgagctctccagttaaacgagcgaacacactgattgctttcaacgttcttcgccgtgctgacgaaaaacagagtggcagaggctgtcgcgacatgcgcgcgaacgacgctctctctgctgaaaacgttgtttgaacgccaggggcgacgcgacactgggagtcctctggagagtggacgttttgacagagtggcgactaagtcgagaactcttgccaagtgaagtcatcgagagttcgaggtctttctctcaacttgctctttcacggggaagaacaagtcggggtcgagtctccttcttctccagctgcgacagcgtccgtcgtctagatagagtcctcgagagagagttggagtgtcgcgtcggcacacgaggcagacgagacaagccgcagagcatcagcttttgcgtccatacctttttcgcgtttttcctgaacaaaacgcgtctgagcgttcgccgcatgtcggcgtgtgtctggacttcctcaatttgtccgtctctcacactgggccaaccagctgaggtaaaggatcagggaacgggagagcggacaccggagagaccctcgaagtcgagagacagcgatgttttttcggagaagagcatgtcgtcttctgtctgtctccggaaaacgaaagggtgtgcgtttctctgaggacgctttgctgctttttgtcgcatgtcccgctccccgtaaaactcggcttttttttctctctctctcgtctcctctctctcgcactgtatttcggtctcctctctctcgcactgtattggcacgtcggtttctctccttccaccgtcttctttgctctccgcttcagaaccattcaccaccttcttgtctcgccatttcgaattattcttccggccgtcctccctctcgttgtcaacctgtttcgcctcttcagcagtctctcaagtgctactgcagtgcctgcgcgtctcctctccgccttgccttcttctgcacgaagggagactccaaacgcttctccctgctcaccttcgtcagctggcttctgccttctgcgctctccgcttcaccctcgcaa

SEQ ID NO: 601 - DNA, 1422 bp, Toxoplasma gondii
  source 1..1422: mol_type = genomic DNA
atacaatgtcttgccgtaatttctgcgtacaacagatgttgtcgtactgcacgcccatgcaaggggacgtgacatgttgatgattctcagagaagaatcagcacggtatctggtaggatgtgtatttcccttcttcaaaagatgtgagcggttttggcaggctccaaccgcagccagtctctgccttcaaaacaggaaaagccaatccgagcaccggatgcatttggtattgctgcagtgcaccttgatgctgctgtgccgcgccaccagcaaagcgctgatttcaagagtcgagtgcctgaagtgttagtatggcgccctttgctgatcgtgccgcgagtccattgtagatggaacgactagaatgggcactaaaaaagcaaacggtcgaatacaaatttgcagaactcagtctttctgtagcatgctgacgaatgaacgcactccgtgatggacaggctgtcctagctctgctatattccaagcaaacgcagtacacctgagatacgattgaggaggcgcgtttaagtttcgttagtgacggagtccagccaatctcgaaacagatcgaggtcaaataagaatccccctcattacgttcgcccaacaacagaacttccccttgctaccaggggccgcgacgagcgtctcacatatccgtatgctgagagacatagcaggctttttggagctttatgagtgtgcgtgctcggagggggaaattgattctgtcatgacgcaaatttaccgaaaacgcggcctcgccgacgcggtgatgtctgcgcatcatgacaatagactcttttataccaccgttgaaaaagatcgtttaaacgttgctacgacgagcaaccacagagacagatcatttggcatgaatcagaacgccttgtccactgtaaaacactttgcagatatgatttacactactctcattattgtgtggagatcgagggcaaaactcccaatcatccctacattgatcgagtttcgcaatcactttgctaggtacgtttttttcagtaggtcgaatatctatgaggccgtgggcctgtttcgttaatgtctagcaaacggtagccgtgtcatgacgttacatgttctacgtcattccccgaaagcagccgtgatgggagcagaagacgtttaacccatgagagtgtttgacgacaatatgctagcgtccacaatatttgagatgcaaagttttctccgtagcggcaaggaaggagtactcttggaacgttgtgtgtgaagtggatgctgttgtatgtacacccttcatgacgtgaatttttgggcggccccctgcctgacgactgcgtgtctttcccttttccgtaaagttagttctctgttccgcgcgtaactgcaaatagcagacgaaaagcagtgttgagttcctccatgcaacagtcaaca

SEQ ID NO: 602 - DNA, 3459 bp, Toxoplasma gondii
  source 1..3459: mol_type = genomic DNA
taaggaaaaacttcaggcaggctgcaagtaggtacacaccactcaccatgctgcggtccactgcatgagaaacagaaagacaaaacgtagatgaaatgtatatatatatatatatatgaaagcatgcattcgcgtatgtggaagggaaatacggagtggttgccctatagacacttgcccgtgtatttttcattgcgaccatctgtatgcatgttgggtgaagcaccgcaaaggacgaacgcagtgaaccgtcacttgtacccactgatgccctacgaagatcgccgaatcagatatgagtacacattcgcagagtcccactgctctctgagtgaccatagaatagtgtaggaactcctagaaaaaaagacctactcatgcaggtacataactcgcattgggaggttgcgaccttcttcggctccgcctgcggccggcttcttgtcggtgaggtggtccgtctgcaggctcccagcactggtggtgtttgtcccgctaggggaccgttcgggtggcgttgccattgctgttctacgtcaatcacgtttctggaaaaaacgacaaacgttgtttcttccaaagaggctcagggagcaagctgaagcggagaataatgacccatgaaaagtctgcgtcgtgtggcgggccgttgtctttgacgatgatgtacagaccctggaaaaatcgagggccggtcgcgttccacttgatgcagcgtataccgagggaaaacggacagatttctttccttgctgaactacgtttgccgaaacgcactagaagagccgaatatacgttcgtgggcctattccctggtgggtctctccttagtggcttccccctggcttcccctctcattcactgtcgagtcctcgcttccctttcctgtgtcaacgtcgttaaaaatccgagctcgccacacatgcgtgccacacagctgacggggtacactcagtgtgacctcgcgagttgtccccggtgcagcagaaaaaaagttgcgcaccataatacaaggtctccgtcatttgcaaaaagtggcctctttctgttatggtcgcggcacagctctttttttgtccgggaagcgatgcggcttgcacagagcctgtcgttgcgaaggaggggctccacaaatgtcggagggatgaaaacacggcaggagatggtgagaaaactgtgtactagaaagaactgtatgggagagatggaagatgagcagacgcgcgcctaactaggccctgggctcgaacgtcaagcacggggtcggaaaaaacgtcgtgttcgtgccagtcttcttggggagccgtcgcgtctccgctttagcgggcagactctgcgtagaggcttattgtctctcccgtggtcgcctcgcgaactttttctcctcgcttaccctgcgtcttcttctctggaatttcatagagatgaagcgatgacaaacaagataaagtccggcaagatgtaatggcgcggcctgcacgttttcgattcaagttcaagctgttgggctagggctagcgcggctgagaaaactgggctagcttatccggtcagttttttttttgcatgtcagctggccagtttctgccttcttttctcgacttattaccaaaccgtacgacttgtatgcgagatctctcctttctgcacgcagggggaacaaaggtctcggatattcgcgtcaagaaagtgcgcgcgcaacgggagatggtgggccggcacaacgcgccctttcctcgacctcctctgcggcggaggcgggtagggtggccgcccataccgaccctctttgcgctgctgctgacgcagactgcgaagcgtttcaatgtgcgcgcgtcgacaggagcagacaggcactctcccccctgagaggggcggtcgggtgtatgtacagcctagctgtcacatgcagactcacagcatcatcgaggaagtcgaggttcgcggtgtggcttggctctggacttcccaggggaggttgtcgagagacgtctaactcgggtttttgctgtactaactgtctgtcttccccaagagtttaggcgctagtgggagcgagaggagatccattcagacaacgtttctaggcctaagttttctctctggagaaggcgggtggctggatcctgcccttggccgtgcctgcttcccgagaactggttgtccccggctcgctcggtccgtccgtgtccatcggaattgtcgattttcggtagattagaacttgcgcagttccgtttttttgcgtgaagagacgcggcagctcctgacttcgcgagcagatctgaccggtttcagtggaatgtgccgagattttgatattgccagcgcgcgaacctcggtatctcgctcccccccgacactctcgtaggggctgtggctgtcacaaacccaagcaggtcgccgagctggaggcctgtgcccaagggttttcaagttagaacatgtaattggtttcgaatgcttattgcggattgtaataccggaggagttacaggcctcttttttcaatacatcgggtcgtcttttttaagagactgactgtgtccgaacggtccagcttcggtcttgacctgtctttgtggcgggtgagcaaactgaagaaagcaaattacgcaagtctttgttttgtttagtctgtggagatctcgtgtagcattgtggacagcgtgtgccagcagtgggtgtaaacgacgagaatgatttaagccacggtatgtctagcggtctctcgccggagccaccagcgggcgcgccctccagatggaggacttcttccatttaaaaaaaggctgttaactaccgtttgtgacgttagtgtttttccgaggttcagaatctcagatgcagcatcggagccaagcatgatatagacctgctataacgcgtataacggtgataaccgcatgccacacgccagggcccggcggtggtgggcatgaacagtactagattacgtcacagaatacgcaggcatctccatcacagtggtgtagaacagatttgtgcagaactgagttgtagaccgtttggggcggttgaagacatgtgtaggtttcacagactggtctaaactcgcagttccgtaggttgcggaaacaagccagaagcgcccgttagggggagatgaggtgaacaaggcgggggaggatagatgcacgtggagccttttcattaagaagcagccgcatgtgtgaatgggaagacgtgctgattgtcgcaaggacgggtaaatgtgttgtgttttggcagattcacagtcaccttgcagggttcagtcgccaaggtccgggcactgtgaggacggttaaggcattctgcccataatgaaggtgcaacgcgtgcgttcttctctttatcagattcacagtcagaccgaacactacagaattccgttgcctgggtgatgacattcagcaggaaacaggagactctcgcacagactgcacttttccacta

SEQ ID NO: 603 - DNA, 2158 bp, Toxoplasma gondii
  source 1..2158: mol_type = genomic DNA
gctaagctgaaatcctcgcgtgagggaggaagcgattaagagagaaccggggagagagacaaaagggaatgggtcggggaaaaaacagagaggaaacattcagaaaacgacgcctcgtcggaggtagcagcgaggcaggagaactttagagtgaaagacgcggccaagataagtaggaacaaaagaaatgtgatgacggacaaaagagacagagctggaagttatgcggcgggacagagtgggcgaatacgggcagaagtgaaccactaggagtgcgtgtctttgtcacccaccagttaactcaacatcgagagcaacgaactctgcttttgccaggacctcgcgtagcgcctctaagtgcgtcggccatgattctctgttggtggtgtgcgtcgcatgcaagggagattcttccagtcggtgttcgcgatcggtctcagagttctgtcgcggaagcgtcgagaaaaactggagagtagaaaaacgaaacgcggtttgtaagttagtccgggcaacctccctggtgttcaagaggctccgcgacagtggagcattttcgcgagaaacctcccacgaaacggccgatgaggcggacgaagagaagacagaagaagacgaaaaggcacaacacgaaaaagaaaaggggaaacgaggcggacaaacccgtggaaatgaagagacatcacgccgaacagaattatgagccggcaggaacgcttccgtggtaggctccgagatgtatgtacacttgaagctttgcggtaacgggtagcgttggaacgagcgaccttcgactggacaaaaatggagcggcagtcgccgcccacagtgtattgctttctccattgatccgtggcaagaagatgcagtagaggaggaagattcgcacagccgatgtatgtccgaatcaaactcgagagggttttgttcgttagtcactgcccactgggttgttccagctccaggagcgcctcccctgcgggggtttggggtgcagctgtgaccatgtcgcgttcttgacgaagacgccacgaaagatgtggacgcggccacagcagaagaatgcgttatgctgtttgcaagtcggttagcatcacatcttttttctgaagccctggtgtaggtgctgagaaagccgctcggcacctgcccttttccgggcaaaatagactctggggaaagagattcgtgccgcgtttcggtcggaagcccagaaaaccgaggagatacttgccggaaggcagggattctctgcgtcaacgagcaccgggagagaagcgggacggggcaaatccctcgagcgagcggcgtgttccgcatattttgcgggtgaggttagaggaaccagaacgttaacagagggaaacacagaataacttcgcgaaaaggaagagacacggggaagatcgagcatctaggcgggaaacatttggcggcgtgaggaaaagagaagtggatgtagcgggcgtgtgtcgattgctgccgagtttgcgtgttggggtcattttttcgcttagggtagaagcgaccgcgcatctgcaccattaagcgaacgacatagggttgcagctttctctgaatcgtggagagaatgatagaattgcaagcagtttggaggagacccgggtccctccgtcgaactgtgggtcaaatgtccctcgagagaaaagtcagcttgtcattcttgcaagcccgccgtcaaggaactgaaaaacgcgtcccgcttgccttactctttttttcgcttacatcggctggtaaaacagctacgctagggtgtcgctttcttcggagttgtagatgacgcagatgtggttatttgtctgttgagacacgcttaaagccgcgttcctaaggagcactgtgtggttgtgcaagagtcatgtcgagacaagtcactttctctctcgatggtttaactgtctgtagatgtgcgctgttcggcgctgtttattagggtgcatgtgccatgcgcctctcggctctttctcccgtcgctccgtcgccgttcctcagtattagttcgtggcgccccacaggcgcaaccagaggttctgctctctccttgcgcgccgggcgaaccagaggcgggcggtagttgccgtcgaaacactttcctcgggaagtttcagagtagaatttttctacgtttgcatta

SEQ ID NO: 604 - DNA, 1900 bp, Toxoplasma gondii
  source 1..1900: mol_type = genomic DNA
ggcgatgcgtttctcccaagtcgaggacttctttgcgctggtgaatccgtccttccctcgcgggtcgcgcgagagaaaacgcgagagagagacgcctcgcctgcgacgcgcactgcggcggttcaggcagcgcgaggcggatcgatgcctgctgcgtctcctgcctgactctgcctggttcgcgaggcaagtctgacggccatgcaagggagcaacttcccggcagaggtccgcccatgggcaacgcagtcgcgaggtgccgacccaagcctcgagcgcgttgtgccatggtgaaagagaacgcagagaaaaggagaataagcgagagagaagaagaagagagagagacgaagaagagagagaagaagatgagggagacgaagaagagagagaagaagatgagggagaagaagaagagagagaagaagaagcagatgagggagaagaagatgagggagaagaagaagatgagggaaggagagggaaaagaggaaggcgagaagaatgagaagcaggggacggatgaaactacggggggcgggaaagtaaggaagaggaaacagaggatggaagaggtgctcgagatcctggcgaaggaaattcgaaaaggaagaggcgaacagaagagaaacaagaaggatgagaaagaatgtctgcaaacaacaaagaaagacgaaaaagtctacggcaaccgccgaaagacgggaagttggagaggagcgacctgtgtgacagacagcgacagaaagaggaaacgactgaggaggagacgacaatttcgggaggtcgaaaagaggttttacgcgcattgctagcagtcgcagtaaaatggtcttgacctgagcgcacagctagaaaggcaagaagtagagagggcaggaggcctgagaaaaggttttcagagaagaaacgaacgccaggagcttttattgttaagaaactcggttgccggttcgacggccgcggagcgcgacgaactctgaggtgtacgtacacgccatgtttctcccgcagatcactcttcttgtcgaatgtcgaagatcatcacgacgattcaagacgctctgcagcctctctgggggcgaagcgtctctccctgcagcaggtgagaggcgcgagacgcctttgtagatttccgatcattttctgctcgtccgaagagcgctcgaaaaacgccatccagctggcgtcgtgaatcccagcgtcgattgagtgcatgtgacctgggccgcgctcgacatggcggcggcgccgaggcaagactccttcccttctgcgtcttccagcagaaacagtctcttctctctcctcgacaaacagtgtttgcgggatacgaggcgaggaaaaaaagattctcttttcgccgtctgccaacaaaggagggaaggaaagtcgagaaagcacttgggcacagagccatggtgtgtctctgcatgcgcggggaaaacgcggatttcgcaagaatttttcttgcatgcacgcgagaaaaagaaaaggaaaagagaggtcgctctcgcccctttgggaaggcgttttttgaccaatcgctcgtttttcactgtcaatttcaccctcagtttctctccgcgacggtgacacaacagtgcgagcctgcttgactcccgattcacacgaaagtctgtcaactttccgtcctcgacatcacgattttcgttccctctgttagtctttctctcttcttcctctccccctcacccgcctgccgtagccatccagcaggcttgtcaccggcgcctcgcctttgtctcttatccacgctttttctatctttcctctctcgcgcctcgccactcactcgactctccgtctgcttctttctcctcgtttttctcttcagttcctcgagctgcgtgtagaaacttccgcggcgccctctcta

SEQ ID NO: 605 - DNA, 1911 bp, Toxoplasma gondii
  source 1..1911: mol_type = genomic DNA
tcgataaagaagcatttttctcaatggtgcttaagttagtttgtgaacagtcgtgtgctgctctctctcggggacgaattgagaagtgcgtgctgcctcctatttcttctttactcttaagaggttcaacattcttgaaagatcatgagcgtatctattttgaccgggaagcagggctcgcgagaaagaaacgagggatagctccatttcggggtttcgttgtcgtgtataacgcggtacaacagtcggcgacggttgtgctgcacagctagggactcagttttcgacagttgcacaacacacagaaaagaaatgtgcttgccaggtaggcaagcgcctgtttaaatattgcaatgttacatccgtccagatactcttcgattcagaggactgctacagtaaccgtaggtctataaataaagcgatgtcggtatgtataaaatacggcttcgaaactgcgacggatttaatacgccacaactaactcctaaataaaatattaaacagcgctcataaagatttgcacaacctaattgttagtttcctttcagcaggctgacagtcactgttaaattccttacggagatagacattactttacagccgggcctccatcaacatggtgtgctttggacgtatggcggactagtatagtttcacgaataccatccgtaacaggttgtataaatgccagtaaggaagtaggtgtgagtattcatctggtcgtatacattctcctgttgttgtgcctcatgatttacgataagaacaagcattacacttcgtgtcttgttaaactgagaatttacagttacggggccattccgtgtcaagactggggtcggcgtaacggccagattcgcgataatatactttcaatcctgattcgctatttttctgagtatgttccgtctgagcattcgtcgattgctcaatgtttatctggatagggtttcttttttgccgctttagaacacattttgtgtcgcattattcgccgcagagaaatatgagatgaaggcttccaaaacagaggtgccacagcaagattctgtacaaggatcgaagtagttaactccaacggattgtatactcgccaggaggacagccgatacatccctctcaagcaagagaaaggtacccacagtcatcaaaaaaaaccgataccggttcgtatggaataatgcgtgtgcttggtaggggaacgtgggcagcagctattgtcgaactaagatgagttccgtctaaagtctcttcaaaaagaaagaccagccttcctctagcgtcaaacacacgccccccagcacactgacgcaaagacagcggaacactcacagctgcctttagtggctcttgtgcgtctcatccgcgtctctacgtcgtgttttgttgacaggtcacgcaactgccatttctttgtggattaacgtctgcaaggtccgaagttagctggcttcattctccgtttttgctacgcatccgcgctgcggcagaccatagtttaagagggaagaactcagccacttgagatttcgacgtcttccgttctgttgaaatgtgttttgaacgatttatttttcgtacagtacgacgtgtatttatggctggtacgagaactgttgagacaagctcacccattcgggcatggaatcagcacgcttcttgtcgctgttcttctgttgctttactacggtcacggacagggcactagtcacatcgtttacagttttctagcagccttttaatccacagtcacctcttcttctgggaagccaaagaatctccttgatttgtcacggatgctttatttttactcatacgtaccactctcaacacccgaaagctgacacactccacgacgtatacctttttttcctttctcgaggtctggctctctccccacgtaaacga

SEQ ID NO: 606 - DNA, 2528 bp, Toxoplasma gondii
  source 1..2528: mol_type = genomic DNA
gatatcggcctttggttcgggcacttcagaacgaattttcatgagaaagtgagcgacttagtctcgccgtcttgcgcgcaactgagcgctttttttacggggacggaagctctgtcagagtcgtttctggtttcctggagaacggacatgacgagaagagaaaagcaggcgagagaatctctgctgttgatttgcagaggcagcgaaagagacgtcgcttcaccgtccacacggagatgccatgaacattgcccacacacttgtcgttacgaagagaatcgactctacaagagtgagagcccacctgcacatgaaggcaacactgcccccgggagtggaaacacactgcgaacaacggcgagcgtatatcgataaaaacagtgaggggacgggtaaagagagcaaacacccgcaaacatgaagaccgagaaagtaagatgatttcctctgctctatagaaaagcaactgtctacttttatcgttcctgaatggtactttctagcatattatttatgcttttagatcggttggtacgtcacagcaaaaacttgacgctaactgagcgaggtcaggggctcctggatgaacacacacgcggagtgtaaactccctattcacggatgccgctcacgtttatggaacttgcaacagaatcagctgagccgtctgttgagacaaagcaagaaagacacattacggacccagaaatccagagggagacatgattgtgggtgactcatgcctacacctaatgcaagaatgggttcctccagtggctccacaagtgtcaggccaccgaaaatccgtgtattccgcgaagacgagcatccataaggagactgcccaagtgaatgctatgatacctgttcgggtttttcgccgcgtgcgaacaccacaagaagtatatcgcacgccgccgaaaaagaaagaggaacatttcaaccacggcgcttctcgagaccccgaaaactcttcaccccagtttctccatctgtttacaaatgcctccggggtggaattgaaggcttccgtttcccgtatccaagttctacagtgttagcagagcaaagttaagatgtcaactattgtagagctagaaccaaccgaataccacgtatcagtgtaacaatgtaacgaaagaagtcatggcagtctgcagccccctctagtctcacactcgcagccggtaaaaacgctgctctgtgtatccactctgcatcgagatgcctatctgatcaacctcttttctttgtgtacactttgtacacttccaccgctttctctaatctttgagcgttgcctgaggctgaattgaagcgacctcttgtttccgagtgtgccattagtgagccttttcaatccgaagcagtcagaaaactggacacaacgaacctgacaagtctttttttcgatttctatggcgaaaagacatcaccccttcccttttgcgggcagtacactgagcccgttgcagagtttttaggctgggtgtgaggcagagtgagagcaggaggaagtcgtttgtgagtagaactggagaggcttcgtccgttccattctaggagtacacacacgtcgctggagaacggtacgcgcagaacttcacggccgttttgttgaaactttacggctgctgacaacgtaggctactctctgcacagcatctgttcgtggcacagcgactacacacacctctctggttggatgggtctgcttttctctaagaattaggaagacacgtgaaaaaaagttgggtttcaacagggaatgagacatttttttggccagcacccttcctgacgacgaaaccgacagttttgccgttcctgtgtcttgcatgccgagatttcaggtgtcgcgttcctcgtttttctcgacttttcgcccgctgccgttctgctgccttgcgctcgccgccgtttcccctcttttcttcgtgcctacttcgaaagctcgccgtttcctcttttttctccgctgcaacttacctctttcctccgcgctctgtcgcggtgtccgtccctgttggcatgcttgactcactagcggaagttcgggtcccgtacctcgcctccgcgtctgcatctttcttttaggtttccacttttttgtacaacttttccgtctctcttcttccccgtatcgacgacaaccgcacctcttcttctgccgatcttcagagtctttgttccctctcgcaactccgcgttgctgccctcttccacgatttcacaccgacgcagacgccaacacagcaaaaagcgacttctgcgtgtaagtcagtctctgcccaaccggagtgcccctcgcaactgcacgttcttgcatctttccgcgtccaaagagcgcgtcgtccctcacgtctctctaggacgctcgcggctgtttgcccctccgcccccccggtagtctccgtttcttttcgacatttcactgactcttccgttgaaccggcaaactccgctctcgccgcactcagtctctacacaggtccttacactcgagtcgctcgcttttctattcaaga

SEQ ID NO: 607 - DNA, 2189 bp, Toxoplasma gondii
  source 1..2189: mol_type = genomic DNA
cgaagcaagtctcctgacaagtctttttccgccgctgctcgtcgacgcactcctcctcgttgtcgatctccagcggcggcaccaggatcagcgtctcccccgccgacgcgactacgccgccacacgaagcacagacgttcggtcgactcgacgtcgactccgcggaactctctcccacagtctccgctcccgccgcgactccatgcaggctgtcgccctcttccacgtcggcagtgctgaccgacggcagcgcttggcccgccgacttcttcccctgaaacattgatcccagacacgaccgcagaaggccgggatgcttctctgactctcccttgctctctgcgctcaacatggagttgcctgacgcttcctgacagctctccgaagacgcctgcgagcaggtacagtaccgcatgcgtaggcgcgcctcggagccgcctcgacagctcgcgcttctgcctcgaccgaagcaggtggctgccagggccgccaccggattcgccgacaagcagcaggagagagacatggtgagagaacggagggacaaagggggagctgcagaaaagcctctgaagaactccccaaagcaatgggtgatgaataacttgacgctcagacagacctgaaaaaaaggcgagagcacctgcgtggcgcctccggaaaaagaactgctcttgcgctgtaaagaaacttccctctagaaacgcaaataatacgagcctcagcgacggtctctcgacaaaaagacgcggcgattcacttccgctgaaactcgaaatctgctgcgttgcgcaagcgctggtccggggaagaacggagggggcgcgcgcaggccactggcggcggctgcgtcagactgttttctgcgaaggagcagcgatatataggtagccacccaagaacaaaaagcgctcaggcttggattgaaaggaatcccacaaaagaaacgagcagcctttttcagaggcaagaacagcgtcgccaacggcttgcgtctggactcaagtgattcgccatcgtgacctgtgttgctggagaggacgacggagcaatcgcctcgcaccactcgaagatggctgcttagaggtgactctgaacgccaaaaatatcgcgaaaaatacgttccctgtgaaggcaacacgctgcaaaaggcgccgaacggaagtcgcccgagagcaggcgcacagcagggagtgtgaggaaggcgcaaaatgccgaaaaatgcaaagcgaagcgcggcggggagggcgtagaactgtaacaagaatccgcgagagacaaatatgcgtttccctatatacaagcgcgctggctgatttctgcgcgatgcagagtgtgggccagacaggagaccaacaggcgataagacgtttaactgcttctaaaaaaatgcaagggccaccggccagaaccacgaagggcgcttgaccatccttagaggcaggtctctgaagctccacgagcgtcaagagcacacacggggtatcagagggtggtacgcgacgaacgcggggaaaagccaaacaatattgtacaggcagacaacgccgagataattcaggcaacgccactatacaaaagactggagggaaggaaagagcgaaaagcaacactcgacgcaccgccaagtcaggccctctgcgaggctgcgcggtcgtggggcgggggaagtcgtaaactcgaggaagtcgccacggacattcgccaggcgaacgcgagaaaagcgaagacaccgcgccgagccgatgtggacgacaaaagaagctgggccagggtaaaaagagctcaaaagacgcgaccctgtagtaggaccattctgctggccgtgggagagagggaagggcgcggccgggcgccgttctccatgatgctgggggttcagacctttccttgtcggaggaaacgcggaaaaggcaaacaggaactctccccacctgcctcgatttcacagccgagttcccacgcgtcgacggcaaacgcaaacgcagaaaggcacctcaactgcggacgcaagaactcttctttctggacatccaccgctgccacccggcggaggaatcaacgaactcaacaggttgtgcaaaagtctcagattggagaagaagctagcgacggttcgtcgctgccccttctgacagagcaaaaagaaaaaggataaaagggacaccggcgccggattcgcgtttcca

SEQ ID NO: 608 - DNA, 1504 bp, Toxoplasma gondii
  source 1..1504: mol_type = genomic DNA
gtgtgcaagatacggcgaagggagacgaggaatggagatgagaagagaggaaaggaaagcgtaaaggacaggatgagtgaggagaggctagacgcgaaaaacagaaccgacggaacacaactatagagaaaagcggagaaaggacagccatgaagtccggaaacaactgactacgcaggcctaccaggctttgagagcgcttcctcgcctctcttttccccgctgcctcttgacttacactctttttcttttgaccgaatgagtgagactggccatggtgtcgatgcttgtttttcttttcctttgccgtggaggagacagctttcgcttcttcctcggcaactgctgggcgccccgaggctgagagggccggcgagagaagaagcctccaggcagcgaagatgcatgcaaggccgaccagcaccgacagcaacatcttggtccggacagggaggggacaagaaagggacaagaaagggacagggaggggacaagaaagggacaagaaagggacaggcgagtgaaggagaaaaagaaatgtggaggaagcaacagagacagagagaagaaagcagacaggggaagactgaaggcacctgagaaacgaggacgaagcagaccgggaagctcgtgacttcttactgttcgcgaacgcctctgttgtctccgtccttgagtctttctctttttctgagtctttgcgttcttcactcctttgtgtgcagaaggaagatcgagaacggcagaaggaaaggcgcgcgtcacggcagagaatgcatggaccaggggcaatggacagaaggacggagaactcggcacacagagggaagtcaaagcgcgagaaatcgggatgttttctcagtgacgaagaccacaaaactttcctcgatttccagaaacatgagagcaaattccctcgtttcgttcgaagctccaacaagtcagcttgtgcatgtttttatagccagcagaccccggacgcatgcaagcgcgcgaaccgtgtgcagagaagcgaaggcgccgcttttctctccttttaaacgagaaggaaatccctattccttctccagatttttcctccaaacgcaaacggatttcaggcctccatcacgagcacacgaataccgattttcaagtttccttcgattccactctgtgcctcacctgcaggtgttcgcatgtctttcctcaaggggcgcgtctgctaatcgtttctccttcatgccttgctttttctccgtctttccgcctctccttcgcaatttgtcttcttctctctcgttttcctccaggccagacgagggccatgcgcctcctgacctgccctccaaagaacagacaacagagtggagaaagcgaaaagcgagaagcgagctgcagagaggaagaaagagaggaagaaagagaggaagaaagagaggaagaagacagagtaagcagctaggaggagaggaagacgaaggagaaggaacagaataggatccagagaaaagaaaggaagcaa

SEQ ID NO: 609 - DNA, 3331 bp, Toxoplasma gondii
  source 1..3331: mol_type = genomic DNA
agactcctttcttgttcacgggctcttttcctcgccatctgtctccacctggctcgcttacagcttcagggtgctgactttctctgcgtagtcgcttgcctctctcttttgctcctctccactcagctctcgcccaagagtctccgagagacaggagacactgtggggtgcaggcaagtcgtgaggccgcgccgcgttggcgaggaaggagtggaggtacacccgaagagcggcggagtggcggacgtaactccagaaaactgcgaagcggaaattcagcagggcgcacatggacgcgatcgacgcatctgcgaaggcgaagaaaaacacagagaacagaggcgttgtcagttctctctgagctctcacgagccgagggagagacacacgaagggccaggagcgtggagagaaaaaagacggagagaggaaggatagcgagagaaaaggaagagaggaggagagagaaaggagacgaaaaaacggaggtagaaggcagcagccgagcgcgaaagaaaggagagagaaagagaaagagactggcgctgctgagaaacagaaatttctcctcgtgtttggaacatcgtctcgaagcgagacggaagaaagagagaagggaaaggcccaagtcgaggaaaagagaaagcagagagcgcaagacagcggaagtgaactgcaagtcgactgcttctccttctccggcgaaaacgcaagacttccccttaccgaggaaacgcgtcacctgttgtctacttgcttctgagatgtctcctttcgcgtcttctccactgagaaggtggacggaggacgcagagaaagaagaagggcagtcgtccccggggagaaaggcagcgagaggaagacgcgggagcgaagcggagagatctgccgcagaaagagaagccgcagaaagtgaaggcgagaggaaggagactcttgagggaagcgttgccgcttcagcggagggtcttcctctctccctcatctcgtccagagagctggttgaaggagagagaagagatccttgcaaagaaggagaaacgcaagtcttcgacgcgctcaaaaattttgcctagagggctgggagaaggagagacaaggagaggaagacaaacagaagagaagaaatgacgccgaagagaagaaactgggaagaggaggcggctgggagacgcaggaggcaggtgaaagtgacaaggagagatccgaaaaagaaagaaacgaggaactgtgcagcggtgcctcgatgcacacgttcctgccgaacgcgggcgcggctttgcgccgaggcagcgcccctttttgaacggaactttggtcggagaaaaacgcgcagaaaagcaggaaagtggaagaagaaaaattgaggcgaatcggaaggaaacgcttattacgacacagtgctggttccgaagaatctccgaaagtcacggggcaaagacgacgcatctttttcttctcagcgcagacgtcagcgcgaggcaaaaacaaggccgaagagttgagttctcctgaaaaacaatgtcctttctgaggaagattgacgtggagttgactctcaaaaagacgtcgcgttcatgtctcttccgtgaaccgtgagaaacatctcaaaccaggaacggagccgagcatctgtccgctgaaaaaaagcctttcctccgaggggggtcaccgcgagtctctgtcacccgcgggaagtctggtggccgtgtgagaagtttttttaagctgacgaagaaatctgctgcatggcactcgacaagcatctcgcgattcacatcaagcaaaaaaccgcgattctcttcgactgtcaacgccttctttctatactttatatatatacatataatatatatatatatatatttctgtatacacgagtacagataaaaatacgaatacacaggactacatctacatagatacacatctacgtatgtgcgtatatgtaaatatatgtatatgcatatatatacatacatttatataaacatatatatatatatatttgtatgtgtgttgttatgtctatttttcctgttttgactgcgtggacagggaagggaagacagttggcgggcggcgtctctcggcgagaaatcgaatctttagtttgcactcacactctgtcgtatttgggggctcctcaaacagcgaagggcatcggaatttcggaggaacagagtgacccaggcgtgagaccgtgacatctcttgaagaagaagaagaagaggtacggtcgtcgtcaacttggtgaatgaggcggaagtccggaaggcgcattttcttccgctgaggcgtacgctcctcacagaagcttcgacactgcttgcagcagctttgtgactttctgctaaaaaggaaaaggctttcgtttatcgccaggtcgccaaacgctttcatgacaaagacttcggaatgtcttcctcccagggcgccggcggtgttgtgtgagctcctgccccccccctccccccaatgctgtgtcgcttgcagaacgctcgggtgtgcgcgatggcagagaagaagggcgttttccggcgaagaggatccttttttttctccgccgccgtgaagaggacgcacactgagttcgtcttcttccactctttctttgtttgcgttttccgcgagttttttcctcttccaggcacttccttcctacacgctgtcgcatcgtttgccaccccccctccttcgcgcgcgcgcgtaaatgtgcgtgccgtcttttttctccgtttttcctgttgaggcgctctagattttttccttgcgcgcatcttttctttttatctcgagtgcacgacgccaacacaggcgcaagcggactcggtccttttccaggtggcgagttcggagcccggtgtcagacaccagagccgcaattgttcttgtcggcaacgaagggcggtcggcttccggagtgctccaggtgcggttgactgtctcgctttccagcttttctgcggcagactgccctcgccttcttctggaaggaaggcaaggcaaagccgcctgtcctctccgagacgaagtccggcatcgcaggcgactcgcgagttccgccgacaacacccccgagcgtcgcgcgctcccctctgtcgagttcagctgctttttctctggcgcggctcctcgacttctcgcagcagcacccacagtccagatcctctttctcccgcagcgcctgggcatcgcgtccgtctctgcgaacagagcggggcggtccttcgcactggcgctcgcgcctcccagttcccctgtccgtccggtggaggcaagcgacgaggcgagacctgctggcgactgcactcgccgctctgctgcagtca

SEQ ID NO: 610 - DNA, 4004 bp, Toxoplasma gondii
  source 1..4004: mol_type = genomic DNA
ctcaataaactgaatctgaagagaaaagcgctaagcaggaaagggctacgtggacgacactgtggtgtgcttgaatcatcgcgcagcgacaggaactcgattgaaaagagtatgcgagaacctctcctcgcttcggttgcttctgagagagacggaaaactcaaggattcagaagacacacctggaccaaaaatgcacggaaacgggggcaactacatcccgaccgaagtggggaacggatgtccggcgcttgtttctcgcggaacgagacacgcatacctgtgagagtgtttcgaaaaggactctcttcgtgtttatccacgtttttttgacttcagcgactgaaaaaaactttgaagacgggtgactgggaagggagacggagcaaggaacgcagaggagacatgggccacagcgcgaagaaatccgagctgtgacgcctcgaactgaagccgttccaccgaaggcaaaggcgtctgcgccctctctccatgagcgtctcgtctcggtggcactgtgagcagcgagttgagggaagcagtcaggagagcggaggccacacacgcaggcgagaaagctttgatcttacccgtgaagaagagaccgatcggccgcatgcaacggaccgccgcagagctggtctctctgccgaacttggaaacccacggcctttccgggaacgcgtgtggtcgaagaggcagacggggagagacgacgaaaaagggcggggagaattcaaaatttgacagcgagtcacgtgaagactaaaaaagtgtggcctgaggggaaaccgtggcagaggcaacgcggtaaaagtgcactgcgtgcggacatgccttgccttggaatcagaaaaactgcacgcaactggagttgctaaggcgccactgggaaaaaggacaaggttgcaacgggccctgcacgagaaaaaacaccgcaggcaggaatgaatgccaccaccggaaagcgactgaaagacgtgcatgtacggcagagcttgacaacgaggtacgcgctattggatgaccgtttcggggagagaacgaaaagggaaatgcacgaaaaaaagtcccagatagaaagaaccacgcagaggcgccgacggaagttggcaagttcccagcaccgggtgacggtgtttttccagcaaggaaagaaatagaaactagagagtgtggtggagccggcaaaacagaacaggtagagtttgtccgctacttgggacggaaagtggaagaaatggacgtaaaagagaaaaacaggagcacgagcaactcccacgaaaaagaaacggagagacaccgtgtgccagagaatccgacggagggggctacttcagagttgcgcgtggacttgtgctggagaagacggagtgaatgaacagagaaaagggttgagaacgcgagcaaagctcttgctgtggctaaacccacggtttctccatcagagttcttcccatcctgcattcgttccgattctcacatacaagcacttaaaagaagtggaggcgacggcttatagacagagggaaggacgccaggccacccgcctcgacggcttacttccacgagcggctcttttctggaccactacgcaccgatgaacagaagcacttactttgattgcctttctgtgcctgtggcaaacaatgcgctttgaacattttacatcacaccactgggacgtcttggcaggaagagctctagactttgacaaggcaatcctcctctctctcgcggtggttccgttccgttcttaccccccactccgtctcgtatagcacgccagcagggtgcccttgggagtgtcagcgggagaagctgcagaaataccgcgaccttttctgctcggagacatacatctaaattacctgtccagatctgaatcgtgtatgctttgcggtttgcgaaggcatcttaaccgagaaaatatgcttaacgtgtggcagaaaccgtccagtctcttgcagggttcagttggccacgcgtaatcagtcactttcaggcaggagagtcactcaggtgtttaggcgtgcgcatagaacaatttgtttttctgttttctctttcaatcactagtttcactcttccggaagcaattgtccacacgccgtgagtatttttagctgggcgctcagacgtcacctcggaagcgtcgtcagtgtcggaggaatcttcgttcacagcttcggtggtgcacgggatttgtggatgccttcagttgtgaatagaagttcagaaaaagacagttaccgcgctagttataatgaagaagaggaaacttttcatctttccccgaatgcccagtccaggtggctgtagcaagccagggaccggctgcgtacgtcacgcttgcagtcctgtgtgccgacgctaagtcagtccagggtctgactggaacatcagcgatggtgctggatgcacattaaagcttgctgaaaggaatattgcgggagccaaggtagctagtgtggtctagcacaggcaggttcgggctggtgaagaccttgagtctttcggtcgtatccggccccgaacaaaaaagcgaaagtggacagctgcagaaatgccaaaatacgtgggtttgtcacgtgccccttgtggacttagaacaagaacgaaacaagcttttcccttttacggccgcgatgatacttagggtgtagtccgcgctctagaaaccgccggttccggtacattcttgtatctttctttcgaacaaataccttgcgtgcgtggccgacatgcatcagcgaagaaatgcgaagcgcggactgcaaagaaggaaactcctccttttcggattgtgtgccccgcttcatctctttagaatggggagaccaacaaccacagcatttgtatacttgaacgtacgaaatccgattcacttccccaacgcaaccttaccccatgctccatgagcatgcttgtgattattgcagtgattcccgtcgatgggcatcttttgaacatggtgaacacctgttagggacagccatttttcgcatcactttttccgtcccgtcaatatggttcgaattctattactctgtgctgaacctccggagaacaagcctcccggtagacgttcttgtctggtgcaagcaagtctttctagcatagtctttctcccgaccaccgagttttgtcagtgtcgttcccatgttcatttcgtccagaatctgccctttgagacagggttgtgataaaggcatgtggtgctagaaggagggtgagagctgcagctgtcagactttctttggttatctgaaggcatcccctttcacgagagcggcttcacttgttttgttgattaagtgacgcaacccttctctgaccggggacccacggtgcaagagatcgtgggtgtcgcccgggaagcgattttttgcttcttgatttttttacaagacttatccaagacagaaatgttagcccgttagggacgtcagaactataacatcgggaatgatgtattagtcgctgtacttccatatgtgcaggtcattatgccataacgtaaatgtgtggtacttggatttctgtctgtgtatacccatacaggcaggtcttctttgttggttgtaatttttccccggtcccgaccactgggagcaaatgcgaggaacagtacaccctcgtaagccatcgctcatgatcgtgatgaatttgcacacacgtttttctttctaaatcgacaccccttgttaagagcttcacaattcgaggaaaccccctcactcattccgtcctgttttggcacttgtctgtcgcccttttaattccccccttcaaaaaccagagaaaacgaagttgctaaacgagggggcgtcctctagaaaaaggcatctcatttgtccacgcagagcagttacgtgcatgctgctatccttctgtgtgtctgtcttggcaattacttgttcttttaaggaaaaaaaattctcggttttcttggcgaaagggaacgttccttcacaccggtggtaattccgtttacgcgcatca

SEQ ID NO: 611 - DNA, 2922 bp, Toxoplasma gondii
  source 1..2922: mol_type = genomic DNA
attttgttgttcccattgaaaagacgaaactacccttcacgacgactgcacttctgacaggacatttttttctgtaggtctcatccagggtttgcttgggaataagagaagcaggagcaactcgtcgtcgtaattcagatcagtggaattggaaatatcctggcttcggggtgatttcagaatgatcttgcgagcatcaggatgcggtgcttttctctgctggacagagaaacactggacggggtgctgcagttttttccagctagaaatactcgagttcgacgacgcgaagcactctgtcttttccgtcggaaacaagagcacgacgtgcagaggacaggtcgttgtctaggaaggggttctctagggactcgcgtttgcggacctgaaaagaagcgatgactccctcgcgcgacagttcttcagaaaacaaggcgcactggtgtcagcgctctttgtcgaagagggagggaaccccgagacctgaggcaacctaggcctctgccgtctcatttggattcgtcaacggagaaagatacaaacgaaccgtgtgggctgttacgcagtggcgtttatgtcccaaatagatcccctttctctggatcgacaacacccaccctgcaccgttgaacaaaatcagtattggtccctgggcacaccaaccttttcttacgttgttggtaacagtaatacaaagcagaacagtcttaaggcagaggggaaccggtaagttcagtgttttccagcatgagtggaaagcgaccgggagtttctcctgccttttgtgcctgaaaacagagcggcacagacagcagggtagctgaaaagtgacaaccttctcacgaccacagaaaccgaaggagcaagaaatctgatgaaaaacgaaagccacgtttgttgatttgcgtatttttacaatccctctcacatcatcacgcggggtgtataaaaagtctgacgatggtttctcgtgttcagaaaatgacagccactgaaactcctgcgctcgttcttgcccgtcttcgtcagaaacgagaagtgtgtttcgcttaatatcgattccacgactaagagtgtggaagcaagttttctcaaaacaacatcgacggggacagaaaaatgagaacgaaactgtcgaggtgcgaactaacgcaacagacggtacacgtgccgggcgccggacagataacgttgaaagggatctgtttaagagagccatttccacattcgcagaaaaatcgctgctccgaaaaccacaaccgagtcatttcggacatgacgcgacctgcaaaaagccagtcactgccgaaagctgtgtctgccccgcttgacgaggtcactcactggctaggggtctcagcctgcctccaaggtcgcctgaaaaagctaatgcgatttgttttggagggaccaagaaaataatggagtttgcttttactgatgatctcctcgactgctttcgatgaagttaggttcttgtcgtttccggcccccgatgccgccagacacatgtactaaccaccagttggcttcgccgcccttctctgtagcctcttctcttctttttccctccattcgctcctcacaatacagcagatcttcttcttagttcattctttaatgacgcctggcttttccaggccgttctgatgaatggagatgcccccttccctcccaccgttattctgcgttgcttttctgggccgactgaaaaatcgaccctctgtgttaaggttaaggttcacatctaccttcatcctttcaactttccgcgagagagaccgtggcgcgttaaatataccaacgacactaaaacgcgaaattcaccggcacttccccctctgtgattctagattcaggtggaatcagagcgcagccgtcatctcaggttcctggttaaacggtacgacgtgtctttcgagcagttcttggtcatggatacattcgaaatacctcagagacatctgtacctgtctgctctgtacaagtacacacattttccagcgtcttgtgcggtgttaaaggcaatttcagcaaaaggcggcggtcacttagtattagtgtcatccgcatgccaacgagatgtcgataacggtgcaacttgtttgattcacttgcagcacaaaagattaggttacagcgccttgaaactcaacagacattttgtttacgttgtttcccagggctgcagtttcgaccgcatgcacacgacagcaagagagaaataacagagagcatgcagccatcaaggcttggtttcgagcggaaatgccatcgaacaagttccactttgacggagcagacgaaaaaggcgaagggggttctttaagattcttcggttcttgttcctttccctatttcttgattctgcgtgaaggaaaatgcgccaagggcccgtgacagacctgaatttttgtgcggaggcatgttggtaaaatagatgacgctcttcagatcgccaagaaaaagacgagaaacctttgacatggcctgtttcctcgtgttttccttttagcatggtccttggcctcctgcccagacaacactggagtcggaggaccagccgaccccgaattttgtgtcctgttgagaaacgcttttgttctctccagattccgtcttggattccgtcttactctgacaaagcttcagttcttttcctctgcctttccctccgtgacttggtcgttttctggatcggtgctccgcccgtaggtctttttcgctggtgactatgctgtcgccagctgtctcggcagacccactgagcgccctttctcgcttcttgttctcctcatccagaggtcagagaatgtaagaaatcgcttggccccgaactgaggacgctgctggaacctcggagtctcccgactccacctttcctgtcagcttttctctgcttctgacctttccgacacacca

SEQ ID NO: 612 - DNA, 1106 bp, Toxoplasma gondii
  source 1..1106: mol_type = genomic DNA
ttatgtatggagtgtcacctacaggtatgtggatatatgtgcgttgctctgtcgaccatctctgtctctttctaagtgtatgtttgtgacgttggagaaccggattctgctcgctgtgcaagagactcactagtcccgtggtctgcctgccgccattgtgcagttgctggggtactttcagaatcgatctttcggcagaaggcgagcagacgaggactggaagccgaggagaaccaggccagagttgccttcgtctgcggagagggaagaccgcgaaaggcggaaggactcgacggggaggagccaaagtggcgaagggggcaagaagacgcgatgcgagagaagaaagtcagaggccagctgtgtacagagggatccgagcgcagagctgcaccctgtccagcggccagtttccgcgcgtcggcctcaggcttgcgcgcgcaagccaccaaaggcgcatgcacctcttgcactctctccgagaagcgacgcgcgcccaaccgcgaaagtcgactggagacgaagctgttgatccggagtgtctagacagaagccgagagcgcgatgcggcgaggggatgaggtcccaacgcgcaggttgaggcgcttcgaattacacagctgcgcgttcaagattcgatgcacacctgcctgcgttctctgcctccgtaaacggttcacagaagatgggagaggagacgaagacgcctactgttcgaggtgacgccgtggaaacgagcactcacgcttcgcgacggttgcagagagccagttgggcggccgcggggagcgggggaagaagggcattcagacaggcgttttttacaattgcacaagacgaggcgagcgcgcgcggaaaggcgcggccgtggagacggcgagcgcgcgagaaggagagcaccagaggaaacggaactcagatacacggaccaactccggcgttttcgagagcgaagagaactgtggcgtttttgcaggtcgcgacgaacaaaggctgaaccagtagagagaacagatgtccgacggagaaggaccggctgagactcacggaagctcgacagcgagaagactggcgtcttcatgtccagcgcagcctcgaatggggta

SEQ ID NO: 613 - DNA, 988 bp, Toxoplasma gondii
  source 1..988: mol_type = genomic DNA
cttttctcgctttgccgcgagtacctgtgaggttgcttttgctcaagctcacaggctgtccacctggaaaagagtctctcgaccaaccgcacatttttcgcactcgctcgcgtacgcgctgcgcctgctctggaggcagaagccccgaggcgtcgccttccaaaatccccggcaactccgccggcgacacagcgagactgtggactggagaagaagaggaagaagaaggagaagacgaagaggaagaagaagaggaagaagaaggagaagaggaagaaggagaagaggaaggagaagaagaggaagaggagcgtagtttctcgccgtgtgcagttcgtcggccatcctccggcggcggtgggatggcctctgaatggagagcgttcatcgttgaaagacaagagaagaaggagagaagagagagaaggagagagagacgaggaaggagagagatgaagaagcaagaagacggagagggagacgaggaaggagagagatgaagaagcgagaagacggagagggagacgaggaaggagagagatgaagaagcgagaagacggagagagagaagaggaaggagagagaggagattgagagagtccagcgacgaagggaagagaagcctacattggtggcttgcatgttcctatttcgttcttcatctgcggttttctgtctcacagttgcgtctaatagagaggtgaagtcctcccagacaggacggagatctttcttggagaggaaacccaagaggctctgtgaactttgaggaacgcggagagctttgtcggtgaaggcctcccccggagacgccaagaaagcgaaggaataaaacgtatttgttcgaaagtggaaggagcccgagagaaaagaaagagaggagagagaagagagaagagcgacagactcgagcagtttctttcgagttttttgtgttgcatgcatgcatgcgcactcgaaaaacgcttctcttcgtcttttactggca

SEQ ID NO: 614 - DNA, 3942 bp, Toxoplasma gondii
  source 1..3942: mol_type = genomic DNA
cccactcgtcgcatgcctgtgtctggcctcatgcaagccactttaccggacgtgacggcgctgatgaaagcgacaaatggcggcgcgagaaaaaaagaagaaaaggggagggtcccaccgcggccccagccgcgcgaggtcgcgaacagggtgcagaccgaggcagagacagaagcgcatttcagagacaaatacggggtcgtcaaagatatggcgaaagtctaccacgacaaagtcaagaacaacgaaatgggaggcacagttgtcaaccccgcagtaacggagctacagcgaaggtaagcgctgcacttaacaaagcgacatggagagactctacggacttcttacacaccctcgaactacagaacgaaatgaagcccagaaaatccccagactaccctgagcatccatgttgtgttaatagatgcttttcgcgaggcgatacgtgcacagacacccctacgcttgcaggtcgtcgagcgttttatgtggttacatggcacagagaagggggcatgcatatatttatatgaggagaggttttcactacactaagggactctagaggcgcggagacagacacaagccctttagatattgctgcatccgtgtttgttgcggggttgtttttttggtgtcttctgcagcgaaactctccatcggctcatcctgaagaaggaagcagcacgcgagcagcggcgacgatcccatcagccaaagaagagaaagcctgggcagtcgaaactggatgagatcctcagacggccccccgtaaccagcacgacgaaggcctgaaaggaacaggcgcccgcataattaagccgtatcgatatgggccgccttccataaaacgcacaaccctccacctaaaggttgccatccgtttacgaactcatctgtctttgcaccctgcaaactccacctacgcatctatgcgcccacggggatccgggaaacacaaacctttaagatctacacgatggctgaactcgtagtgtatggacgttgcattcaggcgcctatcgttaattgcaattatcttacatggtcaatcgagcatgtgtcgatgtctccatgctcgacaacatagtgacaccgcgggtcgagtgccgaagggtctgagggggcagcgcatgcaagatgagcatttctccaaaatcttctgaggaccaatggctggtagttaccaactctttcgaatggacgacccgttccggttctctctgttcagagtgttgctggactatctgaccgcatgctgcgaatcatcaggatccgttcatcatttagtccagacaccgcagccctacgacctcttcggttcttgtcgaagagcacaccatggaaacagcaaatagtgcgactacgatgctactcgatgttaggagtggcaatcgggtgccagaccctgggcgtgagtacccgtgcttcagaattacactgtggcagcctgaaagccgttcatcaagctcataaccctctgactcctcttttgttctgcatttgctaaaacatcgaactcaaaggctattggctgcaagtcttcccttttgggttgcgtacttcgagttgcttctctcgcactactcgttcgatagaagcgcattcgttgaaaataattggcttttggtgtaaagcctccccgtctggactgtcatttgatcacagctgtgattttcatgatcttctaagaagaggtttctcgtccatatacaaacgaaggggagattattccagtgtaacagtttaggacgaacatcatgtctgggtaggttcctagggtcagcgaggcgaatagcaagatgcatgggaaaacggtaacgcctttagcaatgcaagtaactattctgagatgaagacggtaagggctttagaaattcgcgtaagtattctgagagccaggccgatatatcaagacgggggaaaaaagctgtacttggtccttggtgtctaaggcaatccgcgaaagcagggtgcccaggcaatttaatatacatcagcactcaacaccgcgtcggcgacacaatatgagaaaaccagtttcacaaccagaacctgccagacgacagcatcgttgaacaataaacatgatgccgataagaacatgaaaaaacatgactgtcacagtggaaagttaatgtggtctcaataataacatttggaggcatgattgttacggcagcggccgtgaccttgtccgcgcgtacgagagccgtcgtgaccggtctcacgttctctgtggtatccccgttatgtcctatcagacgcttctaccacgggaaagatgtttccgtagcaaatgttcaccggaaaatgcttctgttcgcacagccaagaaggggttccaagactagatgttgttacagtttactggctcccggtcctgatgtctgcagtttctgtctggagcgttgttctacgctcgttctcagagaccgccaacaaactcgatcaagtaacccgattgaacgcaacaggaaaccctatggagtggaactatgccatggtacctccggaggggatagaacatttcaggacacccgatgaaaaaaaaacattccactttgaaatcgatgctggtgctgtggctcccagttgctaggaacgaaggaaccgcgtcacagaactcattattttgcggtttgtttgcagacagaccgacacgttcgaactgaaattgaaagaggcacatgtctctctctctctctctctatatatatatatatatatatacatcctgacaacaattgagatcgtggcactcgcttctgttagtaactatcgatgcagaagagagtgctctgcggtccattacacagtctgcttaccctgaaaaacagatgcctcaaattgtctcgcggtggcgtctcatgtcacctgcgacgcctaagccaaggcacttaacaaagagtagctcttttttccaagctcgagatgaatgacatgtcttactgtcgttatagcaggctgccagttcgtcttctgccttagtcttttttgaatcaatgaaaccgttctgaaacgactttctgaatgccgaaatacggaaatgccatcaactacaggttcgtgttggttgctatatgtgttctgacaaggttaaagtgtttctgcagtgttggggtttcttgtcaagacgtcgaagaagatgcatggtagtggtcggatccatgagttcagttctaactttttcgcaaatacacagggcctattttaccaacgaatttgcggggcgccagtgggggctacgcaagtctgtttcgcgtacgctttggtctgccacgcaactgctcgctcttcacacgcggcctatctcttcagccatccaactgtccgtggaaggagcagttcttgtttacacaatatctgaagtcacagcaacgccaccgtagctggaaaacgaatccatttttgtccacccgtcgcgctggcccgcgtgcaagaacgtttgacttagtaccttgcgaaaaatcgagcaggaaaccgtgcatggtttctcgagtgttcggcagctccttccgtagcactgttcctcgttaaattctacgcttctcaatgacacaagaaagacattaccaggtggcctacaatgcagaagaccgccgaaatcatagcacggcgcctgcggactactctagcatcccgctcaggaagaaaaacccgccaagctttctcttctcaagatcattttctgactttctatgctcatattgacgcaggatcactcgatggttccagcaagtgcccaggagtagatatgaaaatgcgcttaaaactctcttctaccctcgcagattaattgcggatgctaaatgtctacgtcctattcagttgtcgactcccctgaaaagcggtttttggcttgaacagtcacgcccagataagccagtacccgttatgtggacttaacattctgtcgcttcctgtggttcgtctcacaca

SEQ ID NO: 615 - DNA, 4324 bp, Toxoplasma gondii
  source 1..4324: mol_type = genomic DNA
cgcatgaaaatcacccaggaagatctgcggaaggcgaaggagaaggcgctgtatcagaagaaagggaacattccagagagtctgtatttgtgaagaggcgggagaaaacaatggtgtctccccagagcgtcgagacagctcgaagaacgaagctgcctcttcagcaccctccagatctgagccaggagcccaactcgatttgtggcctcccaagaaggactgacatctcgaggcgaagaagagactggaaaatgtcatggcaggcttcagaggcaccttctgctgagaagaaaggctgtgcgagcgctttcgacccgtcagttttgaggcgccgccggtagcggacaccctgtggcttcggtttctctgtgatagaactgtcgaaacgctgcgaagatagaaatgacgaggtcgcactgcaagaagacaagagagattctaaagaaaaggttatttgcccgaaaacttagcgtctgcgtgtctgattttttcgagttgagttgccagtgtggacacgcatgatcgcggagtgggggcactcaaagcgaaaccgtttatcgccaacagagtgaaccgttcagaccttttttcttggcgcatgcaaggaaaaagacgtgaactgcgtagtcgcactcggcgattcccgcgggtgagggagtgggagtagcgaattcagtcgaaagcgaagaggctttccagagcgcagacgcgacagatttgccgaaggaaaaaagtcacgaacgtgtctgtttgagagaagaacccgggccggcacaggttctccgtgtattttttaggaaggatcgtgttgacagcgacaagaaaaccacacaaatgcttgggtccacgggagcgctgtcccccagacacacgcagaaatacgagtgaaacttacactgcttcctgcgacaactttcgcaattacgagtggaacgcttctcagaaatcttgcccaaaccagagagctgctctggtatggttctttgcttgctcaagcatctgactgtctctcgctgttcatacgcgtctttgtttaccggttaaaagtcggctgtgcagagcttccttgtctgcatctcacagctaaattacattcagtatcctagaactaaatggggtgactcgacgccgcaacggggcagccaggatcgcgaagaatgtgtgacatatggaacgagaaacacagcacctgagaggaactgcttaagttcagctgctgaggatttcaaacggcggaccgcaccctctgcaccgcaaggcgtcatcttcttgcctagtcctctagagcgtgtcctgcgttgctttctggcacaacgtgaaaacgtgagaaatcctgggggagaacgtgtgtgaaggcttgtacgcaggaaacaattcctaagagcatgtcgtgtcgactgttcggcgcatgagctgtcgaagaaggctcccgaatacctgacctcagcactctgaaaattctccacagcacgccattttaggaagcacaagtgctccagtgcgaggcccgtctcggaaaagtgactggcctttctgtacacgtggctcggagctgggcgtgagggggttgggttttactgtgtagagaaagcgagacttgtcatagtgctgggtgtcggccactggagaaaggtggcagggcgtctcctggcgtttcttgcgtggctgtgttttcgagaggtttgatcatcttcgaccgcgtgaacagcgcaaaagcttcaggtgcgctcgagagtgttttctgtcattctcagtctgtcgtttttcgacgcacacagtcgctcggcggaacaacaagcgtagcagggcggtaacaaactcttcggtcccccacgaaaacggtgcgagagcaccgtggcgcaccaatccccggggccgtctacaaacagtttttcctgcttcgggacgttccattgcagtagagggcgacgtttcttcgacgcgtcaaggcgaagttgcctgcagtcttttgaagagcgtgaagcatttcctcgggcgttttcccctactttatatatacacgaaaccatttgacttgagtttcgttcacgcgtgtctctggtactggctgggaaggaacgcaagaagacctgaggctacgagacatccgagaatggggatggacacgctggccagagcgctcccccagtcttcggcgtaaccgttcaagaggagttggctgacgatgatgccgacggcggtttgaacattgagagtgacggccttggcggaaataaagtggaaaactgtgtaaacggccccaatcacagcgcccgcagggcgtccgaagaggtcgccgaaggtcaagatgtaggcggccatgaggagcatgctgaaaaggaagagcatcaacaaatcgtagctcttggtccccgacgagagaaggttgaacagatccaaaggccccatggtgtaccgcgccaagacagctccgagaacgcctgctccacactgaaaaaagcaatacagcagcatgtccggtactcgactgtgacccgcgaccagcgtgcccagggtgatggcggggttgagggcaccgccagacttccacccgatcgcataaattagagccgcggccatgcatccaatgctgagagccgtgttggcgccgtcgatgtcccccgtcatggcacagcacgcgcagtacgtgaacgcgagactggagaaaaattcagccatcagcaggttgtcgtacgccagcttgtaggcgccccagccagccaccgcggccaagaacgggatcacaacgaacgaggcaaactgggagtaactgatggacgttccctgaagggcatttccgatgtttgtgccaagcgccactgcggggttcaggtagccggagaggccaaaggtggcggtgtacgcagcgtacgtgaccagacctacggcgacgcctgagagctggcctgtgtctgcagacgtctcgatgtgcgcgaaagccaaggtactgcagaaaacgagttgcgcgaggagaatctttgaagagactgcgccttccacccccgcgggcagaatgcccgactcgccgcaaatcagcgctgacagcaaggcacccagggccgctccagcaaactggagaacgattgtcaccatggcactcttaactttgactcggcctgacagaacatcgatcaccgtcaaaataggattcagctgcacatcccggtactggtggagggcggtggtcacgacggcgtaggtgagtgagagcgcgagaccgtacgaaaaaatgtcggatttgaacaggctcaggagctcggcagcgaacaggagcgcaaaactcccgaggaactccgctgtcaagctcttcttgtcaaagtctgccatctcggaaacaggtttcaaacccttatggacagaagcatcaacttggaaggttccgtctctgctggacggggtgccgcgatcttacgacaaacaaggccggtcttcaaggacttttaaagaactgcagacgctttcagattgcggtttcgaacgttcagaaaagtggaggtctctgtagccactccagaacttcgaagacacgatagctcgtcgagcatgcccgaaagtcgtggctatcggcgagcatggcgagtgcggccgcggtcttacacaaccgtccagccggaaaagagaaatctctcattggagagagctcgtttccaccgagctagccttcgcctttcaaatgactgcgcgctcgtgtcctcgcaagacgtcgagctcgtctgatctgcacacccagccgggagagcctccaaccgccgagagtcaccagccgcttttggagagtctgtgagtcccgcgcaccgcaccagcagcgaaaattctgccgggtcgccagcgcagatctttgcagctcagacggggaagtaacaagacaccgaaagaccacggagtgcaacggatgcagaatctatctcggccgctaccccaggtcgcgactcaactcgtgtctcctctcgccgcctgaggcaagaccgcgaccgtgccagcctcaaactggctgagctgcatgcccggagcaccctgaagtgcagttgactgggtgcttccccgaatataagccgaattcttgtaattttcagtccgggcagagaggggcacggttgcgtggagtgcgccagtgaccgccctggcggcatcactggagcgagtgcatgcgtttttttctcggtgagcatcgcttttgcgcggaaaaaattcgtagaaaggccgcgcgccgtctctctgggccgtaggaccatttgggggacatcggtcatcctttttaaggaattctgatttttttgttggtgttgtccctctgcggttcttttttccttccgcgcgacaaaga

SEQ ID NO: 616 - DNA, 1345 bp, Toxoplasma gondii
  source 1..1345: mol_type = genomic DNA
tctttttatttgcatacttgttttcgcaacgcgatgccgctcagcagcaggcagagcctctctcctggaggcgcagtgttttcttttttcgtacactggatcgaccagccgttgcggccgcgagtctctttcggagcagttccgcttctttgcccgtacggggtctctgtgggggcagactcttaggcgaaagcagcgagtgcggcgactctgtgtagtcgggagacgcgtggaaaaagcgcggcgcgaaatggatttctggatgcggagaaagagttgaggttgtcgatctttcgcaactggagtgattctggcctgcctgttctcacaaaaaacaaatgagcatctatgccggcttttgcgacttggagaagtgtactgacatctgttcgaggtgttggagcgtaaactgttccttctgatctttcggtggagtctttcaagctctcagttttctcgctctttgtcgacctttgcggaagcgtttgcgagttcagcgtcaactttaagatattgacagagagatggggtcgtgttctgcaggtttgcggatactaaaattaacgtcgcaggtgatactcgatccaatgaatctcgcgactacgtcctgcattcactggagagtctgctgcaccgtctgcacaagcaagtagaaacgctgtcacacgttgtttttcgctctcgagagagaaacagcggaaaacgcaggtccaaagctgttttcttggttttccctgtgctggccttgccgcccggggaatgccctccattctcctctgagtgccgaacaagagagaaggagaacgcgggagaaaacgaggagcggctacagaaaggaaagaggagaacaagtgaaaaaaggagagagacaaaaaacaccacagagaaagagacgtgtcttcgcaagtctgttttttttaaccgattcatagtcgaattgcgagcacggtgtgcatgcatgcacatgcagagacctcggttttcctgctcgagatctctggcgaagttctttgttcctcttcctcgtgtctgcaacgccaagcctttccaaatttctccttcttcgcccgtcgccttcgacgcactttcaactaaaacttgcaaaggctgcacactgcacagccttctctctcctgacaagaagagcgttctctgtttcaagcgagagaaaagacgccgcgagagagaaagaaagagcacgatagagaggagaaaaggagagaaaggagccatccttccttcagaaacgtttttcgcgcgtttccctctctgctttcgtccgcattttcctcttcctgttcgactccctcctccgttacttctcttcctttcttcttcctggtaa

SEQ ID NO: 617 - DNA, 1946 bp, Toxoplasma gondii
  source 1..1946: mol_type = genomic DNA
ttcgaaatgtttgataaaacggatgatttagacgatctgggtggagatgaccaaaacgtctccagaaaaatgccgagagatctcctcaagaaacgtcagatgttgacgcggtttattactgtttggaccactaacacggaaatcacgacccacagattttgaccatcgcttttccctcaggatgcaaggacaaacaaccatgttacatctcttctcgatagttcaccgaatagccctgccggtgaaagctgcacatggaaagcacagagtaacaagcttccccaaagagtatctcaccggcgaacctccatatcctgctggtaaagcctggggtcgttccgtcggtcctgaagatcgtcgggcacagagctctgccgagtaaaaagcgatttcgcggtgcagccacgcttctggttcaagtaatctataataccttctacgtaaaatcgtcaggggagaatccacgtcctcggtaccgactaccattcgtcttctgtacagactaacattagagaaggctaccaaagtgaatatgactttgtacatcacagcccaggagaggttggtgcaaaacatcacccttttcctccggacaatgccgacataatgtggtgaaatttaacaacacagaaggaaaaactcggcctttgtgccagggaatgagaggagtggcagacaatcagggcgacgcagacagtcttaggcaccgggagtcgcagaggcggaggttgaggaactacactatagacgctttcgttcctgcaactccggcaaaccaatagcgtcgacagggagatgtgtgtcaggcgtcaggcttgtgaatgtgcatacaagaggtgggaacgcatatattcatggaatacccgaaggggacctttgttttcctgtgtgttttgctaggaccttccagtgacagaagacttgccaagattggggaaaagaaggaagttcggcaagtgaaaaaggcaaatactctctataggaaaagcagaagaggggaaaagctgaccaaaaggtggagagcaggaacagccgcgggacgatagaggcgaatgccacgacgagacacacaaagccaaactctcgtctcacggcgagacggcgctgaatgaaggcaagtgtgtgtcgggattggcgtcagttgtcactttttctcacattccggactctaaacttcaagtgtcttcccgactaaaatttgtggcgagacggtaaagtgaatcgttgagccggacagctaccggatagcagccgtctgcaagccacgatcacgcgcagaagaggcgattccctttggaaaggaagacgaatgaactgtcattcttttctttcgtcgcatcctttcccttcgaacaggattcacgcaaaagtgtaggatgcctgtagtttacgtacttcgcgttcctctggtgatgggtttctgtaccgtgtgtgtctcccgtctcctgcatgcacatctccgagacactgtcgattctcatcgacagtgacctttctcctctccgaggcacagaacgctcccattgccttttccctttcgcagacgggtttttccaaggataaaagggtggcagaaaatacggtttcctgcctcaagcgtcggtgcgttccttattacagatgcagaccgaaggtctgttagaagctccttgttagtctctcttttcgtctctcttctttggcagaagtctctttcccgcggacgcttcctcatcactcacacacatctcgacgcagactcctttctccttcttctcagttgcttctgccagctttttccctcggtcgttacgtcctctgcaggacttcttttttcctaccccccgtttttcgtcgcttctttcttccagatgctcgcatccgtgcatcttctccggactttttcccccgtcctcaccggctgcccacagtcttgtgaaaaggttttctcttgcgcgtggtctcca

SEQ ID NO: 618 - DNA, 2252 bp, Toxoplasma gondii
  source 1..2252: mol_type = genomic DNA
gtagagaaacgggatatcacgatgacagaaattgaatcacggttatccactgtacactgcaactggaagaagcagagtagatgttgcactagggaacgcattttttaagtgaagaagatatctggtagacatggtcagccttttgccctcagatacaatgggtcagttttagggctgttgactctcagaagaatcagggacatgaggctgacgtgctaccctacgctcgttcggcaacacacctctatcactacgtgtaaatgtgagtgagaagggcatttgataattctgcagggaagttctgttgggaactgcgcgggcacggctacctcgttcacttcgccaagaactactccgtcctgcagggctctctcattcaccctttccactgagggaaagccagatgaatcaaacaagaactgcgtcggagacttgttgaaacgtttcctgtattagtgcttgtctatgtcagagaagagcacgtctttctccttgtcatccaaaccagctcatcatttctaaccattcgaaaggtattcacccctcgaaggcgtaccatctgcagctattcttcgtcgatctttcgagctcatggttcgcatttcatggggctgaaatgcactctgttggatcatgacatacgcaaacaagcctctcaggttcacatgggccggctgttccgcagaagttggagaacagcaagtacaactcacgaacgctctgtgggggccgtcacctgacacgacgatcgggtcccattagggaccgatccaccgtaccggaaagtgttttcctcggtcaatcgctcattcctgcatttggagtcagcagcatcattcctccaatacttccgctggaagttggtggtgaccaccgccaagatccgaagtacccgttctcacaagcaccatgtgaaattcttcggacatcaacgtccgttcggtggttggatgctcagtagatgtgtgtctagtatgcaatattctacaatcttacctcaaaacgttgacattcctgacgacagacagtgggggttatcacgcagtcggtgcactcggtctttctggttcaactgaaaacgcttcggtatttggacatcctggacgttcttctgattgcaatttccattccacctttcgaccttactgttgtaaatcatgtgcagggctgttggcaaacgcatagaatgcgagcatgtgcttgacaggtcgacgacgcgtatgtcaacgatagcagcagataacaaggcttttcacgggtgaaagtgtatcgaacgtatgcattacactggcgttgcgtcatatgcttacgtaggagtttctcgctgtcagtgaagcaccacttgttcccggctgctacactgtttattacaagcacacgtgactgtcttgcgtggattgttcttgaatcaccgggacgcttctttgtgccggccttacaaccaacagcggaggaaaaagtgcatgcagcagcttgggcgctggccgattcgaaccaaagccgcggcaccatgtgtgagtcccggtgtctccgtcgtgtgacaccggctttgcttggtcattcagttttttcagaacaacagcgttggaccagggaagaaacacttccggaagaaaacatctcgtttcttgacggtaccttccaaggatcacaacacgtttgtgcagcgtgttttcttgacagcttcgctgcaggaagtcgtgggtgctcggggtgtccacgcgaactccccgagctctccgcgcacactacccgagctcttcgtccttcttgacgacaggttgtggtgccgaccgcataattaccgaacgaacgtaaagctgtctatctggtgaatcttttccgctgtctgtgatttttacgcgagcgtctgccccagattcacgcaggaaagtttcccctggtggcagcttggcgccggtggtcgggacaaggcatgtgcgtaatctgtgctgttgcctgacgcgaaccccggaatttcgtcacatcgtcccatttccagatacagttgcctcacgcggcccagtcgtcccgaggtgctgcatgccgtggagtgacacacgaagctgcgtttgtgaacattggcgtcgtctccgccgtcgttgtaactgaaagggccccttgtttaccagttaccatcaacgacagatcggatttcccgtttctgtgtgcgacagagcatcttgcagtcttgaggcagcaaaggagaccttttgttgggcagatcacattcgtagtacagcggctaaaga

SEQ ID NO: 619 - DNA, 2551 bp, Toxoplasma gondii
  source 1..2551: mol_type = genomic DNA
cactgtttctgtggtgggtcgcgacgggtcaagagaaccggaacgagaagggaagccggagatatcagctgcttcctctcgtaaagactcggcggcgccggggcgcccacgtcgagcaatcagcggagacaacgcagggaagttggagtaccgcggagaaaacgaaagacaacgagaaagaggagagaccggccatcgtgaagaggaacggggggaggtcgcgacaagcgaatgaggtccctctagagccgacggggaagcttcttcaggggcgacagacacagggagacattggcgagaagtcttctctcctgcttctttcagcgggagaaaagacgaaggcaaggcagaccgcgaaacaggcgatgcaacagccggtgaaggcagcgttaaaacggcatccgtcctctcctttccggggattgaagggatggaaaaacaagaggacagagcctgaggcgaagactcgtgactgcgtgtctcttttcttctctttggacgactgccgtcactctcactgtgtccgcttcgccttctcttgggagactgcgcattcgaggcctcctcttccaaaggccccccggcagcgccgaagccagaagacgcagtagggggtcccgcaaaactcctgttcttcagaaaagataaactcacaacttgattctccgtcaagcctcccacgccctcgctgccgagagacgaaaaagacgaccgaggagacgaacgccacccggcagcagacctgcgcctgccttcacaagcgactggtgcagagcgcttcagggtctggtgggaggaggtaacttgagaagaagcaacagaagaggaagagaatgaagaggctcgaccggcggcacagatcggcaggagagagtctggcggatacggaaaacttgcttggtctgaaaaacttgacggcaggggtagaggctcgtcatcggtgtgacgccttctaagaggaaactgcattttcgcggtggaaggaagaagcgcatgcagcataggcacagctggcacgttggtagccaaataattcaaacctctcaggtccttgacatggacggcagtccactacgcgaaacccaggtgtgcatacacccaagcacacacacggggcaggactcgcagcatctcaaggtcgccgtatacggcgtggcagacggacttttaaacgggaaagaggcctgcacggaccaaatcgattcgtttccaaggtcattgacgagaaaggcatcaagtaagcatgcgcagtgtcgcagtttttacctttttcacggaatgcccaggatcccgcggaacccccaggacaagacgtatcgtgacaggagggcggtgacacgccaccgttctgcccacagcggactgcgatcctttttctgcttcacgatgcgagcccttcaagcacttaattctgaagaagtgaccgggaacaggtcatttacacgggaacacattcctttggccgcccgcactctctcagcgggttcatcatccccttctgaacacctcgggtgtctgtacaccggagctgcgacggcgacagccccgagagcaggcagccgagaagagggaagcaatactgcgaaagtcgactttctggagtcgttttcccaagggaaactcccgggttcgacgcacacgtttcgcaagacacgcgagaaacatctcgagcttttctccgcacttcttttcgagtaaaagctggcagtgcgtcgcctctttttcgcacatgcacaggcgatcccgtcttctttggctcgcgcggtcatagtgccccccgtccgcgcatggcggcgcctgttcggattttcttgagcgtttttgacgttttttgccttcacacaaacgtgtctgtcttcactttctgccgagtgtccagggaaccacgccttcgcgcgtctaggctgttgccgccgtcgtctcgtgcacctggaagagagccacctctgtggcgctcgcgaccttctcttgtcttgggagctctttccacttttcaccgtggcaccgctctcggaaggggcaagagaagtcggtcgtttctgaactcccaggttttcagcgcgtttctcagtctcagttcctctgtgtcggcgcctcttctcgacccgtcttttgagggacaaggtgttttccatcaaggaaagctcgagaggcgtgcagcgtttttttgcagcattctcgtttgctttttgtctttctgaggtcttcttgtctcgcgagcgtccgctgtgtgcgatcgccagtctcgtcgactccacttgaattatctggctttccagtctcctctctctgtgtgaccgtcaacgcccacgccgtcacaccccccgtctctcccatcgcaggtcagaaagcgcgtcctcctcttcctctgtttcccccctttctctgtctctcttactttctgcctgaagccaacacctttcgcctctgtcgccctctactcttctcgtccttctcgcctctccctcgctgcacccgtcgccctctctgccgctcctcgcatctgtccgcacactctctttacggccgatacccttccgcgcgcccaaga

SEQ ID NO: 620 - DNA, 1513 bp, Toxoplasma gondii
  source 1..1513: mol_type = genomic DNA
gtggagggatacacgacggagagagaacttgagtgagataaagaaccagaagaaggcgacgcagcgtctgttcccgttgctggcttctctggaactttgcgccgacaagaggcgtcagaagaccgagaggaatcagagaaaaagtgatcttcaacatcttcggtgccgctgctgcagccgctcgagctgctggacaagtccgaggcattcgttacgtctgcctccgagaaactgcttccagagtcggactctgtgtcctccagttcatctgaaaaggagacagaagatccgtcgaagcgactgtcttcctgccctccttcgccttctctcccttgatctccctcttgttcttctcgcttcaggtgacccaggacgctgggaggccgaaggcgccggcgcgcctctcctgctgcgcggtgcggcatcctcgacgcggtaggctgtgtcttttttcaagacgggggaagtaaggagaagcaggcaagggcgaggagagggagacatgaagaatagtggacaaatatagagccggaacgaaatgcagaggagaaatgctttcacggaaggaaggagaccccgagaaggagagcgagagagattagcaacgatgccgatgagaaaaagaaagaaactcaggagcggaaacagaacgggaagcgacaaaaaggtcagagagagcgcgcagacgagtggaggagagacagaggagaaggagacacgacgagacagagcaccttcagagagaaggaaaacgtaaagagtctctacgcactaagcaagacaagaagcaaggaggaacggcaatggcatcaagaacggaggggatttcgaggagtatgagagggtcagaaagacgagaaaagttgtaaggacggcgaggcgaggaataaatttcttccagaaaaagggattctggctagcatcgttccttcatgaaaacgaattgacgaagccgttttccctagcaattcactcggagccatgttcgcaacttttcgcagatttacacacccttcaaggtcactgacagagaggtgtatgtacacctcgttgcccttcgctagctgcattcgcttcgcaacagcgaggcccggcaaacaagcaagttcgattttccgcggatcgcttggcacacagatcgactgctttttcaaacgacaaaggagacaacccccctttgtttcgctgttcgtcttttcgcgtttcaaacgcatgcaggctcgtcgaaagcgactcctgcctctttgcatgcgcagactacgaggcttcggagtcacagtttcggcacactcgacgcgtatatggaggaaatcgttttccctggtaagcggacaagcttccaatctgcctcttcgtgtttggtttttgctgctttcgcctctcgtctgttcgttttggatcctgggggttctgccgtcgtcttccttgtctcccttcgcgtggaggacaagcggagacagaacaagacactccccatcaaatacagtttgttccgctctctctgtgcagtgga

SEQ ID NO: 621 - DNA, 2423 bp, Toxoplasma gondii
  source 1..2423: mol_type = genomic DNA
gagacacatccaccgcttctccttcacactcaaagatgcctcttctcggtcgcggtctccccgaaagcctcgcccacggctccgacggacctgcgaccacggcggtaaatcgcgcgcgtcttgtcgccgccgatggaacccactgtctcctcgcggacgtccgtatggaccggagttccgaaagccgcgcctcctgtccgtcccgccctgtcgaaacatgtgcgcccagggtcctcgctcttcgccttgactctccgcaagtatttctccttcttgtcgttcttcttcgcgtcctgcgtttgacgcctcttccacgcgactcgcctcgtcagcctcgagggggaggtcgtcttggagggcggccgcgtcgcctcgctcgaccgtctcctcggcggggagacagtttgtggggtcggcctcgtcgtcgaccggaggagcgccggcgaactccatttcgccaacagcagctgggagacggaagacggatggcgcagaaagagagggtggacggagaagccgtcgctgcaaacgctgagaaaaaagcgctgcagaacgcgttcgggagaaacgcgtcgcgaaccgagacctggcgcccagaagtcgcagcagcagctgaggtcgcaccagcgagcactgggagcttcacgctgagagagaccccacggatacgaagagggaggaacaagaaggaggaacaggagggaggacagagagaagaggggagaaaacgaggcggagaaaacaagcagaaaaaaacgaagagaaagggagactctccgggcgacgacacacgcaagtgagaggaagcggtgcgaaaaagaggcgaggcagacgcgtggagtgcgtcgcgcagaaggcgtcaggaagaagcgacaaaactttgagttggattcacagacaagaaggccaaaagagaaaagctctcgtttcctggcgaatcgaaactgcatgcggcgacgcagcaaggaagtgccgatgagggtgagacgagtggcgaatgcgaggggcgcagaggagaacaaattggagagaacagaaggaaaagaagagagagacgaactcttgaaagggtcgcatcgaactgtggagaaacttcactggttcgcggtgtctgtcctcgagaaacagagagagtctgctgcacacggggaatccgccaactcgaacgccttcgtttctcgtccgtcttcgtcgatgcttttctctgagagatcagtcgggagtctcccgggtgctctcctcctgggggaaagaaaaagactgagctcgcaaccttctggtgtccaaagttgtcagggtcggctgccgacgctctccctctctcggcctcgttctgcatgcagggatacatccgtttctccgcttctgcaggtctctctttaagccggactgcagcacacggcgttcttcttcgattctccttcggcgcgccaactaaggaaacaggagggcaagaaaaagaagaagactctacggaaatttcttgtcgcctcttgagcacggttctcgctcgatttctcgtcggcctcggcaagacagccagggccagggtgccgcagctggttgcgcgtcgaggcagccagagagacgctttgaacggatttggaaatctggaaaaaccttctacacactcaaactttctttcgtcatctctccacctccccttctcttctataaacacactcgcctctctcccgtcttctgagcgaatctcctcttctccgtcgtctctccctccctctgtcttacttctgtcttctttctcttgcttcgtttcttctcttgcgtcgatttcttctctgccttcgatttcttctcctttttttagtagctgtctttcctcccttccttcggctagttcctttcttcctcctctctgtctccctccccagatttctctgtggtttgcatttccatccattctcttctttgttttcctctcaagctgtttcttcttcggagctgtcgtggtgtctgctgcgtctctggaggccttggagcttcccccttctcccgggggttcgcgccgaaattccaccgtctctcttgttttcttctctcgtccttttttccatcgcgccttcttcctcttgtgtctgtgcggagcttttttcgtcgagtcgcttgactgtcttcgcctttcccttgctcctctctgttgtctcgagatcttttctgcccttctgctccttcctttcgcgcgctggaattcgaaatctgcagtttgagtttgccctcttcgtctctctcagcaattctgtgagaggccttttccgcctgtctctcctcggccctcgtttccggtcctttcttcgaccttgtctctccccccctcgttcggcgtctctgctgaggcgccctctccttccctggcctcgcgtctcgtctgccgttcttctcttcttcctcgccttctgccacca

SEQ ID NO: 622 - DNA, 3015 bp, Toxoplasma gondii
  source 1..3015: mol_type = genomic DNA
ttgaccggaacgcgtttttccatggcaacatgcccggaaaacgaagcagaacacaggcggagatacagatgtgactgagaatactagtgcaaaaaagaaattaggcgaaacaggagtgggagagtttagccgtcgctcacgctggtggcaatcgagagtcaactgcagaaaatgtttttcatgtctgtgtaccacgtggaacgatcgcggccctgtccagttttacagtgtcgaaacagtgtgtggaatcgctcggttattttttgggatcacataacgctaaagtcaaacagaaaggatctggccgtgaagtgtgttagagcaacggtacaggctcgtttttttgtacgtgggcgaaagtgaagagagtaacaaatgcaaaaggaaaggtgcgagcagcgaagaaggaaggcattttatgtcgataagcgcgttccacgaggagtgcgtgttttgattccaagttcacaatggcaatgcaggggttgaacagtgcgtgcgcccaaggcggacgtttccgtcgtcggtgatcgttttttagacattgtggtgctcgtcacgttcgatatcctctacgagccaatctcatcagagtgtagcttcagtttttgtctgatgagctttttccattctggtaatttgtgcaaagcggttcgtcgctgttcgacaaaaactctttggtcaccgtaacaagtgattgaaaacgtagcagaaaccgtccgtcgtgccgcgtaacagaatcgtttcttcgtgcatataatcgtgcctgcccgcattattccgtttcgcgcctttcacagataacacattgcatttgtgtggagaaaggcacgcacattggtgcgcgggaccgttacaatttgattgttccacacgatgactgccgactcaacggtcgtagacagtcccgggaagttgaagatcgagtacactaaggccacatcgcagtccttctttgaaaccaatggtgttcatagacagacggtgttcgggtcaggttgactgtgtaatcgcttcggcttctctctcctttggcggtccgtgcgtacatggtggcaggattttcagatgtacgtgaacaggtatttggggagacatctcggccattgccacagaaagggcgttcagtattgaaaagtacacggtcagaagtacttgaccagtatctgtttttgataaaatcttgaatcgttatttttagataaactttgctttcatccccagcttgtacgaaaaggactgacaccttgcaatcgtcaagtgtgcgtaggccttctcaaatacgcaaccactcaatttggcactgtcccctcctctaggggactatgtgctgttcagtcacgctctgggccctgatccagagaacaataaacggcacgcgtccgcagcggaaaccaggagaagtcattttttcacatctctttaaaaaggccttctgagatcttccctctacagtagcgacagacatcgggatctgcaagtacacaaatgtttgtgtgtgtagacctcgaagacttgtgactgtcgaccgttctggttccacactgttacttgtcaccaaggtgtttctctggtgtatttttgtgggagacggctgctctgcaattgcaccctttgcgctactgctaaacttgtccgttcttctgttggaacggatgggcagaagaatcacgcgagctcgacagcaacctggtacgccgtttgattcaagatttcagaaacggaagaaaggtacggtgactaaaacgagcaaccttcggcatttgtgccgatagcgttgccgttctggcttcgcagatgccgggcaacgagacaccagcgatcgaagtctgacgggagacaggagtgtttcgtcgtcggaccaaagacagttgtttttcccagacagcgtgtttgttgcatatgtgtgattccacactcgtgtccacgaggcaaaacggtacgatacgttttgtgctctcaaaattcctttcccatataccgtccgtccacgttcgttgtaaactcgtatccaccttcccccctccacccggtgcaagaagcggcaggaggaatttgcggcgtttcgcagacaaggcggttgaattcgctgagctcgaggaccgttcttcctgctgcatagttttccctcgctttcctttgttatcactcctctagtggaacaagtgttgctttcggtccagggtgtcgcggtctttgcgtttttcgcgtgtcaggtctgccgacagttgcctaggtctgtgtgctccgaccgggtacaccagaacacgatcgtttcctgccgaccgcgtcggtctcgcggttgccttcgcacccttagcacttcaaatttccgcttttcagcgtttctcccagtcttcgctcctggtatccttcccaggtttgcgtgccgcagaagctcgagtgtccagggttgtgcacacttgtggagcgtccaagacggttttctagcttttctcccggtgaactgcgcccattttcttctgggcaggaggcctcgcagacagtcttttcaggttggaattccagcatcaaaatcaccggtgccgcgctgtgtttcttctctccgtgtaaacacgcagactcccaaccgggggaagctccacatttctgcaacgcgtcccgggtgtacatacacgtcgcgcagcgactggcatctttctgccggactcatttcgtgaatctgcaaagagctcgctgcttcattcgtttgcgtcccgagttacgcggcgttttccgtttcgaacggaaggattctctgcagcttctccgccaacggcgctgccgtaatccccccgccgccggcggtcaccttgggtttcgtcggaacctgaaagtgtgaatttctctgtcaggatcgcctctctcgcggcgattctgagatttctatcagaccgatcgaggctgcgcgcgggatctggagtcccgcccgcctgacgagctgcgttgccgcccctcaggctttccgcccggcttttctccgtacggtcctgtttccgatatttcctggcaaga

SEQ ID NO: 623 - DNA, 2602 bp, Toxoplasma gondii
  source 1..2602: mol_type = genomic DNA
agtcaaatgtttctcagcaaacaggtacaaagtctcgatcacagcgtctgtgctgtccagtgcgaggagacgcgtggaggcagccgcgctccgcagagacacctggggagagcacgaggagtggagaccggaacctcggagctgcagtgcttcagcaaatgcgtctcctcctcgctctcgccctcggaaggcctgcgctcctgctttgtcctcttcacatgactcccagcctccccgcgttccgcaagtatctcctcggtctcctgcggactctgccccgcctctggagtcggaggggaggcggagagcggagcacttcaaggctgcatgaagacgaagaagaaacgtcttctgatggtcgccagagtctgcgcgcagcgcgtccaacagacagaaaatcacctcttcgatatccaggccgttgatgtggccgccgaccgcgctccggtgtacagacacccggcgagagacagacgcgacgccccctgcctgcgacagccactgctgcatcaaagaggcagaagaggcccgcgcctccaagaagtccggaaggcccacagccccacaagaagcgtaattcggtggagaaaaagaggtcgggggacatcccgagaagcgacaagcctggcgcgaagttgacgatgtgaaagacgaagaggaagaaggagaacaggaggaagaagaagatccggtctcctcgcgccgggtttgcgcttcacttggatcccccgccattgtagggaaagcggcagaccgtggaggagagatcgtagagtctggcgctcagaaagaaaaaggagacaaagagagtggtcgagagtctccggatgaggaagcaggcagcgcgttcgcgagggacatgaacctctctgagattcgcctctgggtcacgcgggtgcctgtacgcctcggccctctctgtttcacgaattcatggcgatcgactggaggccagatgctctgagtttgaggcgcgccgccttcgaggaagtgcgaagacttcctaaagtcgaggtctggtctctccagcttctatggcaaatgtatgtgccccgcatccctcaccttcctccactcctccatttctcttgtcttctttttctccccgctgtctctccagaggcgccctcctgtcgtccacgccgctccttccttctgagccttcgtgcctctgcccgcggctccggcgtttgtacgccgcgtcgtctgggacgtcctcagccaacggaggtcggcttgcttatctgccagcagagccgcggccggaaaagacgcgcgtttctcaccacacataaaggcgtgtggagagatttcgttggaagggccgttcggcaaaaaggagagcctgtagaaggatcccttgcagatcgagttgcgcatgcagggttactctgcgcgcgagcgctctgcgtcattcaccgcgtttgtgcatcgaccggctggaggtcggcctgtcttcaagactggaaatggagtccttttctcagtccccgcgaaagagcctcagagccacactccaaggcgtgtgcgtctaatgtctcacatttctaaagggtgcctttttcgaagtggcaacggggagctactcagctggggctgaatccccggagaattgtcgctgtttcactggcgagtaaccgagcaagacagaagaagagtccggaggcggagagagagcggaaggcaaggaagcttcgtgaagtcccttagtcggattgtgccaacatgtttcgatcaaaaaaaggcctggtagtcagcttcagagtttttgagtgaaatccgaacagcgagacacatcgtcgtaaaacggcatgaggacgcgctggagagtcggtttttggcgctgggtggacgacgcatgcgcgctgcggctcacgcaaagtggacgcacacgcgggacttacagcgggagggcccctggaggcacctggggtcgcggagtttcgtctttccgctttcttcctgaatcgtctttagtcgcgagggctgccctgcgtctttgggcccagcagatgctctgcgcgcggcaaaaagcctgaacgtgctgcgcggacggcaatcgaccccctgcatgcagtggagaccgccgattcccgcgccgccgaaagcttggccaaaatcttgacaccgcgagctagtctttgctccggaagcaactcgagcgaccgtccatttcgaactgctctggtatcagcggtttcgcagaatatgcggacgctgggcgcccggtagtgccgctccggagaagcgacgtggacacacacctatctggtcggcagattctttcccgccggcgggggccggagaggccgcgaaagtgttgacagaaagtctgcactctcgtcccttttcgctgttcgttctgtctgcgacgagaaagtggcaatcgtcacattcgtggtccgctgccaacacacccgtcgacccgcgccgcctcagtctctgaggtgtacgtacacctgccctttgggtgtatgtacaagcctcgaatgtcactgacacgccagggtggatctgcgtgaccgtctgacttgagttagtttcctacgactcgtgaaacgaccctcgtctcccctcgaagctttctttctttcatctgcaa

SEQ ID NO: 624 - DNA, 1250 bp, Toxoplasma gondii
  source 1..1250: mol_type = genomic DNA
ttattcacgaccgggaggagcagaagtgtttttccttagtatgggtaattgcagcgtcttgaatcttgctgaccacattggaactcacgcgtacgatcgttgctgtttcagaaacgtcgcattctgacgcattttagtagagcagcagtggttgaacaggggaacgtaggtgcccgggagcgtgtttggtgcgtgctttagtatctttaccggcttaccgcccataccgtggcgctgttggagggatatcaggtcagagtatacaaactgcactatataatgacccactgaagagatagtgcaaaagtccaacaagtcacaagtcccagagtcgccatagcacctccgtctagaagatagtcaccagcctcagacgctgaactgtttcctgggtccgcgttgcacactttcgccaacagaagcaccaggtgaattgtcagctgagtgaaggcgtgacacccacggtttagttgctctattcgaaaaagtgacagtatacagaaaaaacgtctttcccacaagaaggcaggctaacatctccgtatctgctcgtgtcaccgttgtcggccccgatccggtctggcgcctgttgaggcatggctgaggaacaagatcgggcaagcgactttggaagcaatgcccacgcacggagttggcatttcacctgctcaatcaactctagcctcgtacggcgaggggcagcctagcctgtagactgctaacttctgttccggcaatcgtgaaaactcgacagccgtcgagatttatgcgcattgtgtgcagtgtcgataagcatggacagtcactgaagtagcagccttttcagcggaaccggcaagcagatcgtgtgtttggcgtcacaggggaatctcgtttccctctctgcctaacgcaaaccaggaaactgcccagtcgcgacaagtggatgagacacgagacgccggtcccagccactggcacagtacgaagtctaagttccagatgaagtcacgcgttgcgtccggatctgtagctcattccagtatccacaacgacgcttccggttcccattaaggaaaatgcgggcatagaggctgactgctggcgccttgttcagaagatggtaaaacggtgtctatacaccggacatctaagggagtgacaggttccaccatcgttgtgggcgtttgtgaattgcggtccttgatgtcacctccagtgaaactaacccggtttcgaatctttttctcccacccatttcgcttgcgata

SEQ ID NO: 625 - DNA, 3042 bp, Toxoplasma gondii
  source 1..3042: mol_type = genomic DNA
ctgtgcttcgtgcttggaaggcctttgttaaaggagagactcttttctgtggcagttggcaaagcttagagtggcgaaaaagacgtcatgggaggacgtttctcggaactgtccacgttctgtgcccgtgtcacttcctgcgtgtgtgcgaaacgttttcaggcaataggcaacgcgttccggcgtatggggcagtggttccgcaagaagtggagaggtcgttggttcgcgaacaagcagaatgcagaaattgaaaaggaaatgcagagacacacgaaaaagatgaaggaagagcaaaagaagatgatcgaccgcaaagctcccaacctcattgaccaggcggtgcccgctactgcccccgagctcgatttggttcctgatgggcctgaacccgtgcttggagcttcgacctctggatcgggaggaggcttctttgagattgcctccgcttacagacggaggccgcgcttcgacagactggcaagcatcaggagacacgatgcgctgcttgctcgtttcgataaactgtagcacatttcttccgagtggacgagacacgaaggaggcaaacagcctctcagcgtttcctgccttgccgcagaaagtggtgtttgtgctaggtggaacgacttgtacggcgtagagaaggtctaaaacggctccgtcaagagagcttccggtttgctctccagtggggacgactctgcttcgcgcatagtggtggcgttagcagcactgggggagttttaggggaaatggcgagaatctcttttcgatggcattcgcggacttgcgatgcagctgcgtgcgaccacacagttcacagatgcactgaaaaacccttgaaccccgcccgtctcatccgtgaatccttttgaattgaacggcacagatcaagcgcaaaactctaaagaaatccgtgttactgcaaaaagtaaaaccaacttcactacgattgctctacacacccaccccggtggatgctgaagtcaactaaaacaggtggtcttcactctcccacgacatttctaactttcaggtcaagctattttcgaggcgtaacatgtcgattacggactcgttccgtgcctgatagttccacagactctacttatcgagtccgcagttcggcaactggacacggtagaggcgccgacaagtctgcttgtttgaagaactggtgctttcactcgagtatcatgacttcctcaggtcccaaagacaaaggaatactttccactcgctgcagtttggaaaagcccttttaaaacgctccgatgaaaccatcgcatctgacttaaggcggttatgacgatcgggggacaacgctcaggtccgttcgtctttgcctagtcagtgtgaatactgtattaaaggtttccgtagacgtccacatagagtttccatctcagtaaataaaaacatggagtctccttcgtactgcatatctagagagcgaaaaaggctggccacgagctgtgggccgcctgtactagactcacttgctaccgaaaaactcgtgtgtattcactgaatgtaacacgccagaagtctctgttttttcgttagcaacatcaagcgaactggatgtagctgaaaaaacaatcgctcgctgttttcaccgattcacatgcatccctttacctgggaagacacaaccgtcaaaagaatgcagaagtctgagggcgaaggacccaacgaggagatacggtggaaaaacgcattttcccaatttgagtcttccgtagactcctgtttcattgttttgccgactgcgcatagacacggaaaaagtgaaaaaacatccttttctttcgtggcttgtggggagacacagtgtgtacacgtggagcgagtgagacctggcgggtcgaccctaactcgcagttgcttcggttcgccaagccgaagcatgctcgtgcacactagaaagtacagagattcgatttctctatcaagttaatctctcccttttgttggagagcgtgtcaggaggagtccagtgcaacctcgcgcagaacggcctacccctctttttagtgtcgaaatacgcaagaaaacaactgatacagaacgtacacgctggccactgtcatcgcgtccatggactcttctttccccagtcgtttcatttccggggtggaaggtacaaaaaatctttcctcttccgctgtagatgactgttcatcctaacttcttcaagcatagacagtcaccagcatggtcagcgagagcgcagaaggcagtgtgtcttgcgcgaggaatcttgcaaagaaagttggagatcaccacgctcaacaccaacgtttacccttccttgtctaattcgagagaatcaagaattttttgcggtggaaaagcgaatctctcaggagctttcgactcatgattttctaaaactcctgaggttggtgtctgctcctgccccggttgagcacagccggcatccagttagctgcgtccttaaatggacgtctccctctaatgaaactgctttctttagtatctgtaaagttttattcattcaaaactgtttctcaaacactcaggactctacttttcgttaacgatgtactagatcgctcttccggtccacggctgcctttttagctagtttctgcccacccccccctctccggtagtggcttgtttattctattttcttttcagtggtttgctgcacagcttttcacttctttccttttctatccgaggcactgggcctcagataaactgaagacgaacgatttgagctactgagaaggaacccgtgctcgccgggacggcgttcggtctgagtgagctcgtctgcactcgtaaacttccgcctttccaaagtaaatgctacttggaagtactttgctgccaactgagggctttcgaaaggacgaaccttcagacaaacaagttcctctcttcagcttcttccggtcggaaccttcaaccgcgtctgccgacgacagcaccccgacttcgggggcttcggtgggattgcatcgaacgcctttgcgtagcgatcttgccgaccagggaaactgacca

SEQ ID NO: 626 - DNA, 2020 bp, Toxoplasma gondii
  source 1..2020: mol_type = genomic DNA
caacatgcggaagcaggacggtgcagacgaagaaagcaaagaggaacatgctggcgacgaagaagcggaagaagagggatgtgagaagacaggctcggcgtctcctctggaccgtccttcggcctctggaacttcttcgactcgaatctgaggcgcgtagttgtgcttggcattgagtttcacagagcgaagcagcatgtaacccactgcgctggacgaagcagaagcaaagtgtctccgacatccgccacctcccctgttcggagcagaagaactcctgccgtggttcctcacgatttctgcttgccccgaagacaggctctcgaggacaaacgcacctctctccctccgcctctccttgggcaccgaggcgggtggggagaggcgcaggggacctccttttggcggcgagatatcgccgccttctcggccgcagtcacctgccgcgcgcgcgcgccccggagggcagcagatgaggcgagtgtcgctcgcggtcggcgccggggacatacgtcgcactccaagcctcatgcagaggcctttgcgccagaaaggagcgcatagctcacagacatgtccctccccagagagccgccctgcagcacggactgtctgtcgtaccagaggcctgaccccaccgacagatgggcgagaggtcgaccagacgggagaagagagagaagagagagaggagagagaagagagagaacaagagacgcgagaagagagagaagaggaccagacgggagaagcagtggacgagaaaggcgcgagcgacgccgaaggaaaggggaccggaggagaacgcagagagaacctcattttgagtctcgtctggcaagtggaaaagcccaaagcagagaagggcagaggtgccctaaaccccacacagcgacaagaagagggaataggaaggagatggatgtcgagagagaaggtgggcagcataaggagacgggagagcagggagagaggtgcagacgagacgcgcggggccgggagagcaaacaagtaggcgcgcatgtgagagaagagacctgcgaagacgccagaccacctgcaaccgttgcaggcggagacgaaacggaagggaaagagaccgtttcttgttttcttctcagggacagcgaacggctgcttttggacggcgccgcgacgatgagcgaggacgacggagacgaggagagcgagagggaacgcggttgaggctgagggcacacggaaaggaagtagcaaacagaagaaggcggtctctctccctcgttgggcgacaccatacagaagcgttgcgcaggacaacgaaaacagagagaagcaacagagcggaaagagaacgcaggagaagaacggaacacaaggatggaagtgccggttcacgtgaacatgcgaatttcatgtgttgcatgctctcagctttccgtgctgtcccatttccgttgtccatcgtgtttctttcatgagttgtctaactttaatggcgttccttgactttttccagacagagtaccacagtcaatcactctttggatctcctcccaagaccactacctgcgcataggacctcttccgttgggtctcttcgctgcgctgtcttcccattgttcctctctgctcctcacccgtttctatccccgcgcgacttcttcctttgtctcttgcgcgctttccgggtttcccgtctctttttcttacttcgcttcttcgtcgcttactccgttcttctcttctgtctcccgttccctgcgcgtcctcttctgcagccgcctgtgcttccttgtagttcgctgtttttctcttcagaggcgtggatccgtcttttttctgcgtctgtcttccgctgccgtttaccttgtggttcgccttcttgtcgctcccctttcctcacggccatgtgaggcccttgacaagcttttttgacggagacggggtcgattcagatctctctcgccggcgcttcttttgcgttgtggccggccgttcactcacaagcttatttttcctcgccgctgtttcctggcga

SEQ ID NO: 627 - DNA, 1441 bp, Toxoplasma gondii
  source 1..1441: mol_type = genomic DNA
ttgttctctccctcgttctgtccctcggtctcgctcttgttgtcgttcttgtctgccttcttgtatccttgtgcgttctgtgtttccctccctgttttgggttccttgttcacctgcctgtcttgtctgtcgcatgttttttccttctgtgtctgaaaaggcattcgagaagggagaaacgggagaacactgagcacccgtgggtgaagaaaccgcagacgacagaggacagggagacgaagacgaaaacgtcagagaaggaggaagagaagaccgagactctggtcgaggattggagtctcggagatccgttccttgacacggacattcctcagacgactccgtagagagaaacaccctgcccatggtcgcgtgtctgaactgctcgtcgaagatcagaatgttcctctcggtgaaaggtgacgatgcgggggaacccccgcgaaggaagacagaggtggaagacgcgggcaaagtggcgttccttaaaaatcgacatcgactcggggacttttccttgcaaggaagaatggacagactgccgtttttagctgcattgaaaacaggatctcagacccctgctgcagggtcacactcgtggaaaacagagaggcccggaaggccggatcgcgtcacattccgaggacagaggggaacgaagaaaaatgaccaggaggcgacaagcataagccgtcagagacaaagaaacaaaccacactgacaaaagaggaaatctttttcgcggcgttccatttcctcgaacacagcgaacactcaacggctcgagtggcctcgtccgcgccgccttgagtgtacatacacctcagccagggaaaggtcgctgggtgcttcccagggatatgtggagctcgaggccatgtgacgacggccacaattgaagcgcaaatctgtgttcgtcatcagtcagagatttcggaggctgagcagagagaaaggcttgttttgtctttctctcgcgacttgccgtttgtaacagcattagcagctgcatgcgcaggcgcgccgagtgcatgcaacggccacagatagtcaattggcggtaaaagtggacgaacgaggcgcgaaaagggtcttacttccttcgttatttttcaagaaggttgaagctgaccaagaaaagttctctttagctggaagcttcgaagatagatgcgatagagactttcgacttcctcggtgtcccgtcggcgctcgacgccctctcagctctcgccccacaagagagcggcaatgggctctctttcgtcgacgagaaaaaaaattgcccgctgttctctctttttttatgtgcagtgttgtgttctgtagctgcgttcgttatctgcactgtttacgtcggaaaaggttgcttccgatgcctgtttcttgtacctgcagcgtgacttcgctcgtataacgcatggattttcgtctagatgta

SEQ ID NO: 628 - DNA, 4271 bp, Toxoplasma gondii
  source 1..4271: mol_type = genomic DNA
accacacggattaaacggctgtatgtgcaactctgagcggagagaaagggaactgcacaaaaaaaagaagacgcgcgaaacgcaagagatcctttacacacatatatataatatatataatatataatatattatttatgtgtcttgtggtgaggattcaacgaagcagcaatgaaagggatatgcagtgtaccgggagagaatgctgaatgctgcgagctgaaggcggaagagtgaaatgtatgatgggctggcgagtgccctctcgtaggcagacagaagacacgagaggaaatcaaggatgtatggaggccaaggagaggcggtttgcgtcgagagaaaggcctgccgcagcggcgtaacgctgtgaggggtggaaagaaacaagaaaacacagagcaagtcgcaagcagtatagggacgtcgttttctgcacatctcatttctggagtccttttcagaatcacgtaggaatctgatgtgcctgtttgttcggtgtgaggtacacagttctccacgcggttccgaaccccgttaagcactctctctgttccagagacagtcaagagaatacgtttttccgccagcggttgggcggcgctttttgcgagtctgctcttccgatttcgcaagatatcgtgacaaggggagacacgagagttagagggacgacaggacggagcactagcgggtgcttgcgacgctcggcactggaactccgtaggctttcgtgttctgtagtccccgccagaatcacgcgggtggagagagacgccctctgcacaccagaccggaggacggattggttttccaaagtcgtgtggcgtagaaaacgagaaagtctgttcacaagcgactgctcccactcggcacgcgtctctttctcaagggttagcggcagacgcaacgagggcttcgaaaacgtacgatagtcgcgtccgaacgtcggtgtgagacctctcgattcacagtgtttcgcgatacaattcaaacacgacgccagaaggattctaagtggaagacctctcgatctgcacatttcccatcctgcttgcgaaatcaaaaaaacttcaagcccgctgctgttccagaactctacgactttcacaaaacatccacagctttggcagcagtgctgctatcagctctacgactggtcggctgatcgggtgcttgctccagctttgaatgatcgcgcttatggacatgtcggcttctgcaactggcagaacaaaggaatcacctcttcacctgtgtgtctgcgccaccctcagggtccttctgtgttgagctgtattgcacgaagttctttgtcaatcgagaggtcctggaagaacgacctttgctgtgggcgggctggctacatcgcaagagaaagagttgcattagttgtggcggaggctgcacggactgcgtcgcggtctgcgttctgaaagaaatctataatgcaagcttttcgtgccgtcgcatgtcgattcgaacccgcgtttcacttggcaggatgcaccagcgtttttcgcggcaaactcttgacttgagtcgtgccgcagcaagcgtttgtgtaactgagtacggtgtagatcgtctggactgcatggacgacaggacaacacccgccgcaaaacgcggtgtggtctaccaccgtttctcttgaaacagctgtttgccaggctgatttagacgtgttagtcgcgtgcttaggttcttaaaagtgcgacgcgaattatgtttcgctcaaatttgagtgtacagtgtctacagcaaagtaagcagcgatctgttcctctaccataccatcctccagtgtgttcgagagaaaggggaaggggaagcaggtcttcgagcgtcccggtggcgcggcgaggaattatttgctctgcgtgggagttggcattgcacactaacaacaggaaattaaatagagaacgaaacgtcaaaacatgtccgaaggctccgtgctgcggggcccctcgccacccttcggcgtaggcgctgctgtgtctcgtccagccctgttgcgcaagtccccaccttccattgttcgactttcagaaagccgaaaaacagttgcgattctgaacaatgggtaacgcacgttcacatacgtcgaccggaactcgttctaggctgtcaaagcaactcaaaacatccttacacaccaccagaggccatggtgtccgcggcaccgaggctggcggtcgcattgggggatcgacagttcttgatagccttgttttgtgcagtgtcgtatcttcgcaggggtatcccccgggaacagtgaaagaatctagcctctgcatcttcctctgggaaaccatggcgtgatacgagcgtcccattgcggagatgtatgatacacagttgaacccccccttgtagatcggataagtcttcttcgattttctgatgagtcctccttttccaatgaactgtgctgcgcatcccatacactcgactcaacattctgttgatccagataaagctatcttaagaagcgcgcctgattctctttcgcggcctccaaaactcgaggtcgggtatgtagccgcatgttctcacatttttcttgcttctgccggagagatgcgtcttctttatgcggctgtgtcccgcgtatgagagttctgtttctctacttgccccttggacgcagtccggtcatgcctgaataacatccattctttgtattttgcggagaggcagtgcggcaaaccttcgagctctcgcgccgtttctttgcctcaccgcccttcgaagaactggtgaccgcttcgtgtggcgggggaactcgtgctcaaagagtttccagtgtaaaggctcggccaggaagtcgcggcaagcaaatatgagtctgttaaatacggaaacgtcagtgattgaacatagcctcagttgcgtccatgacttatcctggtgacgtctacagcccgatccccctcgatggcctgtcgaaaaactaaggcttttccggctcccggcctccgctgttgcgtttccaagaactggccgatgtctctctctgtaccgtctctcttttttctggagtatgtcggcagcgctgcttgaattccacctttgctccctcttccgcgatgtcgtgctgtcaccacggctgttcgggaccggtgtttgttcataccagcagccacggacactgcggtcatcactgcgggcacgactgtggtcatcactgtggtcacggattctgcggctgttgctgctgctgctgcgattgcaatgaatgctgcggctgctgccactgctgttcgtgttgtcattgttgctcgtgcgcctgctgtttggccgctatcattatcgcgcttctcctttccctttctggtgggctgctcggctttattttgcggtttctctaaaggaaaacgcgactgcgccagtcccttgaaactcgctggactgggaggcggctcacgattccctggttggatcgaaaatcgaatgcatggctgcctgaaatacccccgcaaaggggctgtgaccgattacacaagacagcggccctaaagatgctgctgtggcagcgacgcaggcgaaacacaacttaggacgacgaaaacccgctgctggtgctttgcatagaaacgagctctggtgtatcttccttgccatctaatagggatactatgattatgttcgcatacgctgttgattcccctgaagtcgccctcaacaagcgttctctctgaaatctgaatcagttgggacatcgaggacattgttcatatagatcggtcaccgcaacgacttctgccctcgtctctacgccttgtcaccagtatcttatatacctacgcatgaacccaacattatgtaaatgtatatatatatatatatatatatttacatgggttcatacatgcatacgtatgtatatatatggcttggatgttcagctgtgtttattttcgttgcttgatgcgtttttttcctctttgctggaggacacagtcgatctgcggcgtgcatgtgccgagtgacgaagtgccagagacgggccctgttccgtttcccgggcaggaaatgagctctcactttagtcgaaactcgtttgcgcagcaaaagtctcatattacgtgaagcaataatggcggcgcacggcaagccgagtcccgtcgagaggcacagacctgcaagtgctacgagacacgcgcaatcccaaacactgccagactggagacagtcggtgaaaaatgctagccggggaaataggttcagtgtcttcagtcgtgacgcgctcgtcgccaaatcagaaa

SEQ ID NO: 629 - DNA, 1776 bp, Toxoplasma gondii
  source 1..1776: mol_type = genomic DNA
ggggtgtcagtgctaccctcgcagagcccgaaaaacactctatcgctttatgttttttgttactcctgcggtgcacccaggtgccttcgtcttcgtccgagacggtgcaaagtcagagagatcgacagatggtgacaatgagatactattagggacagaaaccttgcccctctctgtcgtctaccttgtccgttcccactcacctcccagcagaagggagagtccttctgcgcaggaattcttagacgacgaaatgtgtccaatttcatcttcgggaaaagttaaagacctcgagtcctcggcatgcacaaaggcatgtataaaggcatctaagcatgcaactaaagaagacctaaatagatctggtatcgtcggcgcgtacctgctcagtcaatcggatcaagaaggacagaaataagcacatctgtgtgaagacatatgcgaaacacgtctcaaaaagaatacaaaaacaatgcctgcagaggtccgacgccgttttgtggacgtacccatgtatacgccaaagaggaaaaccggtatctctcgttaactacccctcatcaagcaggtatgcatgtatacagagagaaagattttgctttatggcagcttcattttgagacaatttgtgtcccgatctgcgggagccaccggcccgtttttctgccgcgtttcccgcagcggcctagacgaggagaagagcgtttcttcaagcctccaaagagccgaaacagcgagtgtagagaagaaatggtcgacaccgacagctgagaaacgagaaggctcctttcaaactacggtgagtcggcacattggcgaagccgcgaagccgcgaagccgcaggacggagttctcaagagaagaacggggagaagtggcgagatgtcgcggagagccagaaaaggcattcaggagtttattttcttggacttattgccatgctgtatggtacttctgtttctcgagccaggctgttgcggaagaggaaacaaatgaggggcgaagctcgtgaccgcatgtccagaacgcgaggggcaagagcgaaaggggagggagaagtgcaaaacaaagaaacagacgcaagacgggaaaaagcaaagaaaaatatgtgtagacgagaaaggcgtaatagtctcaacgtggtctgttatgagcatcacagtctctcgacagcggcgttttaaaccaaacgtaacgaacactgttccgcaaagtttcacgcgtagtctctcctttcgattcaataattgtggcgcttacgcgagactggtttgtgttcgctgcgtgtcctttttctctgtccgataaagttttagtctctgcagtgacgctcacgtggctatcttgtttttggatcgttctttcccctgcctctcgctttcgcgccgtatgcacttcttgcttcttacctcgttcgtcgccgccctcctctctgctgtctcccctgccctttctcttctgttcttcgtctcctcttcttttctcacctatctctacttaagtgtggtaaccctttaaacttttcttctgtcagggtcgtctgttctttctccgtctgtgtagggcgcatacggggaaggagcgggcacctcgagagagcaacccgcaaagacacacgagaccaaggctggcgatggaggagaatgaagggaagaacatgctaggacagagacggggcggcaacgagcaaaacgtagacaacaaatcagggagacgtcgtagaatatctccttttttctccgtcttttccgtactgtcggaagcttctcgacataa

SEQ ID NO: 630 - DNA, 3463 bp, Toxoplasma gondii
  source 1..3463: mol_type = genomic DNA
gcgtgtatgtacgctgcatgtaaactccatgcacacttcagagcaggtctttctcttacaggttggctgctcgtggagggaaacgcgataaatgcaggctacatgcaacttccgagagcaggaccgccgaagttctgatgctttttgtgcggcatctaattgaaaaaccttttcaactccacttgtaactcgctttctgaaatcccagtaccgcatacgggaaagaacggctctgaaagtatctgtagttgtgtgcgtgtcgccacagatttccgcgtcgatctagagtcagactgtgacgtggatcactaccagcactgctgcgacaaagttgagacaaaaagctgtaagtggttccgagaggagtttacacaacgcaccttgcaattacttagagtaacacaatttgctcagtgtgtagcgagagagctacacaaaccctgattcaagaaccccaagatagcacggtcagtagcatgactgaaacgtaacttagtaaggagaaaccgaccattatcaactccattgtcgttaacctagacagatcgtcgcaagtattccggtcaggctaaggaaggagcttagtaaagtgaaggtcatacgacagatgtgaaaggcgtgtagttcacactttcgtaccattcgaagggagggctgaaaatggaattatccgcatcaaaagaatgcgtgttcccacaaacactcaaacggcggtgcaacaagccaggaaagactgagggacacgaaatttcgcggcactgtcgtcaagctaatttgcgtgtctgcgcccgcatatgcaaagtgttcacacctattctgcaccatttacaactaaaagaacgatggagtagggaagcgcgtgctccgctagcaagcaaatttatcgttttcaatctgcttctgcacctgaagaaaaaaagccaagactcgttgcagactcacggttgtgccccagtggagataccttgccttccggattctgtgactaagttcccaccggggaattccaccaaggcatcgggatgcgaaaagcggtcgactcaaatcaatagcggcgaagaagtgggacggaaaccgatagagatggcaaagcaaacgcaacggactcaggcgaggccccttacatttagtgccttcctgtagaagcaggcattggctgcgcgaaaggcaagaatgaacgtagacttctgccgaaaccaaattaatcactgcagcaaatgtgaattaatgaaaaggaaccggtttctgtctgtgtccctgccggtacgggctgcgcagctgagacacctcaacatgctagacggagcgtttttaccgtccccccagaatctgaagggaaagccaacagcgatggtcgcgtttttgattgattcacgtcgaaaacaagaatccgcttcgcgtgtgaacggtgtcttttcagactgtgggacgaagaatagtactcagacgcaagccaacatcacgaacatcacccgcacagccttaatttgagatacttaggacggaacaacggacgatctcacactgctagtggatgtttcgttccaacaagcgattagaagcgggaaatctacacggaaaagtatatgcacgggttccgttatgcgtgaagaatgccagaacctgaagcacgcagaaacggctgcgagcacgcaacccactactacggagaatctcaaattttgctagtggtttccgcgtactttcgactgtttaaacgtctcggcatgttgggggattctgaccgtattgttggtatttccattttgcattgtttcttgaagcacccttaccaactcctcgtggattctcttctacagaactgtttggagcttctctaaatcgattccatgtgactacaggttccccacttccaggattttgtttgttgacttcttggctagcatcgtgttaaccgtcggactgtgaaagtctggccacagcttctgcgtggttctaggtttctcccgcactactcgccgccagtggttcattgctttttgtgcctttttgtgggcggagctctgcgttcagaacggagatgatcccccactcgttacgacggcaaagctcagatattagtatgatcagtaacatcgtagtagcgctgggcgtccctcgagacaagattgtttacatgctccgatgtgtttcgggaagaaacgtgtaagagttgctccataaaatacttatttggattttcgctgcggaatctctccctcttccgtccttgcagagttggaaggaaaatcagtttatcggtaaagcgaagcttcacaacacacgcagaacagggcaagccttttatcagtgtcgcgtaggtgaccaccgacaccagcatgtagacggcaaacccctctttcaggaacgcactggggcaggtgcggcacgttgtctacaaatcaccgttcctttctgtatcagacttcctcaaaccctgacaacaggagacgcggaacttattacgggatgacaaaaacacggcgggtttcgagtttcataccactcgaatcaggtggtgcgcatcggtgtttctcgagacacgcgcattgcatgcggtctgatccaaacacagagagaggctttggtttttttgctccggcgccaagacaaaaaaccacaggggtctggtccgccccttgagccgggagactgtcgcctgccgtggtccctcatattctttcccaaagcttctgtggacgtgcttgaaggtgcacatgtttgttttgagataccttggatttctgcgtttttggagacaccggcaagatatattgggaggggcacgtgggctgtgcctcgaagcgcggcgggaaggggcccgggggcgcttttgcctcgccgttttctcgtattgtctcggacttctgccgcaccctttgtgcccgtgcgatccagtttcaaatttcacttctgaaactcgtctccgcaaagttccactagtgttctaccgcggctccgcaaccggcgacgctagaggcggcagaggcagctgtccctgcaccggacgccactcatcaagacatgcgaccctcgcagaccgcgggagctcgaggttctccgcgtgttttgggcagcgttgctgctctgaacaaagactcttcgttgtgtaaatttcttttttggtacggaaacgcaaactggagaattggcttaccgctggtttcaccacagagtcgccgtcctttgcggtgctcgccggcggcgcggaaactcatgtgcaaaaaacgcagctcgacgaggggacctggaggcggagcgacggagaacgccggtcgaccttagtcctccagttttttgcgtttcgccactgatttcgccggagagatctctgtaaaaggtcggctgtgggatcggccgacgcgcagttgccttggaaaatgcacgcgtcccctactgtacatacgcctcagtcaagaccatgcgtcacgtgtcgccgatctgtctcgcctaactttcacca

SEQ ID NO: 631 - DNA, 4316 bp, Toxoplasma gondii
  source 1..4316: mol_type = genomic DNA
ttgcacagttgaacttcgttccatttgcttcttcacttccgttcgcgccgcggaactctgaaaaaaacgcgtctgcgtctcccctcgaaggtccgccggcctgttcgcggagcctttcccccgccgcggcttgcacactcggatctcgctctacagaggaactgtctgcggctggcgttccttccgcggctttcttcaaatgctttaggagagagacagccggcgctgcgtctctggtttggtccggagacagaacagcgttaactgtctctgcgtcaagcagcctggggtgctctgccgcgagagacgcgtccagtgcaccacaacagttctcctcgcctgcggtgtcttgccgcctcctctttgtctccaaagacgggttcggacgcgggcgtatcgtctcgcaaacgccgcaggagtcgccgcacagtgggccgactggagagaagggagagggagaaggaagcggggaacaagtttctgaaggagagtctggagacgcgcgacaggagtcgggtgaggaggcgcgttcctcttcgctgtcctgcgtgtcgaccgccatgtttgcagaagaaaagaaacagaggtgacgaggagattcaccagcaaggcaggaagacgcagcgacgttgcccaggcctcacagaaagcggagagacgcttccgtgaactcagcgattacaacagaggaaagcaagggattccagagaacgcctcagtgatcgagatgcaaatgacggcgactctgtccacatcggaagaaagccgcgttcatccaagagcagcttccgtgtcaccggatggagaggcagagacgcagagagggccaacagcaaagagtcctgctgcgtaggagaagcagcgatttgatgttgaccctctctgcgtctggcagtcagaagaacggagtgtgccccaggattcgcgcgcagaattcacgctgggttttcagtccaacagacaaacacaccaagatggaaaagtcacaccacgagacacgtcacgagacaaagacggacttggagagaagtcgcggtgattcgaggaatccgtctcagctgaaaaagacaacttcatttgtcgtgtgtgttgcccaacctctgttgcggctttcgctgtcaacagaccgtgtctgagcactctctgcttctataacacactgtagagccagcgtttcggcatgcggtcttctaacctgagaaattggagaccacagagtggtgtgttcgagaaaaggcaggcagtggaaaaggcagtcgagaaacgaaacaagaaaagagttgcaccggaacttgacccgcctgaattcaacagagcatgcatctttttacgcgtgtaacagcgcgccaaaggcatgcactctgaatcaacgcagtcagctattgcagacgatctggaaaatccaagaacctcgttgtttgtggcttcaaagagggggaaaattctccaacacaaaggacgagagtcttcagaaagggaaggatacatgttcagtatctccggaattacctgagcaagcgctgccgcgagacgctgagactcaccgcttctcaagaagttcagatctagcgcgttgccactctcgaccgaatgagtattctctttgcctgtcctcagttctctgtcgcactcgaaaggagaagtgctcgttgcgcctcgaagtgcaaagagatagtctggcagatctccagctttatagcgttgaaaagaaggggggaacagccgaggtacagaggccgtccgcggcgatagagtctcagaccagactgagagcatccggcctcacagacgaagaggtcagtttctgtcggtaacggtttcttttccccgctgttggcttggcattttactgccgcttcgacctctggcgattctcgacgcgtgtgacagttttgcgcagctcgctggctttggtccacctacaggttcagttcgtgtcgaggtttagtgtttgtcggaggagctctgccgccactcgtcaccagtgtgggcacacttgggctggccaacctggtctgcagcaatggcaaaagatcaatcatatcctttacagaagatccagtggacgcagcagcgaatctgtgtgactctgcgcatggcggagacgaaagaattcgggcggaattcaatgcggggagaaacgcccactgttgtttgccatcgctggattctcttcatgagttcgccacactacagctttccccgcagcgacacgacaagctgaaacgccacacattactggcaataacgaggagcggcagcttgcgcaggtgttttctctatatatccgcctacgcagtgacttaagagaatagacacacggacgtcttcttgaaaacactgtttccggacttacacaggccatcttcgagtggcattgcagcagccctcgatttccttccgctgccggccttcctgttgtgacacgtagacgaccaacgacgcaccgccggtctttcgcacatcctctagagggagaggggacatttcctcaggaaacatgaggaaactcccgtgatccgtgaagacgtacagctgcaagatgtgttcagtctgatgcatttcaaggcagttactgtctcttgtgcatttctcattgaaaagaatgaggcactgcgtagcgactgtttcgtcaataggcgttgctctctccaacagcagcgtaaaacgcgagtatcgtggatatttttcctctgagggaagccactcgaacacagtgacgcagtgtgtgtggctcgagtgcatgtcaattcatcgtacacctctgccgacgaatgcaatctgacgagctagtcgcatcttccgtcaaccccttttccgtgttcagctctgccagtggcggcaggatcgtgaataggactccagataaaagctgcagacaatcaagttctttgtgaccgttgtaaaccaacgggcaagaccactcaggcaacaactgaagctagactccctgttacacactaacgaaggggattcctaggtcgccaccaccccattgggccgcgacatcggctagaagggctgggtttcagaatcctacggcagaggtgacgatgcaacatacgctcgtgcttctcgaattcgcaactataaaaaaggctagctattctgtaaatacgctttgcacgaatcgtgctgcatagagaatcatcgaaagatacacagcccccgtttcctacaggcaatatagttaagttggacacggttataccctgagcaccgtcaaatccctcaaaccacaacgagggtggaaacttccttgagcgactcgacaggcactatggatagcgtgaaagcttcgacactggagaatgaggaaaagccagcccgcgtattgattcctggttacaaacggcaaacgggttcttgaaattcgagaagacagctggaaagtgttggtgcagcatacctgatgtacggtgcgtcttctttattcgcttggtacgcctgcaagcacattgtctgtcgtagtcttgtgtattttgagtcacatggctcgaggattgcataactactgtcaactgcttaactaaaaatgcggtaaagcctgtgatttctctcccgctgcatctgcatgacacccgatccgctgcaccggcgaaacccagcaggtggccgagtaatgcgtccctgcgtctgtttcagcaacagacacgtacagcaagtagaggatgccaccattttaaccgacgttcttgcccggcgaaagccccagcaacaaatagagcgttcaggtgactgctggtttctgggaccacgcagaacagagaaaaaagtctgtgataactggggaacgtgtttcatgtgtgtgcagttgattctgcgatccagaggcggcagcgtgagaatcggttcttctcagcgcccgacgcgtgtgtcacccccgtctcgtggacgaggtctgtgtctccggagaaaaagctgttttgtgtccgtcagcagtcccctccttcgtgaacaactgaatcaccttttttcgctcttgattttctctttttaagctcgttttcggcgttcttccatgctaccgtgggctgaaattaacacccacgctgcagtggtggctgctgtctccgtctccgcaacgcggttttatgactataacggagctttctgctgtctccgtctctgagttcctgtagaacgacgttctagagtgtttctttgttcaaagtcgagtcttctccagagagaagtcccgaaagacgccttccctgtgcatccaggaccttcgaacctcctgaagacatgagcgcggcgccagctacctgcacaacgccagtttcctccttcagagagcgtccgtctttctctca

SEQ ID NO: 632 - DNA, 4018 bp, Toxoplasma gondii
  source 1..4018: mol_type = genomic DNA
agagaggccggtgccaggcttgtagaaaaccgtgtatgaaaaagagaagaaaacgaggtggaagagaagaagtgaagaagagagagaagaacgtgaggaaacgaaggaggacgagatgcgtctcgacaggagaagagtcagagaaatcccttctttccggcgagccgtgatcattttgaagaagcgttgcgttgctttatcacgctgagcacggatgccgttgtctcaggaagtcctgaaaagaaatcatcttctgtgcattccagagggaagaacgcggacgccgagaaggacgagtcccccgcacaaaggacgatatgttcagtcgaaactggtccggagggaacggcacattttgcgttgttgcctgcattcggagtaaggcattgacctgcaagtacgcagcagcgagctgaagaatttgtatgctttcgacgccagtcagaagatctccgagcggccttccgacgtccgacctgtgcagactgctcgagctgctgagaaacacaaggggagacagctggagaaaaaagagacccagactcaaagaaaaggaaaaaaactcaaccactcaacgtctgagaatcaaaagcaggaaaagagagggtcttgggaggtacgcgttgaaacgcttctcccgctggactcttgcgcatccatctgcgggtgtgtatacagactccttgcagaactagagggaggagagacaagctctgtttcctctcgctttgggcgtcctccctgaccagcgctcttcctctcgaggtgagaaatgtcgcatgcaaagacgaagaaagaaaaggatctcggctgtgcttttccttttccacagcatctcgagtgcaagtctcttgtcttgcgcagcagcgcgccacaggcgagcgttggaagaagcgagatacctttgagttgcgccttcagcattgacacaacagctcgtgcctcctcttcacttgaaaagccgcggctttttccctgcgtggacgcgaacagaacgcgaggctttccatagagaaaaagcgccaggttggactgcatgcgcgcatgcactcgacggcacacttcggctgcgctgcgccaagacagaaaaagacggagcagcggcgaggccgaagaaagccgggcagagttttcggagagaaaggtggaatttcactcaggaccctgcactgccgagggaacgagaagaatgcgcgtctgacagaagtgactctcggctcttcaggaaccattcgctttgaaacatactgctgtcgagcggtgaggttttttccagtagcgacacaagttttagaaccagcgtcggcatggcttctttcgatctagaccagaggtattttcgaaatcaaccggtccgcagggattcaggactcagagcagtgatccttgtagaaatctgcttcgctccagtttcggcattctcgtgaaagtcgtttgaagagtgaggcgatctggcgagacttttctgctcagaagaggccttcccagcacctgggtactctgaagagggacgatgcattcgtatccccagaccaaactcgctgtcgcgcttcagaaacgcgccagttctcctctgcctctccttcagcgagaaaaacgaagtcgagagacgtctttcagcatcgatttgccgcgcagaacaacggtgccttgacgcaggttgcgggtttccttggctgcatccagagcagaaaaggagaaaatacacaggaaaaagggcggaaatgctacacttaaggcgagcctgcaaggcacagggagaacacacaggactcatggagaaggaaaggagaaaaccggaaaagcacaagaacagtacgagtcactagaagagatacgaaatccgaagttgccgcgacacagaagaaacgcctgtcctcaaaggatggctttcttcccttgcatcgtctccttgtttgctttcgtatgctgctgagtcttctcaagaaacgaattgatctttctcggacctcaaagaaaaacctccatctcgtctcacgtagttctggtacaacccccaccacgcacagtccttaccgaaaagaaatactcatccatatacatatatatatatatatatatacatatatacatatatgtatacaaatgtgtatgtgtaaatatacgtctatagaattaaaatgtacatacctacagagagatatataggaagttaacatgtttatatagacgtcggcgactgcatgaggatccatgcggttgaagattgccctgattgctgtctacgtgcgtctccttatcgatgtctttttgttccgatttgtgttaagcatctctctctctctctgtgtcctgttccatacgtatctctctggacctatttatgcatatcgttgtatctctgagccgtcatgttttccgtatgtctcttcgtttgtactcggacccccgtccatttgtagccattttcacatttctggctgggagaaaagtcgagttgcttgtccggtgtggcgaccctgacagatctttactttcactttgtttctttctgaacggcgagtctctgcgtccagattgtggcgctttgcaggcgagtgaagaaaaaaatgttcgagagagcccgcagagtggaaatagaggtttcccggttctctgctgaacgcagttcgcggctttatacagagcttccgaaagcatctttcgtttctccaacgtggagttttcctgtctcttcgtctcgatacatgcggctgagtgcgacagttgtccgttcacaccttcaatcgtcgaccgagaagaacggcggagaaggatgcagagtctctgcggcgaaggaccctcaaggttctctggagagagggatttgctctctgaagattaagcggtccccaggacatttcggtttttgaacttccctccaagttcaggtcgttttctcaggacgagaaatgctctctgaaatgctagatcggctcgcgcagggttcttgtcagagtgtgcacagagacagagacggttcctgaaaggcaggaaacgccctctgaagacgcgtctgagtttcagtgaaaattcttctcttgaagctcgagagcttctctggagagtgtgtcgacgcagtgggaagtatggaagttcatcagcgctagcgggcgttgcaagagaggaggataaaaggaggataaaaggaggataaaaggagaaccttcttttcctcgatttgcgcgtgctctcatcagttcccctccacacacacacaccctgtcgcgtcgctcgcagctccttttacggcgatttttcgcgtttcttccttctaacttcaagcccagttctcacgtggctttcttcttttgaaacccagacacacacctttatttttcaaagaaaatttgaaccgtccccggcggatagacatcgctggtacccacccgccgcaagacacactctgcagcagcgggcaaaatccctatagtgactttttttgggggagagggaacggctcggccgtgtgtgttgcaggttagtttcattttctttggcattctttaatttctcttcttccttcgactcgcctttttccgtttctctctccccagactcctgcctgtcccgttccttccgaagccgcagcagggaggtcacacggtgcgtggatgcgctaggactcgcgtttcttcctgctgtggctgtttgtcttgttcttcggccgagttcgtctttctcctcttctccctctctcccttctttcttttcggactcggaaaaagcctttgttcgattgctttacgggcgagcgaaatccccagaagagaaccgttccgtctccgttccgaggggccggtccggggggtccaccctcggtggaagaaaagaagcctttctttttctcgcctcgttttcccctcttcctcacggtttgttctttcttttcgccttgtcctcttccgcgcttcgtctttctctcttctctttgcttccccccccccgaagtgacccgttgtcttgcactctctcgtttcttgcctcttgccttccctctttggcttctctccagcca

SEQ ID NO: 633 - DNA, 819 bp, Toxoplasma gondii
  source 1..819: mol_type = genomic DNA
gagatatcgatagtgcattgcatgcatcaactggccaacagagaaagagagatacaactatgtgctcgcacaacgcatcaatacacggacaaataactacatatatatatatatatatatatatatatatatccggataacgcatctgtacatgcaggatacatgcatgtatggcacaaaatatttacacaaacatgtatgtaaatctccgcagaacgaatcgaaaaatttgggacaagcccatggatgtgtaggacgcgcgtctagatgtgagttcaacgcacttatgtacgatgcatatatatatatatatatatatattatataaatccaacataaatgtggatacacatccgagagatacgatgtatatatatatatatatatatatacaccagacagaaacgttgactgcccctccctatggggatccaaggagaatgtagaccccccagaaacctgaatagaggaagtcgaagcctgcgagacttcaggaaagagttgaatcaaagacgatgaagaaaactctcccatgtttcttttttttcgtgcgcagactgggtcaccggtgtacagagagcgactgaccgtcaaggacccaggtatggcccgcgggtatttcgatgctgtcgacgttttccagatcggccttcatacgcagctgaatcaccaccatcgtgggagagtggaagcgaaaacaagagaaatatgggggagccagaagaagtcgtcgcgcgaaaaaatacgtagaaagcgaaagacgaaggccgccgaaagaggacagggaattgcccgagaaacgacgtcgcgaaggcggga

SEQ ID NO: 634 - DNA, 2287 bp, Toxoplasma gondii
  source 1..2287: mol_type = genomic DNA
agagactgtccacgccgaaggagagcatgtagccgtgctcctcgaccgcggcgacagtcgcggggacgaccatcccgggggcgagggagttcgccgagaggccggcattgaagagggaaggccgcagcgagagaaggagaactctcgagttctgcgagtgtcggcgccagtcgccttcctcttctctgccttcctttcctcctcccagaacgaccgtctggacgacttgaccgacatagtggcttcgcgacagcggcaggaaggtctgcgcatgcggtttgccgtctcgcgccccaggcacctccgacgcgtctccgaggccttccccacacacccttgcagacgcgaaactgggcgtcgactcttcctgagtctgcgatcgggggacgcaccccatcattccgaaaggcaggtgaacgatcaactcgctggtgtgaacctccgcgacgatccccagaagcagcgaaccgggtgacaccgtctccgcctcgacaggccgcgccagccgctcgaggtgctctccgctctggggagcgcagacctccgagtccggctccggccgcgcagccccccgcgcgcgctgggcgagtttctcgcgtctgcggacttcgcctgcgaccgccgcaggggagaaggctgcaggggaagaggggaaggaagacgcgaacggcgcatactgcgctggagctgggcgagaggcagcctgagacgcgccgccgctctttgcagacgaacgccgcggcgctgctcgcgggaagtctgccgcgtccgagaacgcggcgttcacagacaggaagccaggtcggccccgctgagtctgcgccatgggggcgaaggcggagaactgttcaaggagagagcgaagcggagaaaaaggagaggaggacagcaggaagtcgagaacaggcgtgagcagaagagactcgcagaggaggcgcggagagagaagtcgacctccctgcaaactgagacgcgttcgactcggacacagagcctgtgaagaagacgcaggctccgcagtgcgcgagagagaaacaagagagcgaactgcgtcgaggggaaaaacgaaaaaggagtcaaaaaaagacagacgacgccctgcgggtcgttcagcagctgccgagcgcgtctaggacgagagcccctcgcgggagaaacggagtcgttgcgcgtagcagagcgcgttttgcgaggtgagaaagacacacgcaactcaagaagaagaggcagcagacgacgagaaacccagagaaaaaaaaacgcaactcttcgcggcaatgactctcccacttggcgccgcgtgtggggcagaaaacactcgacggcagaaagggaagggaccggcaaagacgactcgcggagctggacctttcgagtctttcccctgagctctacttctagagacaacggccgaagcaaacgtggagactcagaggaaaaaaacagacaatcatctggcccttgacacagttcccagtttgactcagacccgccgccgtgtcgcgttcgagcgcatgcatgcaagttcggcgcatgcgagtcgcccagacagcgaagccgcgctcgcctcgacgaagcttcgctgtttttccgcgcatcttcttccgaagagacaccgcaaactcttggctgctggcctagggcgtttgttgcgcgtttgtctccaggaaatccgcgtttctgtcgggtgatgccgcgccgtttcgcttgacggatgcaccgactcgcgccggctgtgtacctgctgctacagttgcacactggcgcgccgggcacaaaggtgccggtgtcgacgccggtgaatttccttcgtttttctcgccattttcactgactccatgcgtccgcttcatttcgcgaccttgcgtcttcctgtacagcccagcttgaacttttctgggagacagttggggaattcgttgctcgtgactgggcgccatgtcggcaacgcagccgcaaaacgcaaaggctggccgcacgtgcaaagcgtccttccctttcctgtgaaatgagcgaaacgaggaacttttgctttgcgctgccacagcagaaggaattccttaacagcaaaggaacgtccttcaaaaggcgcgcaaagatgttgacgtagcctccgcaccgcggtgccactgcagtagagaacaccgtcgacgtcgtcgagtcctggaatccggcgtttttcatttcttctttcgacgcacgcgaagttccacaagaacgttcagtgaggtctcttcacgctatgcaaacttccttttttttcgaggcacacggaaaccaagtccaa

SEQ ID NO: 635 - DNA, 906 bp, Toxoplasma gondii
  source 1..906: mol_type = genomic DNA
gtgctgatacagtccgatgattagaaccctcatctaagtttatactcggttaaacatgttagatgctagcttcccggctaaacatcccttttatttgaaacacacttcccttcttgccgtttctatgatctcaaagtaccagaagacgtgtggttccgagaatactcagtatatctataagtctattccgggcacaccctgtcttttatcggtgtgctctaaatctaaattcatcttacaattttggttgcttagttgcaatggcctttgtactaacgtttggatacttcagaagcgtcttatgcgtgagctcatacggtctgctcctaagtacgcagtaaattacgctcccccacaacgtgccctagaatttaatcgaactgcccaaacatctgcagatagtatctacacgacatgatatgcagtggcttttccgaagccatgtttccgtctaaatgtcctaaacggtgtgctgtctctatgtttttagacgcggcggcttccttaaacccatcacaatgggccacctactagcagggaggggttctatgggacccgatggggtctacagagatgcggtgtcgatctgcgcaaaactgtcgtttttcctgacggagcccggaatcgtagcagtactctttctcatcggatctaccgcaaccatttgtagcctgccttatcttttgggtctcggattctgggatttgctgacacacacgctgcctgccttatttgccgggcatctgcctgaatctgtgctaatttcatgtccccatgcttcgcaaattgcagctgggatattcattcttatttccatttacctatggcaacaaactgcaagggtcattgcaaaaggatacacactgccacggcgtttcaccgatccgtcccgtcctccaacatgga

SEQ ID NO: 636 - DNA, 4264 bp, Toxoplasma gondii
  source 1..4264: mol_type = genomic DNA
gggatttgcggcagagtgtgggacatgctccgccagtctagacagttcacggagagactgcgagcgcagagcttcgagcttctcaactcgccaggcgctgcgctgagccctcaaaagctcttcgcgccactcctgctccgattggggtctgttcgaaaaaattggtgtttttcgcttgaagtcggagcgccgggcctcgtagtcgactgtccgcgagtcggccgcgtgcgaggaagagaaggccatctcgttgatcggtgtgaagagttgaggaagagcaaggcggcacagcagcgacgactctaaagcaagacgaccggcgcaatccaggacgcctgaaggagtgcctctcccgtcaagacgagagtgacaagagtcatttacacatcttatgcatggaacataggggatgcggacttccgttaatgccgtcgcataatgaaattccgcattccagttgtcttcagcactcccgttgggtggtgaacagacatcagagtggaagggggagccgcacgggatctagaaaagcggagttgaagcgagacgccactctagagcgacgagcaaatcaggactctggaggggtgcggatccacctctgtttttcaaatgtggcgcagtgtgtgttgcaacaaagacacaccacgggctggctgccacggaacatcgaactgaagaaaaaggaacggatttgaatgagacagggcaacactgcgggctcctttacgagaaggcagagcactggtctggtcacagaactgcgctggcacgcagctgagaacaggattctcacgttctggagcgtcgcgaaaaacactttcgtcggcatgcaagacactgttgcacccgcacgacggcttcttcggtcaagaaaaaagaaagtattcggcgaaattcacacgaggcatcgctggagaagaggtcgaggcttcagaggcagcgagatttacgcagaaggagccactctggctcagaaaagtatctgcagcgcaacccaattaaacgacgcgagctcagcgcggaaagagaccaaaagagaaccgaaaaactgtttttcgagtgtggaaagtcctttattggaggaaaaagagaatttgcactcaacgcaaatgactgaacgacctgaaaaaactcgaagcgcacgcgatacgcgaaaaaacacagcatgcacgcggcctacatgcaaccctatggaaacgcgcaaaaacgacgtaccttggcgtcagtcgggaatttgtcacagttttcttgttgatctcgagtggacgccatcatacatgagaaaagcattagttgggttccagatggttaacagggaaatacaatcctgcgtgtgcagtccagaaacgggagtttcgcttttagacccgcagctgccccgtgcacacagttttaacagaatatgcaagcttctctgcacagttttgcgatcgggacgacgcgtccgactacacactcagatctcggatctgatggctatcttctgcagtttcacgtcttctttgtttgctaggtagcacactggcgaccgacgttcccaatttctgtttctccacataatttccctgggttcgtttgcttgtcagtgaagctggaacgcagaagagaaacgcgctaccacaagctggcatttacagttagactgcggacggtccctgtttaatttatctggggaaaacgctcgctccacgacttgattaccaccgtcgaacggtgcgtagagggccggcagtaaccgtcagttgcacacgccactccatataggtattttcaccagtccagaagtcacagagaaagcagataggggcgcttcctactgatacgctggtgagtgctttggcaagcaggaaagagaaggaattttggggactggttgccctagacctgtccctcaaaaacgtaagggaaacttcagcggatacctctgcactgactcccccacgttcgtggacgtggagccagaggaatggagaaaaagggagttcaagtaagcgtaggaatcccgtttcatgatgtggaccaaggagtgtagctgcagttatctgatcggttcggcgtgccgggtacagaggatctagggcagtgagcaggcgtctgcttgttactttgcgtgataagtaactaggtcagacttaagcgtgaaaactgagggaaatggattgcagtttagtggctaattgtcaaacacgtcaatctcaggttttccatggaatcgatgtggaagagcaggcttcagaggactaccgggggtacttatgactcgcctgtttctgtttagttacagaaagacatgaaactggtatacggaaagatacagcataacatcggtcggtacccacaaccgagctcttcaggcggcggcgtacaagatgggcacacatgagggggaaacagcatcagtctaatcaggcagctttgtagacatccgtttcggtacgcaaagagaagggggcggcacgtagactcagacgcagaaaccgtatttgtggtcgaatgtgagatagacaactatgtcttcgaagagtgtgcattagctggtgaatgccaattgagcgcgggaacactgggtttcgtgaacagtctttatcggcagatccaagtgtcgtttccgcggctttttttgctggcgtttagtatgcccgcctgcacaacgggcctcgccaatgtcaagatcgattgtctcctcgctgtgtgccgtagcccttcgaatgaagtcgtatcatgcgcaaagaaaaaactggcaccgacgcagcactagcagaaacaagagatgttacgacgagcgaatacatctgtgcagcattctttctttggtgcttagaccaaaactgagctggtttcgacggaaggctctccggagaaagggcttttaggaaactcccccaattcttctacttcgcggaaaacgaaaaaacatccgcgaacttcagtctaagacgactgcccactacgccatcgttacatgaaacgggagaaaaaaggagacgcctcaaatcaggcggacagcgcctgcctgtccagcgcttcctgttctccattgcaaagtgggcatctttttgctccaggaagactttcagagtagagatgcagtcgactcggactgactaggctctctgcagatcatttacggggggttccaactgagcagcggtttaacggcataaacgggagagtttagtgatacgctatggtgaaatgaacaaggtccacgcgacgagaccagacgaaataccgcaaaataggaaaggaaatatctcctcgactatatccgttgctaggctttcttgcacatagacaatcgagaagccacaacagctagttggaacacgatgggggctgaggcggccgggaggccgagaggcatgcgaagacatcggaattccgtgtccttttttcgactttttgactcaagaaatctggtcagaaggatgcgggaatttccagaaggaagtcagacgaaaaaacgaagtcattgaagaattccttcccgcgaaaaaagcgaaaattgggcttaagacaggtgttagagagcttcaacttttccacgagccgtacatacaccgcgcatgagcgcgcatgcagagtcgcgcagacgacagccggcatttttggcagcagatttttttctcttcttctgtgacaacgactgttctgctttccacatcgcattcaccccttctctgcagttctcatcctgcctttgtgtctcgtccgtctataaagcgaggagaaggacgactaagaccagcgtggtcgcatgccgaagagcgggacaagaaccagctggagaaacctaactttggcagcgtgggcagcgacgcttgtgaaggcagatcttcgcctctcacctgttgaatagagaagacttttcaactgcttccgttcgaaagctacggaggagatgcgcttgtgtctgtccacccccttgttcccgcattctttcctgtcctgtgttttcctgaatcaggcctttccaaaccgaaacgcagatggctgtagaagaaacggtcgtttagacgagtcgttttttgtggaagccaagaatcgatattttcctcgaagacgagagacccgctgtagcatgcctgcatcgcatggcctccgtggccccagctttttacagatgttgtttccatgtagtattgccctcccttcgcctttttctcctcttaccttttttcatctacccttcccctctcaaattggttctccatttccatccattcgttgtgtctgagcccatttcccatctcatccagta

SEQ ID NO: 637 - DNA, 2343 bp, Toxoplasma gondii
  source 1..2343: mol_type = genomic DNA
gctgtttgtgtctctttcctttcctgtgcgcacaaactgatctcagtttccggccactctcgcccaaattcgtctgaaatggctcgaggcgagaaacgtctcttcaggtccaattgttggcttgacctctgcgaatctagagagagcacctacaatgggctgtacgtacactggtcgtatgtacacgtagagggcttcaaggtttttgtgacgttgaaaggacttttctgcgacgtttacgatttgtccaagactggcgagaaccagtcctttcagagacgcgaagactccaaaagtttcctgtctcgtgtacatacacctcgtttttcctaaggaggtagccggggtgtcggctgttcgtgccgaatcgccagtttctcgcacacactcgacctctcccgttcctcgtttccctcactgtttctctttttccacctctcaggcgcgtctgtgggcgaaaatgagagatggactctccgtctctgtcgcaacctagcggagacagctgggagcatgtctacgacgaaacgaagggaacaccgctgcgagctatgtagctttctgtcagcctcttctttcacgctcacacacatttttctgtagagatagatgtgtacttgaactagactcgacttccggagtttctctctcgcttcctggagtcttttagagacctagcgtgcgattctaactgttgaaaaacggagtcactctcgagggcggtagcgaaaagtcactggttcgctgtattgacggacgcttgaccacaggtcggtcccgttgcctcaagcgagctttccacttcaacgtgagacgcctctttttttcgattcttactggcgggagcgaagctccccgggcagcttgaccctgcattcgcctcgggcgctgaaccgaacatgtcagctcaacactgtttcgcaacgatccaacaactcagcacaaaaaggcgcattttcaccgaacaaagctgatgcccatccggggacaggagtcctgcgtcctttctcaactggcgaaggacttgcaacggctcggtgtgtgcgtgcacagtcgcgagcgccagatcgcgtttggatcgcgttcttctttgggagacttgtggcaaaaaacatccgccacatggttttcctttcggttcgagcgcttgccggtggcacttcgacgaacagggtcgcttccgtcgacacttggaaaaggaacggaaactccccgctcaaagaaggggctccctttctgcatcgtctcctgttcccagcgttccgagtcgtcttgcccaaccggtggtaggtctgagtacaccgctgggcgacaggtcacgcgttgcggagacgggactgctgcccttttcgctttcgctttcgaaaacgcaaaaaatcctctctgctctggcgcttacagttccttttcagagcgtctgaaaacgactccaccatctgtcgagcgcttgggtggcggaggcagcagttgctcgacagcgaaaagaagcactttttcttctgcagcctctcagggagaaaggagggttgtttttctcttgggatagaaaggctggttgcgaagcgttctttccccatcttccaggtttcgggtgtatgtacaccgcagaatctggctgttgaccagaggtgtatgtacaccgcaacagaactggacacatgcgtcgtcagcgcgtggtcacctcactggtgttcgagcagtttttcgctcttttctcgtcgtttcttccccgtctttctctcttgtcttctttcgtcccccaattttccatctcaacacatggtttgagacactcttcatccccaaagtgatcctctcgtatcttcctctcctccgtttcgagctggtccctcttgcatcttgtgcctgtctgccgcctctctctcacctcagctcgaacgaaggcgccgctctgtttccttcgtcctcttcgctctcctttcgtcctcgttcgttgatcacagacgcaagaagtgtctttcaattttaactggataaagtcttcttgcaagcggcgtggagttcctcctcacccgtcgacaggctcaagcgaggagaacagctgcacctccctgaaaagcatggcttccgtcgcgtctcctgtgagcgcccccgtcgtctcctctcttgcctctccctcaacttcctgccgcacacagccacagcgcgcccccttcctgtcctagaggcatcccgttcgtcctcttcaaactttctccactgtcttcaagtctgtctctcagtctttcttctcttctccccctcttcacagcgtgtgcctgcagggcgttctctggcgccttcgaggcggtgctcaccatttcttccaaaaggtcacagaca

SEQ ID NO: 638 - DNA, 1921 bp, Toxoplasma gondii
  source 1..1921: mol_type = genomic DNA
atggaggtgttccttcagctccgtttgccgtctcaagagaagcagcgaagaggagactgcagaggagagagacgcggcagatggagaagagacggaagaagcagcagacgaagaagatggcggagtcgacgagactggggaggagtcgcgggaggaaggccggccggacgcggagaggtagccagcgtctcctcgccaggacgtctcgtctttccgcgagaggcgggagccttgcagggcagtttcggatgcagaggagacgtcagaaagctgcttcgtctcgcctcggtgacgcagctcctgttcctccccttcgcgcggacgcccgtcgttcgctgccgcctccagacggctgtcgccggtggcagaggagacggacagggagttgatctccgctttaagacgacgaatcgaggacgagaagcgccgcagctgctgcagcaaatcctgcaccattcgacagtcttccaggtacgccgcgtcggctgcggcggcaggcgccgcatgcagagggaggagcgccaccgcctggggagaggcagaaggcagcgacgcctggaatgcaaaagacatcgcgaaaaaaaacgccagaggtacgagcaacaagaggggagaggacgaagcgcgtagagcggggagaggagggtgcagaaagaaaagcaagggaagcaaagaagagagaaagaagacagagaacaacgaacggaggctggagagtcgtcaggacaggagtcgcgtgagcgtctgaaaaagacttggacgtttcgaacagataaatggacctctcacagagagagggccgaggatcgaggccggagctacagccgagcgacgggaagagaaggaagaacagagaccttagaaggagagaaaatgtctcgaccctgagaggacgcgaggcgagacaggacagatgattagagtcgagagcggtccggcggagtggacggagaaaaaaccggaaaggaacctggcgctggacggcgcgagcggacctgaaatgaaggctggaagggcagcaagacgaagacgatcgcagcaggtgcagagtcgctgaaaaaagctgaggaagactcgagaaacgaagcaacgaaccgacagggaggcaaactcgaggagaggaggcgacttgaaggaggaacagggaacgagacagaagaggaaaggagacgcagaggaaagagaaagaataacgcagcaagagagagaagagaaatcgagaagaagcgacggctgcgatggcgcttttgaccgaggacgaaaggaaaggagacagagaagcccagcctgcctcagcgacaaacagatgagaaggacgcgggtgaacctgccactgcacaggacgcgagaaggatagccggagctgctatgagtctccctttctcacgggaggcttctactccgaaaacgaagttccttttttcctctttttgcgtccagttcaacgaccgcgctgtgaagaagtcaggagcgcatggagagcgtcggcaaaactgcacacctgcgacctttcgcagacgtcgagagaaggcccactggagtgcagcgtctccttggaaagttgagggtaaactggaagtctgtctctgttgtgaagagaaaaatgaactgctttctttctgaaggaaggcagaaggcaggcgaaagcgtttttcctcctcccttcaggtcgaccgacaacgaccttctcccccgtcgtccgataggggaacatcgctttcgcctctcgtattttcttcatgattttctggtgcatcttgtttccggtgcgtcttctccttgttttctttgcctttcatctctttcccatccttctccctctctgtctcctgccttctctttggtctctctccgctcttcgctcgcgttttctcccgacccgtcctctccccctgtcgaagtctacactgttaaagaacga

SEQ ID NO: 639 - DNA, 3131 bp, Toxoplasma gondii
  source 1..3131: mol_type = genomic DNA
tggattgcaaatgtgccagccggtagctgtatccggcctccgtcagttggactgccatttccgacttggctcgaaaaggacgaacggttgctaagatcccttggaccaatgatcaggcatctgaaagagtcccgtacaatccattgcactgatcagcagctggtgagcgtttttgctatcctacattactgcaaataagaatactaggcaatctggaatttcgagtttctaaacatcgggggagataaattggggagatccagtgaatcagcatgatactgtaaggaagggaagctcgtgttccttcggtcctcagataacagtacattcacgctgattatcacgtagacggggtgactccaattttgacacacaaagctcccttgttagggacacaggcacgacgcctgtggtgactgaactgtagactgcgccgcaactacagtgactgatcgtttgaaacatgaagaccatttctgaacgactcttcggtcgcttgtggcgaagcactctctgttacagccaccttgtgtagggtcgtgatgcggtactacgaactatcgactacattatagacaatctgagtgcccagtggctcatttggagtggaaccacatggtgatggtcgtaggaaaccgaatcgagttctgcccgcgtcagaggagagatcgtcctggcagtaacattgcgcgacgcaaaagcaactccccattgagttgcagtcagtaccgcggaaaagagtttaggtccccttttaacttcttttatgagtcacgctactggtgaaggcggtatgtagcatacaatgagcctgcaaaatcacgcttctacgcgccacgactgtaacgccgatcttccttcgaagacggcataacagagtgatcaaaaactcagattcaggagtatctcttccgtacagaaaacatacgataatcagcctcaaccggagcactacttttgcacctgcggttccagtgacgggaaacgtcgaaaacgcacgggagttgcgcgcctggtgctaccgaattttgacagtctggtgttcgtttagacggtaaagaggtaaaaaaccgccttcatgcttctcagcaggagagatgtaaggtcactcatctcgtacgaaagtcttgcaagaccactgatgatgtgctgagcgtcgtgcagtgagaagtatgcatggagacacggtttcgcgcaaggcatacgctgagccgtcatgcctggtctatcgcgaacaggcagcataggtgtttgcacttcttttgggcgcagactaatataggggggcaaggcagcgttattttaatgcgtaagtactgcaacaatcccattgacaacgagcagggagggaaactgggagattgtaagggccaagctcagctttgcacaatagaagtccccacgacccgctgtgttttttgggaaccacatacaccagtattatggacaggcaaaaccttggtcgttaaagtaccgttggtgtttcggactagagtgtagcctatggtttgccttttctgacagagtgaggcagacttcattaggtggcatgttgcaatggtgtccctgatatgcaattgttgatctgctgttcttcctccgccgctgcagggtaccaaacgaccaactatgttgtgtgatgagccgtgactccattgcgaggtagctatacacgatttacacgccagcggtacccccctcagaaactgtgcgttgagtagtgaaatgccatgtctattggaaggcagtagctctctaaatgaactattccgaaagggacagagaatgtgaaggatgctgttgtctagatacttgaccgaatgctgatgttttcccttccaggcctttctctggttaatgataacatacgcgccagtgccactttttcaaacgtacaaagcggcacacggcaatcggggaattcggtcacgtatcgaacgcggggactggttacctgatgtaagagtattctgtgacaaggtattttgggggctccgaaaaaagggactgtttgatgcttccctcccgatgacgagatggcaccctcaactccggagcacgtcccttactggattgtcttacatccaacaaagcacacccgacgtcgtgagatcggccactgggctgtggtcagtgcgttcatcgttctggttgccacattgacttttccaagcttgtgtgacaaagtcatcagatatgacagcagtacttcggcggacggggggcacatacatcgctccacatctagtcaagaaaaacgttatcgggaggaatatacttctcatacgtcatcccggtaaggttcatccactggcaatgcacacacacatgatcaacagagagctgcatgggaaaaaaacactccagagaaggcacttgcgcacggccaatccgttttttccttttatgccttataaaggtacgatatgggactacgttgttcccagaaggctcatggcgtgtagctggagttatgctttgattaggcttgcactggcacccgagagaacgcgatggttcttctggcaacacgggtttcatgctgagtgcgaggtacaacgttttactacttcatctgcgcaatccccgaggataccatatgtgctctgtgccggcttgcttgcaacgcctgcatgcatgttgatcaacagttttaggtcataaatgtatcctcggctcgtgtacggtgcagccttaagatggggtgtattgcagaaatacaaacaaggtactactaagttatgattttgtcattctgtcctgtgggcagaggtgggtggtgcgagcatctgccacagactctgctagtcagtgtgacctgcggactgaagtggccgacaaggttcgtgcttcatcatcaggggatatgtctcgaggtcgttcaccacagcgaagagagaacaattacagctcggtttttcagttaacagggttttgccgcataacattgaccgctgaattatcgacagtgcatcaatcactcgcctgggaaacgtccattccagacgattgaagagccacagagtgtcccttggggtaaaaaagcctctttctccctccccccgtctctcctcttcaacaactgcttcacgtgttcgctggtgagtgatgcacaccagggaacctagata

SEQ ID NO: 640 - DNA, 3022 bp, Toxoplasma gondii
  source 1..3022: mol_type = genomic DNA
tatgtgaatgatgtctgcgttcctgatttcggtgggtgctgttcgcagcaagttggtggttgtgcagcgcggcgtctgcaacggctacaacagcactctctcagtatttttgccgaaaagtcgaaatgcaagatatccaattggaaaggccacccgccggtcaccgtcgcttttcgtcggagggtgacagcatcacctctatagggaccgacagcagcgacagcagtggtggcttctatacgtccggtacagaacctgcactggaaagagagacactagacgacgcacgcgtcacgagagaattgcatgtggcctctttcgttggcgatggaaatgcccgggaaaatccaaatccaaagccaattcttgtcggccgatctgtttcggtgcctcctgtccgagaacgctctccggaaacaggaatgatgggtcctgcaactcaagacggaatcgaacttagactgttgtgacatcagtgcttccgttttcacagttgtgagcaaccggctcaaaacaagtgatggacgcaaagtttagggccgcttttcctttttgaatgcttgagatcatctgctaccgtcccgaaaaccttctacttgccatcctgctgcctacggaaacggctggggcggcctacgtcacttttctaaaagcatctcacaggatgtcacatatctaagtggctaagtagatgtgttttgtttggattcaacatgcgctcccgctctcaaacaatgctgcattctagagatacggggtacggccagtttcctgctaaccctgaatcacggtatagttcgcaccagttggagcagcacttaaaacccttactcgagaagaggagtagtggcgccgatatttatcactggtttaaagcgattcgggacgatctacctttgacgcagcattcggggctaatggtctgtgctctgtgtacctggacatctatgtggtttatgttgacatgactgttcaactaaggtggaactctgagatatttaggctgtgtcagtctctgaagttccggatgtttgcacaaagtcgtttcagaaatctagcgcagcgatcagattttgcgacgggtgtgtcaagacagcttaaccgagtgatctggcgtgcctaccctcgatcccacggtggtgtttcgtttcttgaaaacccgccagacaaagtcttccagacgctgtgtgcctaacggccattcgtaggcgagtacaaaagagtaaaagaggacgtactactacggtgcttggcgaattgggtatcgcgggcgttttaatgggacctgcctttgtcttcgacggggagctagctattgagcaccatgaagtagcagagccctgtgcgagctcggacgaggaaaacgtgattctaacgctcttaagggtgagaattacacatgctgctctaccacattggagttgtgacaggctgaagcactcgtgttttgtcgccacgtacacctcggcgagtgcatgcgtgcaaaaaaagcgggctttctataacacacagggggtcgaaaaggtcacgtatatctgccattcccaaactacaaatggaagactatatcatagctccagatgaatacggctgataacgcgcacgagaaggtttttcgagacctgcttctcttaagacagtgtaagtgcctgactctagcgacggcgcattcttttgcgccgcctgtgctggttcgaggttcgccacttttccggtggtgggtcgccgccaggatgccgccactcacggttttcttttatgctcgggagcaggcacttggaagcttcaccgcaagctcgtcagaactgtttggttggagaaaagcggcagcaatcgtacagcgtctcgtccttatgttcacagaaaaaccataggcaggcaggaagcttagttttgttcagtatggttggttgccttgcctggcggaacgaactcggttgtttgtggtggtgtatttttctttctgggcaatgttcgacattgccgaaacgcggatatttcatgttttctcgtcatctgagcactgcgtcgtttaaataacccaatatctatcccgtctttttctcgcagaaagggagcatcttgtccctccgacaccgctgaacggaaagcgtcctcgcgaaacgggtgcagggaccacgccatcggatacttttcgttcctctgccgtaaacgtctgctttttgtttcattatcatacttttttgcgtgaggtttctaaatagcgtacactggatcgtgtctggggcaggaaatcagtcaaaaagtgttccttccatcgggagctggtgcgcgtcgcgtttgtctgttgagtgttaacgcgttttgcttgaaaaagctgccccttccggcctgcgggctaggttcgaaaaaacagccgatgcttatgaactctttctaaattcagagattccgtgttgagggcgcggtaacggaacagttctccgctgcaattcggcgtgagtccgtcggccaccgatggaatatgtgaaagtagaagcgaacgcctttcctcgttgtaagagtccactggtcggacaaggattttttatggtctctcagatgcagacacaacgtcgtttttcttattctctcagtccggtggcaggtgctgccatgatggaccccacttgcgctgacctccagctaaacgcgagggtaacacggatctttcacaccatattgtcctgccgggaatttttgtaccgtctgtctttctgaagaggccccgtttttttttctgtgttgaccgagggtccgagtctgcggtgcactgagttgcgcctcgccgttcgccgcagccttccagctctcgcctcttttcttcttcgtccgccgcgtttgttgtctcgtttctgcggaatttgtgcgtgagacagtaactttctagattcgtattttggtttccaagccgaagccaaatggcactgcgttgtctggcggctttcggatattccctcatcgccaaaaccgtttttcttccacctcctctaatcctttcgatttaactcttctgtagaga

SEQ ID NO: 641 - DNA, 2668 bp, Toxoplasma gondii
  source 1..2668: mol_type = genomic DNA
ctcaagaagagagacagcagctaacgggagagagagcctggagagaaacgcgagtcgactgaaagtgagtcacctggaaggggagttccacgatgacagaagaagagggacgcagaggaagaaccggcgaagagcgggcgacatgcgcaccgcgaggagagacgaacctgctcgggagaaagccaaggaagatcttcgcggttgaggaattcccgcggctgaaacgcatgcacaaatggcctggcgagcagcgggaggccgtcgtcttcctgctcctcctgccaaaagcgcatgcgcgactcctgctccacaagcgagacctgggggtcgccttcgttgtctgcgtctgcgtcgccagtgtcctcagcctgctcggagactgccgcagctcggcgacgcccgcgagccgatcggcgtcctaaagacagaagaacaccgcaggcgcatgcagcggcgaggctagggagaggaaggcgagcgccgagggggggggagaggaaagaggagagaacgcagacgggagaaaagaaggtgaagccgtgaggagcaaagggagaggaggaggcaaagcgagcgcggcgacgacgtcgacacaaagaggcaagaccagcaggtgcaggcagcggaaagcagagtcagaagaagttgatttggggggggggggactgcagacgtacgtacagttgagcagtttcgaaggcacgcgtctagcaaagcaacagtggaagataaacgagggcaaggaggcgcacccagagaggagagaacggcgctgtccaggtacaatgtgaacaagagaagacggcggcaacttcgtcgcgtccaggaggcttcgcaagttgctcgaaagaaatccctcacctgctcccgtcgagaaaaggcgaactgcatgcgctccagagaaaacgcggctctcaggcgctctcgtgccatgcggtggaactcgaagagacagcgccggagagacgacctgcagtgcgagacgggaagaggagacaacgcgagaggaggagacagcgcgagcggaggagacagcgcgagcggaggagacagcgcgagaggaggagagagcgcgagaagaggagatagcgcgagaagaggagatagcgcgagacggagacacaggataggaggctacagagtcgctgcgaggcaggaaggaagccgaggagatagaccgagacagaggcagtcggaaacaggagtatcgctcgagaggaaaagcgttgatgtcgcaggccgacgccggcggcctgagcaggaaccgaggaccgccagagacaggcagacgaaaagagaagaaagaagacagagaagagaggaaaggcgggagactgtgaaacaaattcgccctggtctccgtcggccagagactgcggctacccccgcgacgcagaggaccgcacattttgcgtctaacgaggaatccttttctctctcttctcggcgttcatcttccttctttcgatctgcagaggcggaggacgactgcagggatctgcgagccaaactttcacgaaggagacgcgctgcgacgattccgatctgcgcgcgttcgattatccgctcgccgagtgccgcatgccacagtgttcgcgaccaggcagaccgccgccggcgcccgttgtcgaggctgagtccgccgcatgcgcccgcgcgcggattcacctttttttcggaccgagagacgcaaacagggaaagaaaggatggcaaaaaggcgtcgagatggagagaagaagggagagaaacgaacagacgaagagacctcgtcattcgaagcgagattccgcggcggcttcttgagcggcgggagagggccgccgcccgcgtctccgcggtggcgggtccaagcgcggatcagctgcatgcgcattcggcttctttctgtcattggaaaagaaataaacagttgttttagaaatgttgcaagagttcgaggagagagaagaactcttcttaactcaggtggatactctggtcttcctccgtctgcccgcgtcatgaccaggcggaagacggtgtgctactgtatatcctgcagcgacaccgcccctgtcgacagaggaacgctggatttttctcgctcgactgtcttcactttctcccaacgcgttgctggaggcgccggccctgtcctgttttttttgcctcgcctcttctcctcgccgtcgcggaccagacgcctcggcgtggagagggccttcgagttctgtccgacaaccatctcttggcgagacggcaggagaaactctttgtcgagagaaaaacgtgctgctctggacgactggaagcaccgttctcttcctcgaggcggtcttccagctgccggatttcttcgccggtcgccgcaggaactcgcagctgctgaagaccttgctcccggggacagcaggcagagccgacaagagttagtgagcaacggaggtgtagccttgggctaaaagcagggggagagccgctcgaacgccgcaggcaatctgtagagctgagaagtgaggcagagcctcttggagcttcgccgaaaaagccgcagactggtcaatactgtgacgcaggaacgcgtgactgccgcgcatgcactggcgcacagtggacggagggcaagacaggggaaactctgaaaaggagacggaacgcgaaggcgaacagcgcaacatggaaagcca

SEQ ID NO: 642 - DNA, 1508 bp, Toxoplasma gondii
  source 1..1508: mol_type = genomic DNA
agagctattcagggtttcagcgatcaatctcggacggaatattccccaacaaaagaaccggtcattctgcacagagtacctctccctgtacgatgctcacagtcatctctcacggtactagtctgcgctgtatgcacatgcctacataaatatatatatatatatatatatatatatatgtggttgcttgtatgaagagtgggattctgcctcagagaatacctccgttagtacgctgatgattttcttcgcacctgcgtagttcttttgtgagaatcacggaaacagccgaagcaaagcgtctgcgacgcgcaaatgctcgaaagtgaatccatatctacaacgaagaagtggaagtctatctgatgcagcgtgagaagagcgagttttggaagttttctgctctgaacaaatacacaacaaagtaatgcaagagactgcaaaaaaagcacaggcttcttatttgacgcgcttttaaatgaagacagatgtccagactgcacgcaattgggacctcatgaggaaagctgacgtcggcgcggcgtagacagaagtcaacctgtctctgtgcacctcggagtggaaatcttttctttttcttcattgcgttcctaagtctacaaccggcatctagtcaagcatatatatatatatatatatatatatagagagagagagagagagagagaggtagatatcgatacctatactcacagatatatatatgcatatgtggtacttgtgcgtatatgtgcggatgcgttaaagcgtcctgcaaagttcgccgcgggcgttaagcagatatgcccagtgtatctgcaatgtgtaaaatctgaatctctctcgatctaccaggttgatgaatcgatgtatgtctacgtgtatgtgactacgtataagtagatacgtatttgtatgcagtaaatggcaaagaagaatgctgtgtatctgcttttgagtccgtctctattaagatcgaagaatccagtcttccactctctgcttccctggacgagtgtgtggagccgagacgccagaaaagcgttcctcccgtttatttgtatgttgggtgcggtcgccctgctgcaggcgttggttcttggtttgttctgacgcccagaaactcttaaaaacgcgtttcgatttgtctcatcgcagcgccgcacatgcaagtgaatttctcttgttaccttttcagaatataggccgggcgggggtctttcgaaaaaatgcgttcttccccgctggctggagtagggaatttcccggtgaatgcaagtgtttctgtttgttgaaaaagatttgcctttccaacatttccggtcttttctgcggtgtgctttcactcctctctcgtcgacctcggggcacacaccgcgcctttgcttcgcggcaacgagaagcgagtttcttcggtgaattgtcaaagcaagaactttggttgtctttttctttgtctttcttcttaccggagagaacacaactgcctgactctcgaacgactggca

SEQ ID NO: 643 - DNA, 1742 bp, Toxoplasma gondii
  source 1..1742: mol_type = genomic DNA
gaaggaatcgcttgaaagagacagtttggagacaaagcctcggagaccgttgaagagagggaagagagcactcgacctctcgcggaggcttccactgtttttgtaaaagtggagtcaacttgcaagggtcgttttctgtgtgtcacaatttcaaacttggttttctgaaatgagggacttcctaccgcggtcgatctcttgacctcggcagttgtcggcttctctgaagtctgcgtttcctccattttcgtcgcctgcaagtttctttgtcctcacccgctgtcttcgtctcctcttcctcggttttcacgaggcatctttgcgttccgtccgaccgcaaaaacgctttcgttcactcgtccttctcctgctttttcgccaccgccgttccttcggtgtctccaccttccgtctctcttctccttttcaactctgcctttctcctctttctcgagtcacatcctctcctcttgcttccgggggactcatcctctccgctgccggtctcaactcctctcttccggagtctgccttccttgcttttcttctccgaggacggccgaagcggagacggccagtcgtttgactgctccgcagagagagaggtggatcaggaaggtctcttatggatcctttttcttgacgcgtttctctgcgtctcaagcgagacctgaaagagttggaggatcgacgaaaacgcttcaaatcgaggaagctgagtcaatgctgctgtcgcacactgaggacgatgtgcaagtccatcgagcttcgtcagcagcagaagaacgaagctctgcaggcgcgtggaaagacacccgccacagagacaggcctccaagacagaagagaacaaacgaaaagaaaagaaaacgaaggactggcgcgcgctcccggcgaaggccgcatttgtgtccgccgaaagacagagactgtctccggggaaatcgacgcgaggagacgacagaccttttttggaacagctgagaatctcgtacacacagccgacgagacgccggacggattttctggagaagcaagccgaagttgacttggaaccggacgaagtgtatgcactggaaagcaagcgaaaattcgtcttttcgccaaaccagggatatctccagagcaaacacgatggagactggaactccagaaataccaagctgctgctggaccggcggtcggactggcgtttttcttcagctctgtccactgcgcgcatgcagggagaaaatcgacaggacttcgagactctttcgaacgaggccgtttgttggattacttgcctctttctccacgtcttcctttgtctcctccggagcaaaactctctgttgaagtttcgtcgccttcctgctgtgagtttttcatctttcctcctgttctcgactcctttctccggacctgtccacctctcttgcatgccaagcggagaggagagacgccctgatgaagccctccacgtgacgaagcaagaaactgagttctctcctatctctccagcttctttcttccttttcttccttttcttccttccagtttctcaacagttccactctccagtgcttctctcgcttgccttttcctagtcacgttctttctctcgtctcgtctctccgccccgcagtgctttcccctctctcctctctcttccgcttctctcccttccgcttctctcgcttcctctcctctctcttcattcgactttcatctgtctcgtcttccctcttctttctcgcaaga

SEQ ID NO: 644 - DNA, 1330 bp, Toxoplasma gondii
  source 1..1330: mol_type = genomic DNA
gcaagaccatggacagacgcgtttcctcgtgtagattcatgtctagacgccgaggccgaaatgctccagaaagagaagcgtcgcctgcctcccggaaaagcgtgtgaaagcgtctgtgtttttgcaggtccaaccgcagctctgagaaagagaggcggctccgagaactccgccctcatgcgaggaaatgtcaagacgcttccagagattggtctcgtcatcgcaggagatgaaagaagaaagcgaaagaaagggagacgacggcagggccaggagacttgggaggactccgaaagggagagaacctgggcagcgtcttcgattctcgatctcctcagtttcctcacctttcgctgtttctctttctctctctctcccaatcacaagagctgcatgcagaagaaataacacagagtcgtggggagacagacaaaagaggaagtcagtcgtcggcggatgtgtacgttgtaggcgtgtgtggctgctcgggtgtacgtacacctgggtatcatctcctcgggggccaagcaaggcacagagggacggggaaggcgaaggggggaagcatcagagaaaccgagaaaaagatcatttcgaatttgtttttttgcctgctactgtttcctcatttctctgaagaagcgtggcttcggttttctgcacacgagcgtgagaacgcctgcgcatgcagtcacaagttgggggcgccggggagaagtaggaaaattcagtgccaaaggccctgagaggaggagacagaaaacgaaattcgcgaaaaaatcttgaaaaattagaaagaaaatgtgtgggagaaatgggcacccggagtttcctgactctggtggagagaaacaggtcccgtgcatgcacatatctgcatgcagtgaatgattttggagaattcgtctggaaataaactgcttcgtttcttttgcaagtatccagactcctgcactaaaacccatgattttcggtaccttttttcttttatttgttgctcccgcttcttctcgagtctctcctgaatgttcacaccagcgtcgtctttttcgctgccgcagagttcgtcgggggggaggggggaggctcgccgtatcaaggagtctcgtgtgtgttgtgaccgttccttgagtttctcgttttcctcccagcaggtccgccgtcttgtcgcccgctcttctggccaagaccgaagagcgacacaaggtttctcctggctgttcagctccctcgacggagaactcggctaccgaagagaactgctgcgctggttctccttctcgcatgcagtggtgaaaggaagaaccgacttccgctggctccgtcgtca

SEQ ID NO: 645 - DNA, 4122 bp, Toxoplasma gondii
  source 1..4122: mol_type = genomic DNA
tggactgcatcgcggtctgtcaaagattgctcctacatgattaaagaattcgtgggggcaaaagacgcgcttgtccttgcttcgaacaaccggggttgtacatcaacgggctgcacggctagtctgcatcctatgacgtcccctacacgtttcttttggtacagatcgtgacgcaacatgcactccggagtagagttagacgacgtctcgcttttagcgccacaccgccgctgtcatacgttccagagatggcacctgcatatctcaaataatgatctcggctggtgatccgaggtgacgaaacgccctcagtgaccggatacatctactgaaccgtattggaaactctgccgcgcctttcaggagacactccagtgccctgtatgcacgctcatgcttgcttggaagaatgtattcctatctctggtattttgccacctggtaccgcttcgggaagccccgcttaaacagtgcaacgcatcgctgagtactgcatagtgtcgaagcctgctactgcttgtacgctgctgcatccagcgacagaagcgagcccacaagggcatcgcaaatacggggacataccgtaatgacatggacacaatatgcatttacagtttcggacagaagtttgccctccgctcgtaaacgggacgcggtttgcgatgcacgccttctgcgctgttcataaaatatataccacgacgaccacgattaagatgatgaaaagccttgcagatgcctcccgagatgcactgtcagttctctcggagtggcaaaaaaaccaccacactttgataagtgtcgggcgcaatacgaggaaaactccccactggcatcacctgtttttttaaggtcccgtgttgaagcgtacaaggcatatcaaagaagaattaccacacagctcggaaaacgattgagctactcgcctttgccgcagcaggtgatcaccgaccgaagcgagtatgccatggagaagaatgccagaaccgcgcatgccagtgatgtgcatgactcgacaacaagccatctgccgcctcccatgatggtgaagatcttgtaatcttccatattatcctctgtgggtttcgtaaaatactgcggcacgccgaccatcccaacttctttaacgatgttgtggtaagtagatgtgactacgctacagctcacaagagctacaactaacacgcagccaaatgccgctgctactaaaatgttgcatatcttaggagagagacagcaatgggtgatattcaggattattgccaccgcgaatgcaagaataaaccaaatcgcgcctaaggaaacagtgtatccttgaccacctccaccaataatgaggattgctcctgaaatgatgaccaacgtgacgcaagggacgtacctgaaaaatatgcaaggacaataattaacagggggccatcaattactcatgatacatgagcactgctctccggacatcgatattggcgaactgttgaagaccgtgcagcttggacgtccacagcaacaatacaagtctttcccgcacacgaaaaacaccacaaacgagtgaagcagtttacgaaccccccaaatcaccacgctacgtagacaaggtgaagataaccgcacattacagtgtttgtcctgctgactgaccgtcaacctacgaattctatgtgggtacttcggagatcccgacgcgttcacgtagtgatgagtgcagaaggcatgtgacaatgtacactcggtactaagaacaccacttacatctgcgcctccggaattggtgtgtcgttgcccatgccatgagcgcggctgaacgaagccagtgtcgcaagagataagactgcgactgctagaatgtacccgctgttggccctagcgaagtaggtgtcggcttgcgaccacgagttctctccttcaaatgaaagctcctcatgtttcacataggaaatgtaaggctgcagatacgctccggcagtcgcagcactgacgacgcagtagaggctctcgacgatattgataatgcacaggggacacatgaaacacggagaaacaaacagacccaaagcaacaactgcagcgataagaacagcaagagccatatgaatgagacccatatactcgaagacactgtatgcgttcgttgtcagagaagacgcctccaagatatcgtggatgtccttctggtggcctatcaggagcatgatgataccggtgacgagctgcaagctcaacgccgtgcaccacgtgccaaccgcagggctctcatagccaaaacgctttccgcaaagccccatcttgtactaaaaaatcccttctacactctacaaaaattttcgccctacgatatgtccaacgaaacgtaacgacggctgtttcaccagacctctagttgactctcaggtgatgtgacctcggagtggacgaagggggtctcgcgttgcacccgtggacttcaaacggggacgggacctaacgacaaagctgtttaagcgaacacaacagtaagttcccaatagatccaacacgacgttctttcacgttgagacacactggaaaaacaccgtgcaacgaaatacacggcagcatatatggtcgccgtccgctggcgttctctaaagacctcagcccgcgcgatctgcccgtcattcgacggacacggacgggactgctgtgcagctttgtgcgcagctcgaagacgtttttacagaaccgctcatgacaccacctcccctgtgcccgccgcccgccgcgtgatagctagtgcgtgcatcctcgtttataaggcgacccaaataaaggtttgggtggttagtttgcaacaagcccgaagacgttgacacccgcgccccagttcgagatgacgaaatcaggatgacgcctgaccgtcttttgagcgagagggccttggcggttgtccgccgcatcgtagctccagtgtagcgtgcgacaaaatagagaactcgacgtgagatctcagcagggttaatcaaggcactgacctcacttacgcaatcgacccgcgtgatcctaagtcagcggatgaaacactccaatggtgtaactccatctgcatatcttcgtgctctgtgcaatgtttactcaattaggaacacatagggtgctcctgttgattttttcatcgtaggacgacgagaacagtcgtgctagaccgagggaaggaagaggcgagtatgctctttcgcctacggaagctgtctgtacactgagtgaacgccacaacttcgcgcgttcgtccggcgggtgaaaaaaacgaaaagtagcaaaagacgcagttgcatgtgttaattcatcttttccttttgtgtctcattttcattgccaccgctttacttctgtccttgcctgttttctttcacagagttgtactggccgaccggcggccggttgctttttctcttttttgtccgtttgagatgctgtgtgaactaatccagtctccgcaacaggccagtctctgttgaactatttataacagaacggacgtctgtgaactggaactgttagaaagcgctccttttcccagtttcctgagtagcagagccgctagctcctagaggccatcgcaaaaccccgtcccgttcggagtgaccgggtggaacgaaggcaaaatttttgcccgcttgccggttttggcatcttctaccatttctgttcttccacgagactagctttattcgttgcttcgttctcggaggccacttcgtgcttgtttctagtgtagggaacagggacttccgcgtcagcgctgagcaccaggcccctgctcagtgacgtggagaaattcttcgggaagggataaagtgacagtcacttcaattcatgaaaaattgggtttgggagaagtttcccgcattttatttcgatgagatcgttcgaattgaggctaaagcgtcccttctttttcgctagccacatcttccgtagaccacctcgagcatatcaaagacatactggttttcgtcgcgttacctaagggaacacttgaagaggtctcgagcacgagtggaaagaaattgacgcaaagcatagtcttcgcggtgaaggaacagtggcgttaccaggtgctgctgttcagagcacacactcaaatcagccggttcttacccggcgcga

SEQ ID NO: 646 - DNA, 2512 bp, Toxoplasma gondii
  source 1..2512: mol_type = genomic DNA
aacgaacgttgagtctgcctgcgcagctctgtgttctttttctacatctgtgtatgcatgtgaagagaaagaaatcgatttctgtcgagactgaaaaccgcatgcgtctcgaaaaagttacctttgcttttttctgcgcctgagggagttgtcaaacggaagggaggccgccggaggcacgcaggcagcggcagttcctcctccatgtcgtcttctgcaggatgtttttccacatgagaccgcgcgttcgcctctcgggactctgagggctcccgacgcttcttcgcgcgcctgcccgcgagttcctcggctagcggcgccgcacagagaacgaggagcgcctcaggcggagacgcgaggccgaaggacggcacaaagagacccggcgaagtcgcctgaagcgacgcagacgcagagaggctcggagagagcgaagcagcagcgactgcgtcggaagaagagagagaagagggagacgaaggcgagagcgcggaagacgaagcagtcgaaggagtctgcagaacctggcgagaaaaaggcgcggcggcaggcgatttacacagcgtgagggaagtcgcacccgaagcgtagagttccgcgccgtcgagagaagcgcagggagaagaagcagcctcgcgggagagatactgacacaccagacgaaccggcgcgtcatagtactttgtccggagtaccactccttgggggagcgcggaacgctgctccctcacggcgcagctgcaggcggtcgaagttcctcgtccttcgatgggtgtgccgagcctgtggaggaggtcgcggaggaaaagatgcgccggcgaaccggaggaaattccattcgggtgctccgcagccttccctgtgcatgcagacgcctcggttctctcttcttcgggccgctgagccgcagcgctctcctgtcctcggctgtctgcttggctgtctcccttcagcaactcctcagagagcacaagcagaagcagcaccggcgcgccgtggaggccggcagaagcctctccaagcagatctgcttcgtctgccttctcgtcacagcccctggaagacgaagaagaagacgccgaggttgatgaagcggaacagggagaacatgaggcacacacagaggaggacaggggaagagagagagaggagagaggcgcagagcgctggagcgcgttttcgccagaaggcgaggagcggagaggagacatgtcatgtgcgacctctgctgaggaagagcgatccatgtttgcagaggggagaaagctggaaaagttgcagtcgaagagttcacctgagagagacacgcgtcctttcgagaagcctctccgctgttaaccgcccttgtgttcgacggccctctgtctgctctctacatacgccaccgtgggatgagaaggacagttgcaggaggacaagaaagacgaggaggacgagacggaggaagacagaacagagcaagaagacaaagcacaagaaagatacggagaacaagaaaggaaaccgggagacgggggcggtgaggagcacagcgaagatcgcgcccggcggtgactgcactcgggtgtctccgcaaagaaagttcagctggtgagttcttttctcaaaaactcgaggaagaccgtctggtcgaacgattgcaggcggaatttcgctgaagaaaaagaagtcgagagacaagatacaggagaaacgtctcagctgtcgatcgcgagcgaagcgggtgactgctatgtcctggcacacacctttctcattcagcacagacgacctcctttctttcgaacctcgtctgcaggcagatgagagaaaataaaagaaaagttgaggaacaagtcttgaattgtggcttttctggtccgcgggagatggtcctcacctcaggacacccttgtcttcgtttttccaggtcgggaaacgcgctctttgcgtttgtcaaggtcatacgtcgtctttgttttttctggtggatgctgcatctttttctctgtgggtcctttcttcaaatatcgtcgcttcggaatcttcggagctcctccggttcttcttttctccaccgcaggactccccaaagcaggcgcttgtcgtgattggtgtggcgggcttccgggagttgtcttgcaagaccgcctttcttctcctcttctttgtttcttatctcgtttcttcgctaattttactcggtgtttttccctctcctcgatcgcttttcctctgtcttgctctccaccttctatatctttttttatttcctctgtctcgttttctcgcgtctcctttgtctgcccttgctctctcgcctgtctcctctcctcctccgcctcttctctctcttcttcttttttactttctccagcgcttcttcccccctgctcttttcaccgtttgttccacagtttcctcccttctgcactgccttctctctccgcgccttcttgctctcccctcgttttttcctctcttctccgtcctctctctgtgtgtctcctttcttgtcttgtttctttcaaga

SEQ ID NO: 647 - DNA, 1419 bp, Toxoplasma gondii
  source 1..1419: mol_type = genomic DNA
gccagacacttggatgaagagaaagtacgagaagagcgagagaagaggaaagcgacagtgttctacgcgtcagacggcggctttaagaagaaagaaagaacagcagatgccaagtcaaaggcttggaagaagaacgaggctgtgacaaaaaccaacgcaaacaacaggtgctacgccttcacagacacctatatacatctctaatatgtacacacatgcatatatatatatatatttatgtatgtatacatgtaaatatatgtatatataggcatatatatatatatatatgtatatgcagatacatgtgcgggtactgaaatccagagaggacgatggacggaggacaaagggaggactggtatttttcgtcgagactgctggggaacgaagagaggaagaatgaagaagtcgttttttaacaaaaggcaaggagagacgctccgctcgctgttcaagacatggaaagcggcaaaggtctctccttgagagaagagttcaagagagagagacgggagttacacgaggagaagaaaggatcttttgcgtcctgctcgttccatctttccttggctgccttcaggatgccggaaagtcgtctccccgagagggaagacaagtggaagagagagggagaaacagagaaaaaccggaatagacacacttctcgctctttcctcctctttcacagtttttcgctctgtttccatcgatttcagtcacctaattcctccgaactcccaagtcttctttctctttccctccgccgcctccccttcagccccgcggtttttcctctcggtgaaggtctctctgcgacctttaacagcagaagggagcgccgcttttctcgcttctctcgcttgtccgtggtgcagaagctgctcttggtcttgtttgcgtaagagagagtgagcagagaggcgaagcagaaagttcaaaacgggaagcaagaaaacgtctgcgaagatcgctggacagcgcaagcgtagcttacggagcaccagaagaagccttcagcaacgacacagagacgaattcgtaaaaacttcacatgtgcatgcgtcatgagaagtgagaaggaagacacacgccttcgattcgaaagaaaaaaagagaagacaatgttaaaaaggagaaagagacagtttcagggaggcgtcctctcgccgcgagaaaaggcgagctcgcagttgcgttccaccatcacgcacccccttctcgaccttgtctcgaccttgtcttgtctttttgaggtttcggagggcagcgaaaatcctgatttcaagggagcgtgaccgggacgaagttggcgtttaaggaaagtctttctttcctccatctcgcagaaagtctgtctctttcggcgacgagagccgtcgtctcgcgtccaaaagcgcgtttttcacacacgctgga

SEQ ID NO: 648 - DNA, 4206 bp, Toxoplasma gondii
  source 1..4206: mol_type = genomic DNA
cagtgaagtggacgcactgttcgctaaaaacgtccgggaaatgttcagaccatggctgcctgcgcctcgcaaacaggcagaaacacaggaaaaccaaattggagtgcacgtatccaaagacagaacctctgtatcttccgcgactgcgcagacgccacttgcacgcagggaagacgtaacctgtgctccctgaaacagctggctggtcgggaaaaagattgtgttggaccctggctcataatcgatttggcaggataatgggagaaaagcttataatggattcggtctcagcgacaaccactcccagtgcgatgaaaaatgccgggggtcgatttcctcaccaccgcgatcggtttctatgggaggctgttgagcaaagaagcaccaaaattatcagtgttcaagtcaatgggcatcacaagacctactaatgttgcgaaacggataatttctgtaacggaaattggtcacagagaaatccgcctggcgcagcgcctgttgcgtgccggtcaaaatgacgtgacaaagtcaggaatggcaatacgaagggacacacaaaaaagccgaggagtggagacttgcacgcaccgtttgacacatcaacgcgtggtagggttgccacttaccttcaccaaaatgcccaacaccgggtttgatttgagggggggcactgcgtgaacgatcttgaccggcggggagaagcactccatcagcgatgcgagagccggcgagaccagatgagacggcagaagagaggaaaaacaagagaacaaaggaaggcttgaagagagcgaggaggggcagggcgagagagcgtgcgccggacgtggtggctcggccccccattttcttcctctttctatcgacaagtgcgcaagagcctcacacccaggttctggctcgatgccatcgccgaaaaagaagacgggataaacttgataggacggacaaacctctagagacagtagcggaaccgatgcggtctgcaagtggcgacccaaagtcgacacaaaatagaggaggaaaagcgacgatcctgataaccgaagaagtgaagttggggacaggacctaacaaaggcaagggagagggcacccgccgctccttgagtctctcggcgtgggaaggtcgagaaacaagacaaaaacgatcggaggaaagcgtgcggcacctgtggtaagacgcagaagggactctgacacggcagaccaaacaagtttggaagcactgggccttccgtatgcaaagacgcgcttcctctgctatgcataagaaagtactcacacaacagtaccacgggcgtacgcctagctttctagacgctcgacttggctggcagaaccgcctggcacgtgcttttcgcgtggctaatcagctttcgttcggagagaaagagatcattctaaataaacagtttttcataaaaaaggaaaagacgaatgcgcgtttgtttcctctggcaggaagaaagaacacgccgttcggccgccacaggctgtcacagctcgccgtgtcttgcgaccgcgagggccacagcaaaggccgcgagttaacggaaaaacgttttggttttccccgatcttttccagcgctttaaggggatgcgaaggtctagttagaacacgtcttttcctaactctcccgcgagactcataaaccgtcaaacgctacgccaacctagtcaggaggcaagtgtttgctcagggaaagctgaggaaagacatagcgacggactgaagactgcgggagaaacgtgcgttcttcatcccaccagagaaaaagtttctgagccaagagtagccgcacagtgtcagccggaagacaaaacaccatccctttctgttgagcgttctcttttcaagatcttagagccggcctccgctcgtttcgaccacagtcttggttgagtagcgaagcgccgcaaacagcggcaaccggcctggcgagctgtcgagaaacgtgggcggggcaagcagcagaccaaaaaaagaagcgcttcgagcgaaagagagtggaaaaaggaagatcgattgtgagaagaaagcggttgtttttcagaaccctaaaaagatacggaatcagcgccgtcgtcgagtcgaaaacgaagaagccgcgtggcaactcccctagcagctatacgccgcgtcttaccgcatcccgaaagctagttgtacgtttccttacgctccagcattcaagacttggcgacgccagcatcgccgaaacttttcagtaatccaaaccagtttttcgctgaaattctcaggggagtttgcgtattggatactgatcgcgagccacaagagtcacggggtcacattgctcgaaagacaccgcgaaccagatcatcttgcgtgattgcagctcgccgtcgtgtcctcacaggaagaccgcaatcaccttccaactgtttttcccgtcaatagacatgataatatgaacatttgaaacgaaggatttctcaagcgatctaccaaggaagaacagacaccgtagggcgccttcattgaataacgtttctggtcagccccgtcgctccgcgggcccgcgacagaaaaggcatttttgccaacttgcttagatgccatatatcctgttttttcccgggaagacaaggagatgtgtccacagagctctatttcttggcctacggctggttcttgaattgtcgaattttctctagatatgtaggtggaccagagttcctgattcgcgaggttgcctcctgttgttttaagttgctgcttagcgaccgaagtggacggagggattttacgccagtcggtccgtcagtggccgcaaacctgccagaaatactgcttccgggtctcttctgatctcggaccaagcactggactgtcagccttccttctcacttatgactgactaaataccagcaccgaatctacggggctggcccttgccttgccagctcaaaaccctgaacagtgtcagagggattcgacgactaagcgtggaaagcttccaagtatattcccggcaccttaggtgtctgttgaaaaacattcgcactggcaacttgtgggcaacgagttctccgtttccacgatgatttccatgacaacgtgactttgcatggttcccaaagtccgaagagacggctgatccagcgtgggaatttagaaaacgacagattttctgatccagaactaagcagagtttttttcttgaacagttttgccgaattctctaccaacagcaaagtggcttctacggggcaggaccaaaccccactttttcgggggcagtcgacactccctctgactcttgaacaagagttaagccttggttgtgtttttctccgccaaatgtccccccagaaaagacggcaggtcgttttgttatcagaatacgaagaacactgagctcatggatttcaatcaacctttacaaatggttccccgtgcagcttgtgttcagtcagtccacagtacccgtacttgcttctgcaaaggatagcaccgggcatttattgcagcgtttcggggcgtcgcagcgaaagaaccgggtgcgctgcaagcttcgtcttcatttcttccgtcaacttggaaaaagaaaagaagtctgtacaaccggtcctcaaaacaacagaagtggtaccgccgcctaaggtctcgttccagcgtgcctgtcataaagcggtgcactttccaatgtagcgcgacagacaactgactacagtccactatcgatgttacattacatgaaattcaccacgtaatagggtgcatctcttctcagaaacaggaaaaggctcctctcctagccaacgggacttaaccgctcccgacctacgcttgtgaggctgtgtagtgtgttccaccgagggctagcgaattttccagttccgagtgtcacatacggggaagagaataccttgtgtgtgcaaggacaagcgacaccgaaaacaaaacttgagaaggtcttcgcttgcacaaacaagtgcatccctcggcatgctgtccgtcgtttttcgggctgtagcaacatactcgttgtgatccgaaatggtagtgacggaaacgcttattcgtccatctgttccaggaggggtatcagagattggatttgtaggactgaaggctttatctttcggacgaagtgcgcatttctgcgcagttatggaatggcgttcaacagttcactgacgcgaacctcactgcgtgcttggctttggtttccgca

SEQ ID NO: 649 - DNA, 2545 bp, Toxoplasma gondii
  source 1..2545: mol_type = genomic DNA
tttagcgacatcacacaaatacagagaattcagacatgtactcaacatgcgcagatacacatatatatgcatatatatatatatatatatatagatatagatatagatatatagacatacatatatatatatacttgtatgctgttgcgtgcgcaggcagtgacacaattgcatagagattcaaaaagaacgtcgacgcagagttttgaggaatggtgtacgaggcgcattggcttggggaagagcgaactcttccataaaagaaagaagttcctcgcctttatcacccagcaacgtatatggagttacactgtacctctctattcagaaacatttacgtgtatgtatgcatctggatgaacgaaaatcccacacatgaaaaattttcaaagataggtagaaggacatgtacgagaagctcggtggatcggctacctcgtggaagagtcaaataaccgcggggagcttctgggagttccctgaaatgcaaagacgttttctttcggcctctgtgtgtgtgtgtctgtaacggtgtcaagatctctctgtccctctgtggagagatccctttctgcgtcatttgctatcgattcagctccttttctcgaaacgtttctcgctctctcatccgaacttttcttcgagtgcatctccttcttccctaccatctctctcgctcaccctcgtccccgccgcttgtctctcccctcttcttctgtccgtgtacaaacaggaatcaaaaagactttggattgagtgtagcgaaaaagtgaacagtgcgacaagtttcctgtgtctcgtcgtctccagccggcactgttgagagcattcgcttcgcccccgcggagctcctgtcacaagttcctcgcttctcgcgccgttcaggttcctttctgcaaaaaatcatgtctccagttcctcactgagttttctcgaccaagaacgaacgcgttcgttgccttctgcctgccatgactttttccggaaggcgctcgtatcggaacttttttcaagacccatcagctcacgccgggaactgacggcgcattcctgcgcgttcgttttttcagttccttgaactgccttcttggctcgcgatctccgacggtgtttgtatgtcgcgttccacgtcgaacaagcaaatctctctcgccccagtcaagtttgcgtttttcggctcccgatcgtttcgctacgtttctgtagacgacgtctttctggggagtccattatcctgtgtgtgcaaagcctcgtttcggccttgaccaggcgtttgcttttttcgcacaccggcgctctgcctttgcgttttcgagtcggcgacactcggtgccgctgagaatagacatccgtccctcagatatcccgtcagggaagagttcgaaactcgaaaaacaattgtgagaagaagtcgttgtgtctcccgccccccgccttttcctgtctggagcggcgcgatccgcaacggcgcgttgttcttctcctcctcccccgcgcgcgtttgtcgcctgcgagttggaggggacgcgcatgcactgtggcggggcgtttgcggcttttcggccgtcggcttttcaactctgttcgcatggccagggtgcaggaagtttctgtttctgcgcggttctccccaccctgtcgctggagagaaatctgtgtcgctgcacgctgcctggtggcggttgactcttcggcgcctctgcgcctctctttgtcttcgctctctctgcgcaaccaagacagacacgagaagaacgcagtttttctgcgagactgcatgcagcagaaagctttcctcgttctcgccgggcaaggcgaccggggccgcaagtgcgtcgactcttgtgctctcttgtgctcctcctccgccgtctgtttttctcggaacagtcgggagagagtctctcggagaggcaaccgcgcaaagaaaccgacctgcccgacgagtcggtggaaacggggagactgccgcctcgtcggcaccagggcgaggacgcgagagcacgcatgcgggaggcacaccgagagggaaaacgaagcggaaaaaccggaagacggagaggaaatgcaaatgctggaggctgctcagggccgacaagagaggaggcaactcggagaagagtgtggcgtctctctcttctgcctgcgccgtctccacacaaatgacttcggatttcgtctggttgctgagggaggccaaactctctgaggaagtctcgccattccccgagattccctgcaccttcaagcgcccagcaacctctctcttcctttcaaacgaagtcgccgtgcgaacctggcgttgccggcttgtctcctgaagaccctccgtccctgtcgtcgaacgcttcctcgaccttctcggtcttcccttgtttatctcgtttatctcgtttctctcttctcctcagcctctctttttcttcctcgtctcgaggttctcctccacactcccgctctctgtctcgcttttcctcggctctgcctctctcttcgtttcctctctcctctcgcgcggtctgtctccgtgctactcctctctcaa

SEQ ID NO: 650 - DNA, 2248 bp, Toxoplasma gondii
  source 1..2248: mol_type = genomic DNA
tagaatattctcacaagcagtaagcgtctttcagtcgcatttccatcacccacaattacaccggtagtttttgatcatgtacatcgcgtagtgttggccggccccacggcgcccattaagaggacattatataaacatgctgaatttctgccatacggaagtgcattgttcctgcgctaggcgtttatgatcaaagagttcgtttgataaaaaagagagtgatacttagtctaaagttcctcacaggcgacatcgtgctttcattttgcttgatcttcagaggatctttcggtcgaaattcagagaagacgttcgaattccgatttttccttgaaaaaaaaagagtgcctcagtgtcgttgttgaattgcgctagcgagaatccggtcttcagttaaagaggtctcgcgctaccccttccacattccgcgggtgaaaacttttaatttcagctggagagaaaaccaggtctttgctccactgaagtatctggcctcagtcttgcagaggatgctgtcgaagttactgttgcttattcatggagttgtatatgtgtcaagaatcttttgaagtagagtgatccacgagccagatgctcactcggatttaaaaaaatgtttaagctgaagtcgtacgaaacaccagccgccaaggagacccgtcaagaggcagatgaaagcgtcggaacctcctttggcaaacacaagtgcatcaagcatttgtgaagggattttttgaggtattcgattcttcttaacattcaagcgccttgaaccgaaattctccccgagacaaaagctgtgcgagatccttctctgattgaagagcagagaaatcggttctccagaaactcgaggaaggtctctacctcaaagagagtcctttctcctttgcaatcaaaacaccttggactttcagtccagaaacggagagctggccaaggaaaacatttccagtctgcacgtcattcttttcgccgcttctctacatctccactttgtaaacagatttagcatttcgattttacctctgcgaagagacagcttcagagactcacttgtgcggactcgcggaagaaactcgagatgagtctcccagtcacgggagtgacgcaggggatattctctttcagagagctgagaaatgcagcagccgaattctagacagcgctgtctctctcctcttcttttctttgtttctttcatgttggaccgttcttctgtgctctttctgtttcctgccttcctcacaaacgcagcggggcaggttcgagagccgacttccccgcagctggggaatttctgcggaagcagccgggcgacttcataataacacagcttcccctccgtctgctgtgtttcctctgtgtttcagaaaaacgagaaagtggatctctctccgtttctctccttttcggcggtgtctcttcgcggctccgaggtgagaaaagtcacgcagattttcaaagggcgagatgcatgcagatgatgagagacaaggcctcaacggaaaaaacggcggtttcaatctcttcagagaagctcttccaatttcttttctctcactttggggtctctctgacgttcttgagagacatgaaagagctcgtgtgtcaagaaggaactcgtccattgcctctctccactcttcacccagagcttgcgaggtgacgcctggccgcttgttcatgcaagaaaattcgaaatctttctcccgtcatcgactttcgcgaaaaacgtaggagctcgcattcttcagagcgaacgtactggaggcctcagaggggatctttcctctttttttccgtggaagggcggatcggaagagcagcatctgcgaaaacgctattctctttgtcagcgagtctcccgtccggtctctgtctcttgctgctctgcctcagagaggcggagcagcttttccgagggcctgttgacttgtgaaagatttgacattttcgcaggagcagttgccctacaatctgcctttgtcttgctcgccgaaatacccctttgtctcttcacctcttccttccgccctttggcgctcgacgcgaagctgtttcctcctctgacagaagttcttcgtctctcgttttcttctggcggtttatgcttctctcattctctccttcttccctcgctttcgtcgctctcctgcttctctctcgttctttctccccttcttttctcgttttcctctccgcttccgtctccctctcttcaacttgtttgtgcgggtggacgcca

SEQ ID NO: 651 - DNA, 1720 bp, Toxoplasma gondii
  source 1..1720: mol_type = genomic DNA
gtcgaagccttgctcgtatgatcccggaacatcgcttcgctgttcctcgcaggcctgctgggccggcgtcacggctggaaaggcctcgtcttctcgcggttgcgccgagaccgagggcgcgtagatctttttgagttggtagactgcgaagaagtcgaggacgaggaaggccagacccgctgcagctaacaggaacggcgcggaggagagaaaggagacgagcacagaccaaggaacagccatcgtgagagacgctcccgccccccacaaacttccgttcagggggaggtcctccagtctcgcatcgaggagaggacgggaaccacagaaatctctgaaagaagaactcagccaccagccagccgacaactcacgacttcacacacatgtacatctccagatgtttaccgaggtctacagatgccatattagctgttgttgaaagctcgaagacgttttgagacatagacacgcacagaactcgatgcagagacactcatacagactggtcgagagatcgcaagacagagacggagacgaacggatacccttccggttgcatctgcaggctgtacgagtggaggagcagctgagagttctggaagaactggcgagaagtgacggcgtcgcggcgcctcggcaaagcagaggcgtcaacgagacgaaacgcccgacgttcggccccgtcaacaggtaagcaaagacgaggcgaaagccgcgggacgcgaagcctccagaacgtccgagaaacgcgagagaagagagacaacaccgcgagtctctgaggcggcgctcttcctcgacagtcggcagggagcagaagtcgagagccttgcgtcttcagccgtgaaagcttcaacgcccatctcaaacgcgaccgaggaaagtcttgcggctttctctgttgcacggagatggcgcaagagttgccggtcaaaacggcctcgggaacggagagaggcagtgcccagagaggagatgccgacgaagacgcaactgtttctcctgccttttcttggagcatgcagcaaggctgtgttgtggtgtgttctcttttctgccccttaacaaattgagggaaggaacagaagcgaaaggggagggagagaactgaaagaagagacggggaagtaggagagagaggcgaggcggcggtgagttcggcgcagagtgtgcgacgagaaagccggaacaagtattttttcagggactcggcttctctagtttttgtgcgaagagacgacttcgcagtctttgctttcgcgcctgtttacagactgcggaaaagaaagaaaagcggacagcatgcagagcgtgagcggaagttccggtctcgctttttcctcgcgcatgcagtcgcacaccaaggacacaacgggggagacgaaatgactgcgagtaagagacacgaagcacggcagaaggaaagagaaaacgcagacaacaaaggcaggcagcctctcgctttctcggtgtttgaagcagcaaagagcgtaggcgtctttggtgaaggacgcgactgcttgctcgtacgcaagaggagagaagtctggacagcggacgctagctactgtcgatctcagggactctgcgtttgaactcgaagcagcagaaactacaggagctccagttgtagagaagatacaaagaaaagcgcgctgtttcggtggagctcgggaatcctcgacgctggttgcatgtcgagtggcggcgagctgta

SEQ ID NO: 652 - DNA, 3875 bp, Toxoplasma gondii
  source 1..3875: mol_type = genomic DNA
cattcggtggtttgttttctgcgttccgtcgcacgactgagtggaaacggaagcgtcgggcgtaactgccgacccacgttccagcttcttcatgggcgtctgggtccccgtctcgtggttgttctttggagagaactttcctttgctcggccggcgctgcgttgccactggggctctcctcagcgctgcccgccgggtacggggagtctgttgcgccaaagtaaaatccgtaacctgtcacatttcttgccagcctgatgacactgtgtctcgggtcaagacgttcccaaggcaggagcgactttgaggcagaagtgtcaccattgtcttgtcgatgccactcctcggcggtgaggtccaagccatactcgcgaacaacctccaacgcacagtctattcgatccaggtcagccttatcttcggtgcaggcgcttttcggcgtgcaaaacgccccagatctgtcctcggcattgtcaccgtttgccgacatgttaagcggactcgcagatcgagatccagacgaatgccttgagctactagccccggggtgagcgccatcaactggctgtgcgtacagcgtatgattcggttccgagtttcccgcaaggcttccctcgtcggactctgaagaatttgccacccactccgccttcatccgtgtttttaacgagctgctctgtgacgagatagcaatcccgacactctcgtcggtcgactgaagacattccggcctgacaatcacggcatgccggccagatttgagctgcagagactcgcggtcaggcgcgctcccagcaggggactgtcggaagttcttcagattcgcctgggtcactggtgtgctctgcgcagggtctgaccgaaggtgtccgttctggggggtctggagggagtggcgtaacaggggcaggggggggcatggtgaccgcagcgagcctttgcgtgaatcaccgaatacatttgaagaaagtgtgtcctcaaacgcatcgaaatggtttgctaggtttgcggtcgactccgtcccgttctctggatccgtttgaacaatcatcccccgcaacgcctcaggaaccgccgacaggtcggaacctgttgacgggagggaggccatttccacctcttcgcgattatggaaaagctgagtggaaaacaaaaagtcgcgctggcttccctgcagatctatacacggaaagacgcgaaaacgctgtcgcttatgcgcagccgttcacgcagctactggacaaagagaccactgcgtccgacggccgatgtcccgaatttccatgctttgtatgccaagaattaccagctgggaccccttactagaagaaggcgaaaagcgtggcgatgatactatgaaacctcggaatgcaaagagcgtgcgaggaggtccagagcgttaccgccactgtgcagggtgcgttattcacagttggctgaccgagtcatcggaggcgaaccgacggcagaaagaagatgctgcctggcaacaaggcggagccgcaccgaacctgcaaagctggtcactctgttgtagaaacatgcacgttcttgatacattctgagcgctctaccgtggtcattcgcctcgcgacagcgcagccgcgctggcgcactgcagctgcactaagcagacacacgcctgtgaccacccaagacttgaatctcagtgagtcatatcagcaagtcctacacatcttccaaagtgacgtgggtcgagggagcctcggcaaacggcccgcgaggcagcgtgggtggtcgacgacggagatgcaggggaaagtcgtgctcctgtggcgcagctctgcgcaaaaaaaacccgaagagaatgccgtttctggaaaactgtcgcttgacgcatcgaactgcagcgaagcagacacgaaaaagcatccaccggatgctagagaggaaccccggtcgcggatcgattcagagatggcgttcagtaagacagccagacgacacgggacgagagggtgaaggcccgtactagcagttgaggagctggacgccgtggccaaccactctccagataaagaggaaaaaataccgtccacaaagtcccgtactcatcggcttcatcgtcgccgatggacccgccacggattcactgggccccctgcatgtgtcgcttgagctgcctctagctaattgcaacggccatatcgggacgcggaaaagtggatgacatacagaaggtcactgtgtttccttttgaaaatatcctggagtgacactggagtctctcttcacgagaatggaaaaatattgcgaaacctgaactgagtgcggccactccctctttgtttttgctgtgtgacgcttggccaggtaccgctcttacggtcacacagagctctgtgaacccgagctgtactcttcgctggcagctgctctgccgctggtgtcgtcgaggagcataaaccgggggagcgttttccatgaatcaggaaagattaatgagatttcactcccagaatgcttgccgcctggagaaatctagaatcgagtacaactagatctatgggcttggagagccgaagagtctgacccaatcaggacggcataggggtcgactgtgacgaggtctaacatgtcactgcatttttcgtgttggggctttctttgccagcctgctgcttatgtttttgaggtatgccctgcttaatcgctgcattgctgagctcactcgaatcgtgtaaagatgtgatttcctgtaccaccacgatggtaagggtcgtcgaaacgcgtgtttgcttgtcatgtgaagaccccgttttgctgaaacctagaatgtctagaagaatctgaagatcaacaggtcgcctcacgcggatcgcttgacgtcttcgacagcatcattcgaagaccagcaactgtggggtttccccgcaatttctctagctgcggcggtctcagctctggattcggttgtgcctacaaagatgccgtgtcgtgcagtggtgccagaaagcagatagccactccgtcagacgtggctccttccgtttcctttgctgcgcctaacttgggagattgtcattttgaacgtagcatccggtacttcactactccagcgccacgctagagactattgaatgccgagctcgaacaaagatcccgtggcgtggcgccgcttctctgcgatacgtgaatacgtgatacagtggtacccgtgaacttgtttaagtcgagcagttttacttgcaggcacgtaacgccgttgatcgttgaccgggtgatgctcagaggagtcgcggcatgcagacatacacagcgaggtgcacttgtgcacttgtagcaggaaactgcagctaactcactggactgtgcttctgaaaagaccacagagtgcctgaggttcaggcttagtctccagcaaggggtatcacacgaactccctatcatcccgctttgcacacagcctcatccacgggaaaagaaaccggcacccctgtgccaacaaaagaatcccttttccacgtgtagtttcagttttctaatctgcagcggacgaggctcccgctcggacggtgtctgcagagcggatactgtaccccgtgaacaaacgtgtgaattgtgtagaccgatgcatcttttctgtacataacccgagcaccgctgtcaccccagtccccatggtcccgcccccgtttgctttcaaagaaaaccgccggtcgcagcgcagtcgccaacgcgcggaaggcgcaccgccggactctggtccacccgcccaagctgagaattgcatgttcttctctggggaagagaggctgctgcctgaacattcccttttgtcttccaaacaaaagtgaagaaacgtttcgccatcctttaggtcgtgtatatagtgcctctgtttttgcgtacaa

SEQ ID NO: 653 - DNA, 651 bp, Toxoplasma gondii
  source 1..651: mol_type = genomic DNA
gcaaagagtccggaatcgggtggcggaaaacaccaagaagaatctgcctttgttgtcacactcaccacagcccccactggatggctcgagacagctaaacctgcgagaaatggatgttctgccagtgttcagtgacgctcggaagctgtcctccttctcctcctcagcgttttgatttcctgcatgctccgccccatccggtaacggcaaaagctcctgctcgacacaacgaagcagagcggtcgcgcacagcctcacacaaccaaaaaacgaagaagaggggaggaggaagagggaggagagactgaagccacagaaggcgctgaaggcgagcactggtgagacgagccttgaatcgagagaagaaaagtctcaccatttcaagtgagcagggcagaggctccgacgcatgcgcaggctgagagggggcactctgctggctgcccagagacgcagacgatgactgcatgctccccatcctcggcgggagttgggctgcagatggagcgagagaagagaagcgactgggaaggcggaagcaagagcgacgaaacaggaacgagcgagagagagaacagacctgcgaggcaaaacagagggaaaagagcggtgccagacaaagaaagggagcgagacaatccacgcgaaaaa

SEQ ID NO: 654 - DNA, 2077 bp, Toxoplasma gondii
  source 1..2077: mol_type = genomic DNA
agttttccctgacatttgtcgaagggaaactccgagtgaacactccaccaatgctggcccagatatccgacataacaaaccacagcggtgcccagccgctgccctcagcagcttgtacttgtcttcctcccgacacttctccgtatataagccgaggcgacgtggcgagtcgcagttcgggcgagtccataggggagttcttaccattcctttctgcggggagtggtcatgaaggcgaaagttgcagacgacagcgccagccaagagaaggtcgcggcgagtctagggcctgcagtcaccgaaggaaaaatgagcacccaatctggaagtaaatgcgtctctcgtttgttgcggatgacatgtgcactcagcacacagacggacacagagtctttcgcaacgtttccaacacatccccttcttcctccaccctggaactctgttccgcacaagttggactacactttcgccgttctctctgtcgcgtccgcggctctaggtccctacgcccactcccctttggcattcgtatacaagtacacatttaaatgagcacaggcgcagacgcagtacgcaccatacctacatttacagacgtagacacatatacatttatgtcgagggctaaggggctgtcgcgttcactacggccgaagcgttacttctgtgggagatgcaacgcagagggaaccggcaaccagagtgaagcgaaagcgaagaggagacaaggacagaggccagctctgcgctctaatccgtagacgaacaaacgaagaagcgcggaaagaggagcgaaatcgaaatcgaaagtgaaggcgtaccgatgcctctcgacgaagaccgccaggactgtgcgtccgtcgaggcgtccttgggcgtggtggacggcgccatggctgcagagactttctcgaagagaaaacgcgaaaaaagaaaagagaaagagatgaagagattcagacgagacggagacttaaggagaaaaaggcgcgcagtagacagacgagcttcggcgggtctcgaacggttttgagacggagctttctgtcgcggggaaaaggacggaaccgaagaagtcgggcgacttactcagaccctcgcgatccgctgtgaagaaggaccggctcgtcttcttctgctggtaagagacaacacggtggatgcacgttgtcggtgtacttcagagagctctctggtggaagacctccctgtgttcgtgtattcgggcaatcagagatctcacgcgctctcgattccagcgtctctcgtctctctccgtggttttctgaaaaggaaaaggcggcccctatcaggagatgacatcttgaagcgacccaaggcaaacgcggcaagaagaaactgcatgctcactggtgtattgtcgcaagcgcaaatatccggtcaacaaacgaagacggaccagccggccacgtcccgggttcttcgcaaaaaaaagattcaacttaaggtgtattctcaggtcgcatatttcgctttcttgcttccggagaaacacgatttccctcgaaatcccgacggaaaaagcttcgatcgatctcttccacacggcgtctacctcgcgatgcgcctccgagtgtgacaggccgcacgcgatgacctgactgaaaggggcctctcctgttctgcagacgaacgctgaggacgagtctcgcgctctcgcagagactagcggtgggttaaggatttgttctgcctttgtttttccttccacgcgtctttttctgcactttgctcgaaacgatcgctgctttccacccgtctcttgcgccggccgccgagaagtcttgaactctgcgggagtcgacgccaagaacgaggcgggactcgacgacgggttccgtgtgtttttttcctggattttttctcgcgtttcttcctggagcgaaacggagcgctttgctccttcgcttgtatttttccgagcaaacttcccgcgaaagaggagaggcagacaccatcgtttctgtggtcagaaacctgttttcagacaggagcgcgcatgcactggaaactttggagaacccgtagcttcctcgcgacctcgcctttctaaaaa

SEQ ID NO: 655 - DNA, 1735 bp, Toxoplasma gondii
  source 1..1735: mol_type = genomic DNA
ttttttacggagacgaccagagggctcctgaaagaagttgttgaacggtgacaaagctctctcgagtgttgtctctttcgcgtcttcttctctctaaagttttttccaggcagttccaggtctgcccagtggaacgctgcgcgtctctacgggggcatctgtacagctctccgtgcatgcgcaggcctctatctggggaacagaaacatctgcggatcgataaaccgcgccgcaggatcttcgccttactttggaagtactcgattttctggttgatgtgtttgcgcccagtcgcatgctgccgccgtccagcaggggacgagtgagtgaggtagatgtcgcagtattcgcagtagtacttcggcatcttgtcatccagtctcttcgcctgtttcagtgcggtctgctgtctcagcgcaagaaaggtcaccacaccttctgcgaaaacttctgctctctgctcctcgcgcgacgctctccggcgagaagggagagcgccttccgacggctgcgccgagattcgcgaaggcgccttcgctctggaaacttgtggagccgccttcggcgacgcttgccttccggccccccagtgcgagatgcagacgcagacgagagaagaggcaggcgcgacaaaacgcacagagacgccagagacggcgaacttgctcgagaagagagagagcgagatttgaaagagcgccccactgggggagtcgaactctgccgaaaaaacgcgcaaaccgagaaaggaagacgacgtccccacggacaacgaaggtgacggtcttgtcttgagaggagaggagacgcagcctgcaggaggagggaagctggaagacagctgaaaaagagcagcgactgcagatttcctgagagacgcagtcgaggagaccgcgaagaaagaagagcagacgaaagcaagcggaccgagagactctgcagcgccgagagcgaagccacaaagagagagagagaagcgcgagagaggagacggagaggagacagagaggagacagagaggagagcgatggcgctttcggcttgaccgcgtgagtggcaaggcgagagacgcctcggaggaaggaaactgcgagaagagaacagatgtttggagaagctgttgacggtgcgcggcagtcggagcagctgggaccctcggacagagaaagaaaaagagagtgtgttagagtgggttgctctttagttgaaaaaacggcccagaacgcgcgacgcgccacgcagcgaaggccaggaaaaaaagttctttcgccttcgtgagcgagcctgtagatgcagagaaaagacaacggggagcacctggggagtcgcagcaacgcacgcaaaaaacaaaatgaaactgaagcgatttgccgctccctcttcctctcttctcgattcgggtgttggccgtccacccccgagcgtcgccgcgtttcgttttaagaggccgatgaaacaggaaaggtcctttttctctcaggcgaaaagtcgactctcgctgaaactcaggggcttcgcgagcggcgccgcgcgtcaaaaagtccgcgggggtttggtcgggcacaacgaatcccccagaagaatctgcgaaattgcatgtccttccggacgctccagctgtgtccgtcctaaaataggggaggagagagccgcggagaggaaggcccgcttttcttcgcgaacgcgcgcgcagggcgattcccagaaaagaaaggacgctgcgctgtctcacaga

SEQ ID NO: 656 - DNA, 2777 bp, Toxoplasma gondii
  source 1..2777: mol_type = genomic DNA
cttcccgttttctctaggtgcgttcctctggttcgtgcatcgcttccctgttccacctcgcagacagcgccatgttcagaaaccgactgctgcgatgctgacacgcgtcgggctggatgcctgtgccgaagtggagggtaggcgttttctctctggggacggcagttgcttcgcggaacagagcaggacaaatacccccatgcatcaagttcttccgagtttaagcgtgtaagcgtctctccattcaactcgtatgcatatgcaatttcctggctgtaacgtggatgcgccacaggcgaggttgcgatgtctcctgacctggagtcagcgagaagtgattgcggccgcgaaatcacaggctcaccgcagaaaaccggcaaactggttgcatcttcagcccgccggaacttcttcttgatcgctacagccgcggcgctgacagctagaaccgtcgtgatcatcgtatagtctagggatagagcgctacgtttgtgtctcagatccactgcagtggtccggttgtacgggaaatgggaaccagcgaaagtgaccgaggaagagccagcatagaacagcggcaccgtcgtcgttcgttttgatagtagggaaggaactgtccgtgtttcagataactcattcccccatcctcaatgaagaagagacagccgcaacccttcgctagtctcaagatgccaacaggaaaaaccccttggtttcctcctacgttcgctcgccgcgacgcaaaagctggaatggaaagcatcaacggggtccccacgcatgcccgcgagaaggctccacccatagatgcgtaatagcagatgagttgcgacaaagaagtgcgacacactaaagaaaaccgagataattattcatctcgtagaactatcacaaactgagtgacacgacggatcggctaacggacggaacgggaaacagatgcggcacaagggaacacgcgtctttttatgcgaatgacggaaaatttgcgtctctcttaacacagagacatcattttgaacgcaagctgataaaagcatacaacggctagtaagcacatcttggctgcgccgcgaacggggggaacttggcggttggtaaatacaggacaagagcgtctaaaaccaaccctgaaggccatgggaatgtattttcaagatgttcaacagaacgcgaacaaacagacgtatcacaaaaaagttgtttttgccaattttcatcgatctgagaatcctgcgtgctcacccttcgcccagtttctcatctgggttttgagggaacaccgcgagtggcaaccacaaccagctgggctagcgtgcgcgatgaaatccgcctacgaataacttcaaaagtcgcatctatctttagcaaatttctgcctacaagggacaggtcatcatgggagaagcaaccgagaaaatcctgctaacacacatgagccctcctcaagcaagtctcgtagtcggtttgcttggttgccgggatctaacgacagacgacgtgtgcctgccttaagttacacggctctgctactaagtgtgttcctttaacatatgaagtgcgacggaacaaacgagcaaagtcgacgaaacaagagaaagagacccagtgcgtttgaagccgagggaaattcctcgcagtttgtcgcgtctcagagaaaaagcggcggggggccgtttgcggaaatgtgtttcctgtctcgtccacactacacagcgcgacttgcgaggcgctcgtcttgcacgaaaattaccatcgttcgagggcgatggagatacagagaagtccttctttcgcagttgttaagtagctggacccttccgtctcgggctgcgtttctcactgtttcacacgctgtttgctttgtctggatttctcccctttcaagggccgatcgcacctagaaaaataccggtcaaccggctcgcagctccgcttgacatcgtccctgaatttactaccctagaaggcgctgaaagtgactacacccaaaaccggcggcgtgttagaacatttatgtcatccatggttaatctagaatgactatctgagagctgagctgacgggaaagtagcgaaaagagcaaaagtgcgcgcgtagggcagcccgcaatgcggaaattggcagcacatttagagaaagtcacctcgcttaaaatcactcgagggacatgaacaaagttttatgtgagctcaggaaatgcattcacttttgcttctccccagctgccaccaaagagtttaccagcgtttcttggtgcgtgtcgacactctttggtgagtcgtgaggctcaacttttccgcacgcatcatccacttgttgcccgtactctagacccttacacagtttcccttttttgattttctttcgagaactccactcaatttcgttcaatagatatccactccgacattcctttgggttttcaacaagtgctgtggactcgctccgctacctttcgattcgcgctcgtccggtgtgtcctcaatctttgtgctcccgttttttcttctttgcgacttgcgcattcgagccaacttccgccgtctgttggactttgcaggatttggttccgacgatcttgctttctgtcttcccctcttatcagagagatcgacgttcgtgtgctgcggaggtaaacgtcttgtgcgcgccactgccccgatactttctgccatctttcctttctctctgttttccgttgtaagaacccctcagaaggcagacatgcccctcttccctgcgtctttcgcaatcccaggcttttcttgtcacca

SEQ ID NO: 657 - DNA, 2495 bp, Toxoplasma gondii
  source 1..2495: mol_type = genomic DNA
tgtgaatgtgagagggctggtgtgcttggtgtggagagaccgattcagatctgagagtctctggggactggcaccgagttgtcgagttgatctgtaggggatgtttgagagaggaactttaggaactgtttgcgttgttcttcctgctcgtgttcacgctgggagaccgattgtctgcggagagagcggagctcaaactgtcggtcgatcacaatggttccggttccgacagtcgtcagcatgacgagggagaacggaatggctgtaaggaagcagcaacaattgcacacgagctccacagaagtgatttttttttggatctcccgaaaacgcgaggaaaccgcgtcgaacgatactctcggcgtccgcatcccctttcgcttgcatgcacagtcgagtccagctgtggacgtcgatgcaggctcctctccccgaggggctccctgtcgtcgtttactcggcttgatgcgcacccacggaaacgcagcagatcgacggatacaatgacacacggtcctgcatggaacagtgtacgttttcggtacatgcacatgcgcaaaaacagtcacgtagcacgcgcatgccaataacgaatcacctctttctacgagcgtaaacgcatgctttccacgctcattccttgtcgtccagacacacctcaaacccctgcatccacgcatacatccatgcatttacttaggtcttcacaacagcgcaaatatatatatatatatatatatatatatatatatatatatatataggtatatatataggtatatatagatatatataggcatgcacaaatacgcatatatatacatatatatagatatatatgtgtatataattatgaaggtgttttgcatgagccgtatggatcgtggaactgtcggtcatgtgagttgcggtgtggagatagatttgtagcgaggtcgaaagtgaagtgattttcgcgaactctttgctccttaccaaccgtgatgatgcctgttcttctgtcaaagttgtaaacgctttgtttgactttgtcgaacgcccggtcgagctgcacgagtcctcgctgcatggacgcaggcagccgtcgccagagttccaccaacaccatgattcgtcgaaaggcctggagaaaaaaaaggtcgatttttgccgagtttctctcccgtctcagtccgcatgccgtcagtcttcccgatcttccagagccacagcgcttaggaaatttcccccggaggagggacggagaatcttccaaagcgccggacgacagagactcggacctggaagagtcacaggcacacgcgtgcgttccagacaggctgcacagtggaagaagcgccctctttcacaagagaagcgagcgttttcttctccgcgaggtcgtcaaaacgcattgcctcgtttctagttaacgaaaccacgagtgcaggctctcgaagtcggtgagcagacgcttttctgctctctcgcggaggcgaatccccgcgagcgcactgtggactctgaaaacgccgcttttcgacttcgcctcggagagttttcccagtttttctggacatcgatgccgaaaacttcgcgaattccccagacgttgcgtccccgaaaacgctgcggcgcccttgcatcgagagccggcttttcttgctcgtttccagcttctttgcctggacgctgtgtgccgagtctctttttaaacagggactgtcgttgcacgcgcctcaacaagacaagcgagtgcctctttactgcccccttttttgctgagttccgcggtctctgccggcttcctgcagatttattgagctgttttgcttcgatagaactgagtgtctctaagaaaatgcaggcgaaagagaggaagccgaccttttttctgcagcttttctcctgacgcgagtccaactcgctgagacacagcgtgtgaggcgggtcgggtttttgaggaaaatgtgtggactttgtctcatttgttttatcgcaaacaatcggcagcgtgcgtctccatttcaagtcgacacgctgtagagcttcctgtgctttagatcccttttcgccgagtctagacaatattgcccctcacgagctgcccgtacagccgggcgccgtcgttttttgcaatgagggaggacggaggcgagaaatccatttttttgccttttcgctttcacactttcgagcctttccgtttgcggcctcacagcatcgtgacgccgtctgtgatttgtgtcgtttccccggctagatgcggttgtacacacgcagaagacataggccgacacccgatcgagtcttgtctttctctctccggaattaaccgttcgctgcaggacgccctgccttccgcatccaatttgaagctcgggatcgtcttttattagaaatagatttcctggacaaccgaaaccgctgtgtgtgagtgtgtgaagatcctgcgcagctacgggtttgacgttagcgcgagactcgacgattccgagagggccttggtttttgaa

SEQ ID NO: 658 - DNA, 3860 bp, Toxoplasma gondii
  source 1..3860: mol_type = genomic DNA
tctcgtcggacaacggaggtacagctcggcgattgataagcgactcgccgcatttgaggcagtactccggatagacggtgggtctcaatcgccccgccacttcgtcgggctgtgctcgagtgtgcgtcctggcctcctccaggacctctccctgtccccggccttcgtctgcaggagacaggaaactccgcgcatgaggggaaaaggcagagggaggatggggagacgaatgagaagactgcgggggaagaggagcggaggaagaatacggcgaatgaggagaatgcaggggatagtgagaggagtgggaaaggggcgacgaaagagagtgaggggagaaatcgagttcgtcacggagaaaagaagggggacgctcccccgagatcactgcatcctgcgaagtgccaagcggcacagctgagacagatacgaggagcaagacaagaagatggaaacgcctacagaacgtaggaggaaagagaacccacgcttcgcgacgaggtcgggcgaccccatcgctgtcaaaccttctcgccatactcaatccctggagaagacgttttttctgtgcatgtgtttgcgtgcgcctttgaagacctttcaaagcgatacaaaggaggcactctttcaggggcgttgcagacgagcgagcactgaggtgaacatgtcgtcacatagctatcgatcttcacatttccttgtctccctcttgcctccacaaaacgctccatctaagcttgccaggtctcccgttcaatcttcctctgccgacgacgctcagtggacgaacagccagagaggaaaagaccggcggcctgtgtccaggaagaaaagaatggtgtggtgaatggcgaggaacaacaacgcagaggaggacgttctgtgaagatgtgaagtcgagaacaaaggacgcccgctcgacgcggaagtggaaaccgcgaaatcctaccgcagtgaaccagcagctggacttgcagtctttgttgcgctatgattgccccggttgccccctgctttccacccatcctctctctccagttacatccgctggttctgcaccaacacacatcttggcagacacaccgtctctgtcccttgggaatttcgcagcgaatgtagcaagccggagcaggcagccatctttataaaggccactccgggagagctgtacatgcaccggaaaacgacaccagggaagaaagcgtttttttttgctgctctactttaaggcagagaaggtttcccggaaaaagaaggcctctgcggaaagcggaagcgaacactttcgttggataccccgaggaaaaaaaagaggtaaccgatgtgatggaggagacacagcaaaaggcactcacgtctcaattcaggggaacgcacgcagcgcgtgaccggcgagcgagcttgcttctcgagcaggtctctttaacacattctttgaagaaatatctctgttttcttgtctcatatccatcttcctgccttccctcacttctcctcacatggcgttcctcttgatcctgttcgtctcttgtttagcggattcgctccttcccttttgtgtcacctgccttttctcgctgtctcctggggtctcccatcctcccgcctcggtttcttcgccttcccaattgttttctcttccgtctcttgtgtgtttcgcttttccccatgcctggtcctctcttccctctctgtttggtcactaccttcgtcttttccgtgccatcgtcgtgttcttttctctttttctggggcttcgagttccttctaccgtctgctctgacctccacgcttccgttttcgctgttgctcctcagtttcgcgtttacttcgtctctgctgcctctatgctttctcgatgtaaacccgcacggcggttgccactgacaagaatcagagctcaccatcgctgcagagcagaacgggacaacggcatgtgtcagcgaaatggctcatgaatgaggaaggcatatatagaggatgtgcgtggcgtacatactttggaaacgagaacgatgtgtgaggagaatcgggacgtttttcggggggggtaagagggggaagcaggcggcaaggcggagaagtcaaatacaggattaggtggggaactttgaagaaaatgttttacgcttacccttaacttgacagcttgccgttatcccttcaggtgaagaaaaggcatggaggcatgtctttttcgtactaactgggggatgcttcgtccactgcctgagacactgcagagttcagacgtcgcaggataccataaccataaggggcctgaaccgcaaagtgacgcgggaggtcgctgggtcacttgctacgcacgggcacacgcccctgatccacggggcatgacggtccgcgtgcgtttgacacaactgcagcatccaccgttgtccaaattgtctgaagttagacacagaatgccagctccctcccgattcgactggggtgtacagacaccgcagcgcatcgctcgcggccgcagttgctttccgtaagcagcggcgttctgaataagttcccccacgtgtcacagaacgccgctctttggtctggtcggaatctgcccatcagatgctttctttttatttctgtcgagtgagtggacacacgaaccccgcagaaaccgagcagcacgctcgaggtttcaggaatccgtctccgaatcaaaacagcactttaggcatggtcatcatgcacggacccacggcgactttccaaggaactgtggtgcagagttcggacgaccctaaaaatcagcggggcttctcggtgaaattgggatgtgaggtagcggagtgaaggacgcgggagttccagaagaacagttctcgtaagcgacagcatggtctctacagtgactgttaccgcctgtcacgtggggacactttgagtctgtgcaagtgaatctctggagtgacaagggttgtgaaaagcgttcagggtcctccatcacagcagactggccatggatgcagggtgtcagttacacagcacactactcgctcacgaattctgtttagctgtaagtggtcaaccggctacaacggattgttccgaggtacgggtgcttgcgaggccctcagccgtgtgggcgttaggagactttcgttttcagaactcgtctgcggttctagtctttctacgggacaggctgggaaaagggaatacagcagtaaacgagcgaattcgccttgtttgctcctcatgaaatacggagaaagcagccagtcgccagagggacccggtgttcgaaggaaacgctgcacgggagccacgcaaatcagaaactttcaagttcccgtcaccgaagctcgactttctggccccagagttgcagggaaaatccttatgcgcgtggactgttcgcttgtctccttctcttcgcatggaacggactgttctcttgttctgccaccctcagtcgtgtctgagcacttgtctcgcttgagccgtgagcggacgcgatcgttggcaggggatcgccgcgcacacaacactttaggacgataaggatgtggaaaataaagtacgtagcaaggtggagagaggcgtggagaagcaaatagaagaaaacagaggcggaagacagaacgacgaacggttcgtatggaccaacactctacttcattagatcacgcatacggtggtttgagacaacaacacggaaaaaagtgtgatgctggcgcggcagacgggtgtcgctcaggggaagtgtcttgctggtttttgtcagccactttgtagtcgtgatctggttttttattcggagattcgccgtttgttcttttcctagactccacacatttcacgccatgtcgattccgcagcaccatttggtacaggctgcttca

SEQ ID NO: 659 - DNA, 2790 bp, Toxoplasma gondii
  source 1..2790: mol_type = genomic DNA
tcgccgctagaagacaacgagaggcaaggaaaagccttcctccttctcgcgcagtggagacaagaatagacacttcgtccttcgaaaagggaaactcgagagccttcgtagagagaagaggaagtcaattccgaactgcagaggatgttgcaaagaatggaagagaagaggaaggacggtgcctccttagacaaaccgagaagaagagcagaaacgggagagaaagaaacgcgacgtggaaggccgacaaagagagacgaaaacaccgaggcgccgcacagcaccacgagaagaagaacgagatctgtcgaagacgcggcaagggggaggggaagcgcgaaaaagtctccagagaggtccttggcaagccaggaaacaagaaaaatagacctaaattcgacgaaaaaaaagagctcccctcactgtgatcacgatgttctcgcttccggtggcctggcatgagccagctgtctccgttgcctcttgcggcagaaacgcaatgctcctcaacgtcactcgaatcgaacggacagccaaggagcttgacgacgagagcgcgggaaacagagaacaacaccagaggcgctcgtcgagaacggggaacggagaaacagacgacaaagcaagaaaaggcaagagaggatacttcgaggaaagacgacaaagaaggcaggagaggaaaagaagcagagaacgggaagagaacaaggacggaacaaagtggggacaagcgacgagtgcagcgggcgaacaaggatagacgacgaaggcacacgaagggagagtgcagaaaggaggaaaacggcgaaaagacaacgagacctagaagtacgagccactccgacgaaaagcgacaagcagaaagcgacaagcagaagagaagaggagtctcaggaaacaccgaaatgaggagcagagaaggagcaagagacaaggatcggctcgcgagtgaaaacggtgtgtatctaaactgaagagagacaaccgagaaaggaagaaaaagagaaggaacagcgagaagaaaacgagagaagtgaccgagaagggcaaatgcagaaaaaggaaccggtgagcgtggaagaaacgcgggcggtgtcctcgaaggctaacgagaaatcacggaacagggcaaaaaaggtgaaaaaaggtgaaaaaaagttcaaaaggcgacgaaaccgaagagagatccgagagaaggcttcacaatgaaaaaagaaagaaaggttaattaaaaaggcagaacaccgtgacacattggttcgctggattcgcgcaaggtcttcgaactccctcgacaggcgtggagaaaagtcgagaaagaaaaagcggaaattgtcggaaagtcgcaaaaaagaaagagccaaccatgtcagcttcttcagtttttaaacaaaacttcaacgactcgtcacccgctctcgtcactttcctgtctcttcgatgcgtgacctcgtcgaagtcaacgacgaggaaaatctcgcggctgctaggggtactgtttcagtgcccgtttcatagagacttttacgccttgttgctccacaaagacttttcactaagaagacttaaatacagacatatatgtgatgaattattagtgcccatgaaataaacttgcacacattattgacgttcaacactgagtggataggagtgcaaggatacctatattttaaaacgggtgagagtaagacgccatccatgtatctatactcaagtttgagcatcggttgacatatatatatataaatatatataaatatatatttgtatgtttgcgtgcaccagttattgcgaggtgcttttcccttggaaactgcagctttgctattctttcgtaggagacgctcttagagttcgtggatgcgtcactcgagatcacttccacgctttctccctgtcgttttctccccacctgccactcaccttctctccaccttgtctgtctcttgtccttccgcatatacagatgcatactctactttcatacaacagcatctaacggtgtactctctctctctagatatatagatatacactggagtctgtatgtatcctgtatgttcataccggtctctgtcgcttcccctcatgcctcatgtctggctttctaaattgaccgtgctatctacgtatatatataaataaatatatactcgtacatccgtacatgtgttgatttagataggtgcagactcttgtatggtgtgggtttaggtccatatatatatatatatatatatatatatatatacatatatatatatatatatgtatatatttgcctctttgtgcagtgatctgtctagggttgttttcatggttagacgcgtttggggcaatgtatgtcgtggcaagagattaagcgatcggtttttcgattccgaactgtttccgcggtcgcaggactcgccaccgtcggttgtttctgcagtctcttttttctgcggttttctgtcgatttaatttaattgctgcttattcgatgtcatcgttttttgagtccggaacctcgatccgtctcctgccacgctgcatacaccttttcttcttctgaagaattcagactttttcgttggaaagatactaaaaaagttcacagagaaacaaacacagcgcgccagcacacacagcgcgccggcacacagcgagctcgacccccttgtctgtctttctcgagcgagaagaaggcgttctttgcctctcttgttcttttttcttcctttttccttttccgttttttcggcatttgtccaagagccaggaggttgcgtgaactcttgaaaggga

SEQ ID NO: 660 - DNA, 2224 bp, Toxoplasma gondii
  source 1..2224: mol_type = genomic DNA
ctgacggaaccttttctggcgacgaatgatactgcagttcgaccgtcggctgtgaccacaagcggatgccaaccgaaatgtatttgcggcgaggcaacttgaaggatccagtccagaaattgaaacaagattcgatcttggtacgcgaaactacgcaaaggcaaacggttgtccaggcagcgttttcccattccaagcttataaaaactgtcaaggccgataggcaattaatgaataccaatcgatggtgcctaatagggtatgtaggattccctcagttatagaatatcaatgcgattcatgacacacaatagacgttttctttttcgactgaatagccgaatggcggaaggtcatgcagaagagttctgaggtagtctgtgagcctcaccagggacattcgtgtagctttcgattggtgaacgaggcagctagcgacgttcaacctgtcgcttagtccgttgtgacatacttacagcacgtatgcaactcagctgacagtcatatgagtgtgtattagtttgactgtgtgaaaaatcctccacgtaaaacgagcatgtaacgtgtgaggcttgaagcagcaggagcacgcttatggtgcgtatgcgtcaattgcgatgattcacctgaaccgcaccgtttgcagctcacgatagcagtcttttttttgcaaggataaaacccgtggcatgccttggattcgcttctaccagacagttaaatctaaagaaaatccgcttgctagatatactaattcctcttgacgctgtcaactttctacgaagatcttgaaggatggctgaaggaggaggaaaaagagaagctgtataaataaattatcgccagaggtcaagcggctttggctgaatgttgtcagtgttgctgaagaggcgtggtatgccgataatggctctaccgtggcttatcagtccagacaagtgttctttcaagctgaactccttgtcatgcaatattggtcgtgggtgtcacgcagcgctgctgtcgtgccggatgtagcggttgccctatttcaggtaacgagcagaagacccattcccctccagcattttggcgagctttggattttcattcccatttgtctctacactagatttaaacgggatacagcagcacggcatacaagttgttatctagcagcgccgtttctgtgaaaccggaggagcggttcttatttgtggagttatttgtggagagggacaacttcagcagaagcggcgctttgctgccggagaaaaggtgtggacgcaggaaatactcgatctctactgaagtttgggactcggtctacgcggtgttcacgtctttttcgtgcgaaaaagtatttttaatgaagatgtgatttcgccgaattgatgggctcgttgtcgcatgcccgaccagccccagagatccatgtgtttacatcgcgtaaactccccgattatatcggtgacgctcatggacgcttctcatgggtgagcaaattctcgatggtcgcaagctgtttatctgctgaaaattgcctttcttcttccgaaggctccacatgggcaacggctcccgtgattgatacggtcgaaggcacacgcagttacgagcggatgcacttctgtcaggacaacctggcagtgctggagcttccctatgatttgcagtcaggccgtagcaaactacgactcaacaaagtgtgaacccaatcaaacattctgatggccatctaaataaaatgttgttcgattgcaatcgtccgaatctttcgcgtgtttatggtgacgcttgagagaacaggcgtatgtacggttcatcaattaagaatgttgtacatgcgtagcgatggcgtcaaacgctgcttcttctagcagatcgtcacactgttgcgaaactctgtatcgtcagcagatgctgttggaggtttcgtctccgcatagatctgaaaactagtatgcaacattaggaagcatatggtcatcacatacaggataggaaacaacgcaaaagtcgccattctacctgcattgccgaacgtggcataacgttcgtgagtttgcggtgtaaactaccgtccgagtgttttgtgtcatgcctaagaaggaaaactcagagcatgtgagcatattctcgcttgcttgcactctacttactggatccgaacgtttttgaaacgctgttttttctatagaacctgcttcaaagaggaaagggggtgtccaccagtcagtggcaa

SEQ ID NO: 661 - DNA, 2104 bp, Toxoplasma gondii
  source 1..2104: mol_type = genomic DNA
atttctttccacagtttcttgagacataggcgccgtgttgagagacaaaaggcgccagagagtctgagatcttttcggcccttctttcggcacacagtctgcatgcctgatacttatgtgtagttggtaagagatgtacatctaccaccaacatacagaactagtgcacattgattcggttatatatacgatatgcatgcgctgacaggtggatggaggggtccctgagtcgccagaagcgcaggtacgtttcacgcgtccatgagaacgtatacgcagtaggtgtctcttatgtatgcatagagaggcatattttctaggtgcatgcatctctcgttttgcgccaactgaggtgaattaaaacaaagctgtctctctctgtgtgtggcagtgctcctgtgaacgtaggatgcatatgcgagacatcttggcggggacatcatgaatctttccgaaactcgagagccacgttttaaacaaatggattcccgcgagaacgagccgcctttcttgtggaaacaggagatgagagttcggaaggtgtatattgcacccctccaagtttcctccttccccactgtttcagggcctttgtgctgaacagatttctcagtttttgagaaatgtggaagggcgtgttggcgaaattccatgcgagaaagcgcgtccgcaattatgtgccaagaagtccactttttctcgggtgatattctacgctggacctcatacgcttatgttgacagaagctgaatgtcttgctggatttgatgcatctcctttacaccgggtgcctttgctggaactgtcagacccggataactgagtacaactcaactgcttcgaaatcacgtttttccgccatggactgcctatctgagataccgtgcagaaagttcgactgagccggctgtctgtacagcaggttaactcccagacaggaagcaaaggcagaaggtctgctgaaccttcaactgtcggagaagcagcagctcagggaaagaaggggaagcgaggcaacgcagggcagcggacaagccgaggaagagcggacgggagggacctagcgagagaaggagagaaaagaggcgatagagaaacaagcggcgagaactccatgcagcaacgaacagagggactgagtagagaaagcggaagaggaagagaaacagggagagagaacaacaaagacaatcacttacatttttcatgcgctgccgcccccccgtttccggatggtgagaaacgaccgcatcccctgtgtccccccattttctccctcgcttgaccctccaccaccccccctcgttttctcgacctcctgtggtcttcgaagagcgtttctgcggaaaaagaaaaggaggttcctctcgtgttctgcgttttctctgtgggaagcaagctgcggagttcctcttttttttctcgtggaaagacctcgtcttcggcgaggaaaacgcacttcgccgctcgcgtgtctctcgtgtctctctctcgggtggatgtacacacgccgcggtccacgagtgcgtttaatcgacttccgtcaaaacgcgttgtgtgtcggccagaaagtaaatgaattgcttccggtgaaaagaggaggcgcggaagaaagacttgaaaactcaccagacactcacatcctttttctccaggcctcgttgatgcctgattccttccttggcagctctgtgctcctgtctccttcgtcgcgtcgctcttcgcctcgcttcgccgttcctcgctttttctgaaacgctgtccatccatctgtctgctgccctcctcgctcccggcctctctcttttcctgcctgggtgctctttcgtctctctccaaaaaaaacagactgccctgtctcctctctgtccggccccttcctctctcctcgtttcctctggccgacactggtcggtctcccgtttttgcctccttccctcctctccgtcggccctctttctctttgtctcttcttctgctgcctttccttgccccctccgctccgccgtttcctctcctttcgccgcgctatccccgctctctcttcgccgccttttccgcgccttctctccttttccgcgccttctctccttttccgccacga

SEQ ID NO: 662 - DNA, 2218 bp, Toxoplasma gondii
  source 1..2218: mol_type = genomic DNA
tctcatagatgctttagaaatacccgtcttctttgtccgcaacgttctaccgatgccatgcgtcatataggggctgggttgcactgcagtcttgattgatgaaaactaggccccagacgagcggcatctgttccactgataggatttgaaaatgttgcgatatgcacctgttcttgcagctgtcttacatttctacgaggcatcgacactcaaagcgctgcgatgaataaaaactgacgatactgacgtgcacggtgtacgggtaggcacatgcttcagtgcttggttacattcaggtgaccgcacttttcttctttgaatgccatgcttttgtagagccacacggttgctgtgaaagtgccacactctctgcgactcggcgagaaaaaacctcagaagctgtgtgcacggccccgcgacttttttctgtcattcactgtattgctaagagcagggcagcgaaagctcaactagtattggttccatgagaactcagcaatgcccgttctaaatagacacttctgacgtatgttagcccctctcccgtggactcctgtgctccacatgtacaccttagtagtttcttgattccagacaccacgaaatcgaatcctcctctttcttctggattaaattctcgtttcgagtgtcgagagcttcgctactctactacccgcagtggaccctgctgctgccatagccgttgcatcggcgctctcgggatgctggtgtcagcataacggaaacagtgagcgcttcctgacagttcgctctgagcgcacttccccacagtttgtgctagacaagtcaccgtcggactgcggtcttgaacactggctaagatctgctctcgaatcacacttatctactgagttaggcagcgatcctgttctccaactgccgacactgtggcttcactgttacctcttgaagttacccctccctttcaaaactatgggaatatgagggggcgaacaatgttatgccaaggactgaaaaactcccccagcgtgttgggagtagtacccgatacaactttctttgacggcattcccaccatgtagtagttcacgtttttgccgcgatcaggtgtagtcttgcttgcacaggaaggtttcactcgcctccgaagaggtgtctgttacccgtgaagaagagcatagggggggacaccagaaagtcagctgaaccaagcacctcaggcagatcctttatttttgtgaaatgagccaatgatttagaggagcgcggctttttggggaacggtcaaggacggaggtgaggccgactggtccccggccttgtggcgggcatgggtcttttacgcagaagacatgaacccaacgaagaacagcccattatatcgtcacacgtagtaattcagatgactggcttgtcaatcgcagacgatcttacctaacagcctatcgcaagctctctcgccgtgagccgtaacggacgcttcctgcatgcatttgcatgtctttaccggttgcaggtcaccacagcagccagataaaaggaatagcgcgccacgctgtactagtttttacgaaagcgaaagccactgaggaacacgcgttatatttcgtgtaccccactgactctttttatcagtggcttcaatagctgcacacctttctgagaaaactgctccgtcatgtgtcttcttgcagaagtcttaggttcttgatccgaaactcccctccagatcgtccagtttgcagtgtgtagccgagccacttctcccccatgttgctccacgtccaggttttccctcatccgtgaggccgatcgaagaatggactttctgcgttcaactcttatcgccttaaggggaggcaattcgagttctggcacaaaccgccggggtgccgcccctcggtagcggtgtgttcgtgagcacaatgccgcaaggaagccacggcttgataccgcgtgagacacaactcccacgtgaaaaaggcagttttaaatttccatctctgtcttttgcgatggctcgccagccagttacgcaacgagttcgtgtttgaagtcgctgccacaagcggtcatctccaccgaagcgcttcgagaactcgtagcgaaaacccaaacctagagcgttgtttttggcagccgcctttttgtccctttaagaaagccccccgcaacagtaccagagcctcgagtgcttcttctctgccctactctccgtctttgttttctgtcgcca

SEQ ID NO: 663 - DNA, 1096 bp, Toxoplasma gondii
  source 1..1096: mol_type = genomic DNA
aaaggagagtgcgagaagaaaacagcacacggtaacaaagaggaaagagatgaagaacacggggcatctggaggagagcagaaaggaggagagcagaaaggaggagagcaggaaggatgagagcagaaaggaggagagcaggaaggtggagagcagaaaggaggagagcaggaaggtggagagcaggaagtagacgagagagtcggagagaacggagagggtgaccgaggggcagggaaaggagagtacggaggcaaggaagacgaaactcgagaggaacagactcggcgtttggaccatctgtcgcagacagacagagaagaggaaagcctaggcgccatcgtgtgtgccggaaaatctgcggaaaagatgctcccttcccaaagtggagtctgtcactcccctgctctcgtcgcatcactgcgtgaaaccgatggaggacgtgcggtcttcacctcgggcgaaatccacctctctctttcttctttcttcctaatttttctcgttctctttctcttcttcatttcgttctctttctctccttcttctcgttttcttctctctccttcttctcgttttcttctctcttcttcttctcgttttcttctctcttcttcttctcgttttcttctctcttcttcttctcgttttcttctctcttcttctcgcctctcctctcttctcttcttctcgcttcttctctcttcttctcgcttcttctctcttcttcttgcttcgtcactttccttctccgccgaacgctgtttgcatgtgctggagcgcgttcacgagtagcactggtgcccaaacacagactgcatgcgactgtacttcatgaacttggcatgacagccgagaacaacgacacaagagaacgtggaggcggggaacagagacctcgaaggcgtaaacccagagtccgccgcggcatgctacgcacaacggcgcgcagcgaaaaagtacattttgtgacgggcgggagaggagaggcgcgcgcgagaaaaggtcggtttttttaaaagcaaggaactcgacactgtgtttttcctaggtacttttgctggactcctcattcccaaatctacctctgcatgca

SEQ ID NO: 664 - DNA, 1426 bp, Toxoplasma gondii
  source 1..1426: mol_type = genomic DNA
actccgaatgcagagacaacacccgaagctgtgaagttcgctcaactgtctctgtcagccggcatgcgatgcgttcgttttctctcctggccccacccgggtcgttcaatccgggagaaaagacaactccccaggaggagacaggctgcagggcagactctggtggttccctcattgaaaagaggagcaaacgaatgacagagaggcgacgaccaagtcgaagcaagggatctcaaattgcagaaacgaggagaaggagcaaccagtacgaaggacatgaatcaacggaggagacagcggaaacagtggacagagagaatagggcgcttttctccgtggtgacaggaactacagagttgaagcgatagacataagacacctgaaagatgtttccaagctcgtgaagactgtcgacactggctggacgaagcagacctggagatttgtggcttcttcagcggaaaaccggaaagaccttccgcgggagagggcgtcgaaaactcctcttctttttgtgcatccccccacctggtccgctcctctctctttctctccacccgacgctcctttgcgcatacgttcttttacctgtcatttctgtaaacatttcactttactacggttcacgggatagggagagcaattcctgttccaaagacaccttcgtctgcgtgtgcaaagggacctccccactctccagattgtcgcggacgagtggaaacgccggtcgaatcaaacgaacgaagaagtagaagctcctcgatccgccttctccagcagttcggctgtaaaatgaacaatcgaagcgctgagctcggcccgcctgtgtgtgaccttctgcggcttctgtgtgcgttgacgatctgggagaaaatgtgccgtttggagccgtttcgtcacgcgcaacggactgctagaagaagtgactcaaagaagttgcttctgtttcaatgccgatccccgtacttggtaacagtccgtccagcttttcgcctttcccttcgtggcgggtgtagtcgggaaaagcaggcaaggccgaccagcgggaactcccgaagaagcggtttttccctccaagaaggacgaccaatcttgagacacccggaaagcagaagcttcttctgcggattgagcactgacgaggtaaactccagcgtgaagcgttcgcagaaaaagcagaaagcggattctggcgagtgctgcatgtgctgtgcgtcgtcgcggcgtcgacagacagctgcctcttgactcgcaaaaccgcttgacagagaggggcctttctattgtgtccgtttcaaattttttgtctagagagggaaaatcaaagactcttgggtgctctagaagacagcgcatcgataaggcaggtgctccagaaaagaattcgcgggagttttttgtcaaggtgaaacgaggtaagtcatcg

SEQ ID NO: 665 - DNA, 2140 bp, Toxoplasma gondii
  source 1..2140: mol_type = genomic DNA
aaaaaatgcacggtctacgagaaaggcgtgggtttagttgccattcggcgacaaaaggccattgaaagcgtgccacttgcattcactgacacatatcacctacatgctggctcccgcgaaacaatgccaacccattttcaaaaccacacagccatacgctgtttgtagaacaatgctgcaatgtcttgcctagactcgcaacgtcagctgtccatagttctccgttcttggagttcaccagacacactagctgccaaactgcgattcgacggggttcaaatgctcccgactgcggttctttccaggttggctggttggacagtggcaagcgatgtggacctgtccgcaagagatcgacgtttttgatgagcatgcaacatctaacttttttagaagaaaagccctaattatgtcgagcaattctagctgagagtgcgcatttaatgcatggattgacaccgtttatattgtggtacatgcctgtgtttgcgcccaggcaagaaaggtaggtttacatccattcacattcagcaggacctactgtggatgccgccggatgtgcggtaatcccagaaagtatttgttccaagttgccaaaggcgctgtgtcggctgcacggctttgaagttgctctgggtagtaggactctggccgatgagtgtcccgtacgtgttcatgtctgagacccatccacgaaatgtgtgtaactttaaactaaacttgctggcacacgagaggaatttcacagtagatatgaaaaaccaacacgtacacaagctgtacaaatgtcgtgagacgcatttcgttaggcttcccctggaagcggcaggctctctggtcacaacagcgatagaggtgagcaatcgctcctcgtagttgacttcacgaatgggtgacatgagatcctgaaatcgacagtaatttctcttgtgtgcaagacgtttttctgtcgcaaaacactgcaccgacggactctaacctccggactctggtttcttttgccgcgaccgaattcggcttaaattgccccctgttgcatgttctcagcatttttctgtttctcccccggatttacccgtcatgagagtgttttagatgtgtgttgccaacggaaaacccgtccagaagattgtacaggttgcatctcacgttagactcgtgtctgtgcgactgggtcgaaacgcacgtggacgcaggaagccacattcctcccacacacgcatcccacctgttgtttttccggaagcacttatctcaaaacagcagtctcctctgtaaagaggcgagatcacctgtattgataacacgcacgacagattccctcattcttcggtggcaagctatgcaggtgtctatcacgatgacctgccgccagagggactcccgtggcggtggctttcatagaaacagtggacgtttcacccacgacttgagttgtttaccttctctcttcctaagtccaaacactcttaaagtggatgaccccagaaccttggaagcgctgctggtgcccgttaaaagcggggaaccccgtcagtgtcacttgtttcgtcgctgcaaagccctttctctgcatgtgcagcatgtggtaatattcgcgagctatctcttcttctggctagctagcgcagtggagctaccagcgacgcagagaaaaccaatgtgacagcatctggggttttaaccgtcgcgggggaagggcggtcttctctttttctcgggagctcttgggtttccgaaccacaggagcagctgagtgctttttgatttcccccttttgttccgtttttcgggctggtcgagaacgagatccagccccgggaaagacggcggggccggcggagcggcaaatttgaaacgccggccaaccaaacaccattgggctttcttccgaacggcctgtattgatggatccgtctatcttcggattttaatctcggccgcctctccaccgctggccgtcgctgcctcttcgcggcttgagactcatttgtaccgacagaacgagggagcctgcccacggagacgggttcttcccgcctcgagtccgagaacggagtcgaggcgtcagtctctttaaatgcctctttcttaattctgtagatcgtctgttttccccgttttctgagtcttggtgcga

SEQ ID NO: 666 - DNA, 2566 bp, Toxoplasma gondii
  source 1..2566: mol_type = genomic DNA
tccgcaatcaaagaagtgactggtacgagtctgcggcgctcggaaaagcgcgccggccaccgagtgaagacaaactggccactgacatcgagctccaggtagaccgcaaactggctgcactggagaggccggttcccgtggcacggctctcgtgaaaacagcgcactggtgtcgtgaccgatggagagcgaatccagggaggtgaaactgtctctcgagttgggcagaacgccggcattgtcttggctctcggcaaccgcgagaaggtccagtgcccagacgcgcaccccatagtcggggtccgttgtaactccgccgaaggcccagaacggactgagcagccgctctgcatcgcgcagcgactctcgcgtttcctggagcagttgagaaagctggtcgcgaaatggcgaatgtagagaggaaacggccgccgttgccctcagcagagcacccagcgaagactgtagcgagctacagagggtcctctgcgtctccgcgggaagagaggaccagataacggtggagaatcgcttcagagaaaaagcttgttccccagacgcacccactggacgggtcggatttgacgcacgcgaagacgcctgagacgaagcagtgtcctcgaaaaaggcagacgccagcggcctcggagaggaaccggaaggagcggcgggccggtctgagaggagacgaagatcgctgcttctggaaggccactcagcagatgaccccgtccacagattcagtttcgtgtctctgcgcgagcgggtaccatggggaaggggagcagtaatagaagctaggaatgtgtttcgaacgcagagaagctgccgaattttctcacggagagaaacatcattgacgcagtgagacaggaaacgggacggtacacgagttccgaaaaacgcgcctctcttgccgcctgccacatcgcactgttcaaaataacgtcccgaagcgttagggggaatcaaagtgcagcaatgcggattccggtgaagaagaagaatagagcctccagggtaggtggcggcaacccggccatcaggagcgacgacacatgcgacaaaacacgatgtcgacccgagagaggaggtcgatgttttgaaattgctgtcttgagaaaagagggaagcagggagattggaggcagggggcagtcgagagtttgtagccatgctgaggaaagacgttgaacctgcacctcaggtgaagagcttggtcgttgggcttaccacctttgcccgctgttccacatttctcacttcgaagtaccgctatctacggcggcaactccggatgggtgtggcagccggctttgtaggcgttcgaaagaatgacggagtcgctcgagatgcacttgatttccgcctacgtggttgtaccacggtcgctgggaaagctgccgaagagccaaggaagacagctccgtggcaggcgacttccagcgaggcctgcactgacaaggcgtggacacaagatgtacggagttaaaggacgcgtcatcgttccactgaaggtcgatcggtagtttcgtggcaagaaccgcgagttaaccccgggttctgccctttttcacagggaaaacaaggtttgataaggatattcggaagcgtcaatgtcctggcggtccgcagagagaaccgcttgccgcttacgctcgggaactgccctggctggtacgtccatcggagctggacatctgcgcgacggtgtgcagacgtttggaaaagccgagagtcacatatttccattagcgcgtgcagtgttcggcacttccttcgaagacaatcctccaattgtacccctacgaaagttagaggagctacttgttttggagtcaaactatcagaggtccgttctcctgatcgtagagtcttgaagagcgaaaacgctgacgcggcaagacagaaaattgtggggtaacgccagagaagacaggacgtgcatgcgagcagaggtgctgcgccgcacacccagagagatgcggctaattttcgggcagggacgggcgaggcaaacacacaactgtagaccgcagtggtgcctgatctgtacagggtggtgtgttcttccgctttgtaggtagaaacccacagaatgggcgttcgtgagcaacccctccccccggcttacataagcgcgcggcgtcgtcaccgcactagagaccgggtactggagacattttgcccgaaaatcgtccacaccaccgtaggaagttccccatgttggtcccgtcgttcctccgcaaggggttgagggcggcgtcattaccgtgtttccctactcttgcttcctcgcgtttctaaaggcgtccactgcgacggttcgtctgtcgctgcgtcactgcgtcttcttcctgttttttcgccttcgatcaaaaactccggaagtgtctatacgcaagtcgttcgaagagagaagggccgccttcctgtgtgttgtcgcctgtctcttcgtccctgtgtacagcaaggcaggcgttctgtccgtgttaaagcagcgatctttccgtaggaaagcgggttcccctttgctgtgcattttcattttcgcgaaccaggaacaa

SEQ ID NO: 667 - DNA, 4109 bp, Toxoplasma gondii
  source 1..4109: mol_type = genomic DNA
cccacacttcctcgagcggaaactgacctgtttgagaggagatgttcgggtgccaaattttcgtgacgaacttcatcttggggggattgtaggggtagtcaggaggaatgacgatgtcgagagtgaagtgcccaccttcgtagggcgtccccagagggcctgcaatgaatccccgccaacggtggatgtctccgccgacgatttgagcagagacgccatgtgaagtcgagtgagtagccgcaggttctgagtcgtgcgctctctggagttgctggatatctgccagctccttcagaagacgagcctgctcccgaggcgtcccgcgaggctgcgccgtcgccatggcaagaaaaggaagtgacgcgggtccggagaaggaagcgctttagcaagcaagtgcacgcagctgcagagcctcaggggaaaaccggaaagaagaagctccagagatgcacaagagaagagagaggagtcgggaaggcgcgggaagacgcagagccacttgcagagtggggaccctcaacgccggggtgtacgtacagtcagtgacggcttggggaggtgaggttggagcgtcggaagaagcgtccgcgggcgagaggggagattacatgatttttcacgaagactcagaaggggacggatggagagaaaatcggtgactggcgcagagaagcaatgacgagttgatgaggccgagacgaagtttcgacacgcgccttgagagacggacttgaaaaagaccttggagaagactatcgggagagtctccccactgcggcgaagcgagtggagtgacagactgccgagcagaaatggagaagaaatctgcggcacaccgcggcgaacaggcagcctcttggaattgagaagacgcgggaagagagacgggattcgcgacccagaagaaaacagcttgttacctgaagacccgaagagacaagagaggaaagaaaagcacttcgacctgccgcgcgagacaacgcgaaaaagaaactcaccagacagccgtgacgcagaccctcgtgaggaagagaaaaaacttatgcgcctgcgggactcaagacgaacgaagaaaccagagagagaattcagcccagagaagaccgcgagaaagaacgaagaagacacacaggcaagagacaaaaaaaagcaagacgcgggagaagagagaaaacctccgacgaactcgggtgtcagtgttggccgaaatgcagcgagaaaagggtcctccagggaggacgcgcttggcagaagagctgagaaaacggagaaaccgagaagaaagagaacgagacgaaagaaaacgagaagaaagaaatcgaaaaagagggcaagagattggccacgccgccagagtcacgtggagcgcagcgcatataagtgtgagaagtgagaaggaagagaaaccgaatggacgcgggagacgcacccgaggatgtgcgacaaagaaaaaagaaagagaaaaaagaaaaggacgaacagagggggaggaaacgacgcagaacacgcgcgtcgaattcagccctcgacaagagacaccggtcaggaagaggtcggaacagcaaattaccgggtggaattcgggagcagaattacgtccttgaggctccgaacgccgtcaatgagaagaaccaagtgtggaaaaccgcagacagcaatcaactgcagatacgcgcgtgatcgcagctttcctctcccgaaaatccacgcaaattaacagaaatcgacactgacgagcacctgcgtggccgcggcctggttctcagctactacgaaatcaacagcgttcgagttttcgcgcaagtggaaaaaggagcaaatcctttccaagcatccagaggcagcctcgagtcaagcgaaaagtcgctggcagtttctcgctcgctgtttctgcagaatctgcgaatttctctgcagcgcaggctgagaagtcctgtgcttgccggcggaactccgaaagcgcctttggcgagtctcccttgcacagccggcccccaaggactcggtcgcgaaccagaggtttcctcgtgcagacagtgagaacaacccaggtttcttgtccaccaaaagggtcaaagctccggcaccgggcgaaacaggtcgaagcccgcgaagcgcctttctcggatatatgtacacctgacccgccgtccagtttcgcgcttcttcccgcgtggggagactccaccttttccagtcttctcctcgaccgcctgacgcgccagcgtgaagaagtacagttttctctgtcgtgaccgtgatgcagcctgcagtgccagccgctgcttccagacactttgacctcaccgaaattcctctgctgctcaacaccgtggaagtccatgaagtctacatccctctctgcaccttctttgtcctttcttccgacaaaacgacttcctcagcacactggacagttcgctacggcaaacccacgaccaatcactggtggcagcctgctgctttcacacatgcccgaaagtggagcgagtcgtcgactcctcaagagcggtggattctgcgtatccgggcactttcctgcagcggaaggccggaaaacttcgaagaaacagaggacagcgatgcgttcgttacaccgcaaatgctccttcgcacccaccttagagaaacgctcttataagaagtgttcactgcaagttactgccaaagctgcacgttgtaggtggaagaaagacacccgagagaaacggtgaccaacgccagccgcatcgcatcaatgcagacagctcgtacgcgactagggacactcaacagcggctgtggcctagacaccttctacatcggttcctacgtaggtctcgtatcagcaacgggtgcagggggaccctcaggcgccgtgatcacgagaccgtcgtgctaggccggtaacatctttccaaagtgatctgcacttctgacgggcgtagaacgacgggccgcctagcatacctgaccgttttaacactcgatgtgctctgcctgcgacagctccgtgtccgcagtgtcgcttctgtcagaaatcgcatttcctctgaacctaaatgagcgcctaaaatgtgttcttcgactcgagtcacccagttaggaaccgcggggcgctgggcgagaaacccgccggcgtccgttgacgagccacaattgacgccactaaaagtgctaagcgctgcgttctggacagtgtgtctctgtgtgcggcgtgtttctgttggtggaaatgctgtcgcattcgggactccggcagctctgcgcatctctcaacagcagaggcgaagagaggttgcggcagcagcgtctacgaacactcaccacgtttcaagacgacggcgactgcgcctcacgaccccagatgcaacgtggaaagtggaccttgcgaatgccgtcgaaaccagacggccaacgtcgaaaaagcggcggcatgggtgtcgctgtgaccgtccagtgcacagaatcgcttcgggggacttggctgtatcgatgaaaagctgtggtgtcgcgtggagagtgcgcgcgccagcgagtcgggtcggttgcgatcgatctttgcgtggcgagcacgctgtcgtgttgggtgcgagtgcgactgaaaaacgggcttgattgctccgaaaatccacgatttgtttcctcggtgagcgtccacagtcccgtgcacctgtcgagaagaaactcaggcgtatccggaccgtttttgcgagaaaacggcgaaaatcctcgagctctctcggcgccgacagaatccccagagcgcgcgaaccagaaagtcgcgagagcgcgcgcgcgcgggctgtatgtacacccgagggctgtttgggcagctctgtcgcagagccagttttctcgaattttcgtccttcttgtttttggagtttccccaaatttttccttacttgttcccacactcacgtcgtcttttcatcggagatctcttccgcgtctccttcgacctgattcctccgtccacgccgtcgaaggcgcgcgcggtgctgcagtttcagggcggctggccagctcttctcggccgcttcgacgaccctctccggggaaaaaagaagttttctctccttcgttgtacctctttcctcgtgttatctctctctgaagcaaaa

SEQ ID NO: 668 - DNA, 3024 bp, Toxoplasma gondii
  source 1..3024: mol_type = genomic DNA
agattgctgttctttgtatacagtcgagggaatggtgtattagcgggtgaacttaggtatggtttcgtctgctgcgggttgcccaacttcagtcttccctgcagcgccgaagccctgttactgcaatgtacacgtctcgttagtaagggtttgattttcagatcggaagccgtggttttgccgaaggtgcgcctttttcaaacggtatcgcactgttttgagacgaatcgtgggattatcgctaccctcgcgtctctacattgggtgaaacagaatgtttctttttgctgccgttaacgcaccaggatgtttcctgcattgtgcaacacgcctttaaagacacccgaaacctggactgcgatctggactcaataccccgacgtaaagcgacacgtggaatggtaatcctgcgacacgaatccccgacgcttttgccactgtgaactgccctactttcgatacaggagtcagtgcagatatcttctacagaatgcacggaaatcatatccgtagatgtggcaggtgtagttaggggttgcaaagccaagcgactccttgctggctgctacatcagcctccaccgcaaaggtgtgccggcaacactgacttgacgcccgttgtcgcatttgctttcctggctgtccatcagtttcattcgcactcatccggctttccacaagtaaaaacgcagcagcgcaacatctattgttcgaagctgatgtcacgagtagacagcatccttgcatgcctaccagtaggtctagtggtacagggagagaggaaattgcgttagttcttggcaaacgagttctgcaacccatataggttggttcaaaagccgtacttgtctttcgtacacaggcggcactgggaacgaacataaatatcatagccagtcagtatcatagcgagacccacaggtgacggttcaactgtagaaagctaatatctattcatagccggagtataaagcgtctattcagggggcaccaactggaaagttggcgccattgaccgggacggcttccccccattcctttggggatcgtccacaccataaaaaatctagacatacaatcagctcctaaacttctactgaatgtttgtgtcatgacgacgtgaatgcatcctaacattttcacgcttgacaacttggttctctccgcaagaacgtgcccgttattggtggcctcttgcacacacaaacttcacacaaaacattaacctacttgcgtcacgaatcatcgcacctgacaaccgggcgcctgctgtcgctatcgagcgggtgctgtgccgccagagagcctgtgggctccgacaagtattttccaaagttctccggcagaagacaacctgatctgaggcgagtcacatatattataccgctttctccaatcagctgatggcattcaatataaggtttcccgggtggtacgaaacaccacggggggtccccgagcacaacgtcctgtcatttctccagttgcaaaaccgaacaacaagcctttcggtggtctgtacatccttactaatcggaaatgaagcttaaagttgatagttatatcttaggatgaatccatcgtgtcgtatgtcagggtttccgtccgacggacagccggtaaccctggcaactccctactttaatacgttgttcattcttgtcgagcagaatggactcaaactgcagctggtgtcccacttcgttctccccaaaacacaccgacacataaacagatttgagcaatgtccaaagaacgtcctgctcagcatcagaagtgtcaggtgtgtctcttgataatcgaagtaaatattgagcactcgccctctagcatcgatacagccactggcagcagctggctacgccctccgcgctgtcgaaaacgcagcgagctgcgcgagcctcccatcgtcgatattcctcttggcccgtcggaatcctgaagccgggcgcgcgagcagtggaacccccaaccggagcgtttggctgtggactgtctcaagagaatggctggcatgctttctcggaagaaaatagatcatgcagaagttcgtaggttcttccaaggatgtcgcgtttttttcgtcgacgtccgagtgcctgttttgtttcctgcgtcatgggcacgtcctcccgtctcgcgcagctctgtccaaccatccggattcttacccgctaactaacgggggcggaaaccgcaacatgcggcttacgtgtggttaagattccggatgggcggaaccgattttccccggagtttcctcgtgtttctcgctcattttgtagttgtgttgtcagtaacagggtgcggcgcttcgctgtagttacaccgcagaggcacggaagcaaagccgtgtgagccacgtgcctcgtggacaatcgaggcagttctcacgaaaccgacacagggaatttagtcttctccgattcttctgtactttcctccgtttttttattgggagaaggtggagaggctttgactttcctgcacttgttcccaaagttcatccccccaaattttcttccctgcagctcgcgcgtctccacgccggcacgccacttgtgaagaccactttgctgccacgtgtgtcacttcgatatagtcatattcgcgttgcatgtccttccgcaccattggttgaccgtccttaactgctcggcttttcaagggcgcgccgttacttcccttccgtctgagccagagacggttatggcatcgtgaatagcctggggttgccgcgcctcagctgtctgtggcttgtagtttatcaattcgtttctgagacgtctcctcctgtgggaaccagtttctagtcttgaatctgcggcgacagtggtacaccagttaaggtacgtataccgattttcgcgaaaaaaacaccctcggcggcactgtcatccgctctcatagggggtactgcctacttgctcagtcacggaggcagtgtgacgcggacacgcgaccccagaaagcttcccctttgagtttcgtcttgtgtcgtgagtttcgctcttcgtcgagaaaa

SEQ ID NO: 669 - DNA, 2936 bp, Toxoplasma gondii
  source 1..2936: mol_type = genomic DNA
aggtgcgcttgattttgaaaagctacattaacggttcgcaaagtggactctttctctagcaggaaatgattgatgtgttccacggtgcatcccagtcttttttctaggatctacatcaacggttagcacttttgaaacttgaggatttcttccaatttgtctgcggcctgaacatgaccaacgacgcagtggtggaggactgtcgacagatcctgttttggtgtgagtgaaggtctgtttttccacttgaactgcttttcgccgttccatccaccttcgtttcatatggtgatcgaaacacacaagagtgaagggaacgtcgagggcttaagtttctgctttgcaggaactgtaagtcgagtgttgccgggagaaaaatcgggggcgtcaatctcgaaaggcggcagttttgtgcagaacttgacatgttggttccgacactttcggtttcctttgaacttggcgtttctcagggaataataaaaaaaccagtcttcagtacgtgcgtcgccttcagcacgcagccaggcgccatacagacgagatcgacgagcttagagaagaattaaacagacttcgggcgcgaacgattccgatgtttgaatctgcggtgtgaaaaatggaatctcctattgcttctctctcatgcaagtctcaaaaatgtgactgccggcaactcaaaaagtggttccatgaaatgagaagttggcgacgagagacaaaaatgggaaacgatgtggaattcattctacttcgatttccgatcccgtgcagtggaaaagcgctgccacttggcgtccataggacgataagacgaaatgccaacgggggtcaggaattgtaaaaccttgtcagttgcctcctaagcacatatacatacagatactaatcttcatcagtgtcctttacgcggtcgctaaccttggggtcgcgcgcaaatccgtagacttttatcgacatttgattggtgaatttgactttttcaatggcttacctgtacctgcactgaatttcacctgccgccctcactggtggagtcttgcgccacagctatgagggtagagctgtacatggtcacatttccgaaaaaaaataccggcgcaaaacattactgtcgaccgccacacggcacccgagatgcagcctctttcctacattgaaagaaccatggaggggcatgcgtcactttcttgtaaagatacatctggtctggaagcagtcacatcctcgcttccttagtgaaaagctcggacgaagttccgttgcggtttgctgaagaacgactgacccgctaatcaaagatttgaccgagagctaaccgagcaccccaactcgtatttttattccccagaaaaaaacggcaactaaatgtcaacccatcctgcgaattcgagacggtggactgcttgttaacgtgtgacagtacggttgtagtaagcgctgcatccacgatccaacgggctgaattcgtcatgtctgctaacaagtgtttgtgcgtgaaataaagctacgcacagtcggcagaaacagagtcgatcccataaacgtagatcttccaggttggggcgcctggtttgcacggtgaccacagatgtcagcctgtgtgcagttgataattaggactcgaacttcgtacaacgtggttcgattttgatttatacaaatgaacatgaaaaaagggaagaaacagatgcatgtgaatatggaaacacccttctcgtctcattcgatttgtccgagagaaacgtgcgaagccgcttcccgctcagccatttcccaggactccgactatccgcctcttgtggtttgttcgctttccacacgtcaggggtttcgcggaactcaaaaactttccttttgactgtttcagagagtccttcttcagaagtaaatggacagagcgacatccctcgtttttggcttctttcgctcagaattgtcaactctggcgaccccgggaaaatacgaccgagtccttttctacagtccacgatcaacagctgtttgtcagctctgctagtgcagagatattggaagagtcacgcgaattccttcgatcgtccttcagaaaatgtcaagcagctgcagaagcgatagggcggctgaaattgtcacatcccggcatgcacacgacactttcacaggaaggcgccgcagtcggggtgactctttgatgcctcactatccagacggtccccgtagcggctttttcttgtgcagatgtacgcggtaagctagtgaatttctttgatgcgctgtgtgcaatcgctttctacggtgcttttcttgcatgtggtgatgcggctagcgcgcaaatctttgcgagcgcattgccgagaaatttctcccgttgtgtattgctggactttaagtccgggatagacgaggactaagagactgtcttccaacgctatggcgatatgcaagttggtaagcgtaaaacgaaacccgtacgctttcacaaaaagcattcttatccgttgcaagccatggctgcgctccagaagactacccaccccgacggcatgtctgacgccagacgacaagaccccaccctccatccaccatctccccttctgtgtgtacatgcagacggtaaaaaatgatcagtgtacgctggtgaaatttgccatgactcttgtctttctttgaggcttcctcggccttctaaccctttagcatcgacatttcctcctgtttcgctgctcctgttcattcacccaagccaggtttccctcgtaaatgtacacctggcgactgcagttgctgggaacacccggctgcttttcccggcacagcagcgattccggagcactgcgattcccaggtggtagttccttttttctcgcttctctctgcgtatcccttttacgcttcgtcaaagagttctccgcagttttgcgcaccgctttccccgctcttttcggtagtcgcaa

SEQ ID NO: 670 - DNA, 2097 bp, Toxoplasma gondii
  source 1..2097: mol_type = genomic DNA
cagaaatgccacatgcttaggcatgtgtgaaacagttgaaggcaatagtgcctttggcggccgctcggtgttaatgcgtatttccttgtttcttcctatttaaccagattacccgaacatcattcctagacctacacgaagtatggcgtaaagtcgcatgcccatattgcgaatgtgcacgatactgatggcttccgatgcacctcgagcatcgctcccgtcatgtagcacgacagagtctagtgcaaggagcaagtccggcctggagaatgggcagtatctatttgggcatgagggtgcatgcgcaagtatatcatagatagtcgccatcccaatgtttacactatccactgttgctttgtgaacagcggatggctcaagtagcatagctgcacaccgacaatagagcccacaaacagtctcggaccactaaagctggtatgcgaaatccgcttagcttccgttggaagataaaacaacgagggggctgcgggatatgggaacccaagctactgattattagggtgttccccgggtacccttatctgtgggcactgttcgtttaccagtagcaacgagagcctcacttgtgaaggccgcacgatcttcgcgacactgtataccctcattatattgttcacactcggaaaaccgttttaatgtaataaatgcgccatccctctttttttgccgcgtaacaggggtatcaggagtgacgacttcatactagtcattctgatgcagcgatgaaaagccacccattataatatatacacacccttgatgcagccaggtttactacgagtgtttcgtgttccgaaacaaacggggctcctttcaaactttggatgccagcatgtggtctcagtttccataggggcaacgtaatgacacgcctccactagtctacgatgctcagctcacacttgactcctgcgctgagcatatttatctgcacacttatccgttgattcggttgaaatttacttaccatacaagcaatgagtatacgagaggttcgcttccatgtggcaccgccgctactgatgagtgcagctcatttgttgatttgaggaacggcccgtctctacgcaattaggttttgcttcttcgtgcatgcagttccctgaggatgaaacaccacatgccttatcgctataatacaacccctatactagagagtgtacctgttttttagagttatttcatagaaaagctctcaacagcacgtgaaacggccaggagttcttcctgtgggagacaaattttgtggcggttttatgagtgacgttcgcttgtcattgcatgcgcaacaccgatttcgagtggcaccgaagacacgtggacttctctgcaccactacggtcacatgtagaatcttgttttcttcgagcctggactcattgttccttttcaaatgacgtgcttcccttttcgaagtgcgacagtgctgctttctctctcggaatgcccgccgtgtctccctgtagatcgcgttcgaaacaacgccatattctctagctatcttcgtggacgacacttctcaagatccggtaactttgtccgtgcgcttttggtggtggttattgttgtcgtcttgcttgaggcgtatgatgcttggaggtctctgtgcttcagaggtgtgcaggtcgtttcagcgcgtctcgtaaactcacgaatgcgtttcttctttccaccaagctggctgcaaatttctttattgagtgacatgcgccccaccccgactagaactaatgttcctacctctaacacgtgctgagaccttcacttgtgcacaatttgactcaccagctcgcgacaaagtccacgcaaccactgccccccatccgtcggctacaaacgacatctcgccggagatcataagggtggctactgtaattcagaagaatcccgtgtatgtacacgcgtacatgtgttagattggatagtggttcacagttgactggaaggccgaggcgtgggttgtctttcgtaccccgttgcacgaacgaggtagtgtccgtgtcgcctccgaaagcttgaccgtgtgtttcgacagacgtcaacaagatccaaattcgtggaaaaaagggacaa

SEQ ID NO: 671 - DNA, 2413 bp, Toxoplasma gondii
  source 1..2413: mol_type = genomic DNA
cctttgaaaacatcgcgaattctcccaactggctccagaccgacacccaggcctggaccgcctctcctcgcttcgtgagtcgacggcctggaaacgcagaaccgccagctgcagagagagaagaagaaggcgacaaagcaagagaagaagagcggaggggaggagcagaaggagggagaggagaagggagcggaggagaagaaagagaagacgaagggagcggagctgcagaagaagaaagagaagaggaagggagcggaggagaagaagaaagagaaggcgacgctgtggggggagggtgagaggctgccgccgcgtctccactgagagtgttttgcgctgtctctgcagattcgctgaggcacttgaacgtaatttcacctgaaaggggagacggcgaactcggttggaaagaattttgcgagtcttccgccgaggtatttcggaggggagaagccgagagagccggtgaggccacagaggcagccgaaccggaaagaagggcaccttgagaaggagaagaagcaagaggaggagaagatagagacgaagaagacaggggagaacttgctagattggcagacgctgcatcgtcagaacagaccggctgcatgggagcagaagaaggaggagcagaggagacagaatggacagaagaagaaatgtttgcgtccgagagaccttgcgacgactcggcaaggtcgtcgcgctctgccccctggggggtaccttccccagacggcaacaccggagacgccatttgaaaacaaagagcgaagaagccgaggaaaagaggaaaagaggaaggagacagaggtgaaaaggccagacaggccagagaaggacgaggcaagacagaggaagaggggtgaagaggaggcttctgaagaggcaggaaacgagacaaagacttcgacttgtgttttggtggaagcaagcgcaagggagaagggggatgaagaaaccttctttttcttctatctcttctctttctgccaatggctcggacggccaagtctgtcctttcgcaatgaaaaggtctctccgctgtacagacgcctgaggtcctcccgcctttttgaacgcgcgtgccctccacagcgtcttcactctttccagcaaacgtgtgaggagcgaggcgaacgccgttgaaacgaaggaagtggagtgccttttaagcgcaggtctgtttctctttcggaagaaactaaaaaggcatctctctgcaggggtgaccccctgcgccttcttctgccttggaagagaaaaaactcctggtttttctgcaggcctcaggcgtccttcccagcaaacgccacacagtcagcctttacacacaaaagcgaacagattcagacctgcacagaaggtatgttttcgcgctcgagaagaatgcagcggctcgcgcccaccggccagctgtctcatgtcgccatgtgtgtaccgactcgctcgagagcatgcagagaaaaacagccagatgccgccacagacagatatacaagtacaccgaacgtacgcgtttaacgatgtgacgagaaggcatgctctttgctagcgcctcgccttcagtaaaaatgaggtacagacgcggtggatatgcgcagaacagagaggagatgaacgatagtgaactcggacggaagcgagagagaagagaccaggcacaggagttgcgaaggtcgattcaacatgcgccgagaaaagaggcccctctgagcgcgttgcgtcgactctgcaaacaccccactgagaaatcgttgcgttttctagtttggtgttctctgaagaaaagagagaaacgattttcgtcttacgagagggcggcgaagatttctttcgcgcctgtcaccgttccgttgcaaggcggacttcagctctcttttgcgacagtctcacatcgtctcgactgttcttgcagcttcattctcgccgggtcttactcattttaagcccatttttctgcatttcttgtcgggtatagtcctaaaattcacacaacagagacgtttttgagtcgtttaaggctcgtcgtttcctctcttctccctcttcatctcgttttcttcatctcgttctcttcatctcgttctcttcatctcgttctcttcatctcgttctcttcatctcgttctgttcttctctttctgtctcttcttctctgtcttctctctcttcttctctgccttttctttctctctcttgttctctgccctttctttctctcttttcttctgtatccctttttttattcattttcctcgtcctctcctctgtctgctcgattctcttctgcgtcgtttctctcctttccttttctcctctctcccgcacatttgcctccttctcggatttccttgctgcccgctcgtcggcttctttgccaagcagcagcgaagtccgaactccgaga

SEQ ID NO: 672 - DNA, 2426 bp, Toxoplasma gondii
  source 1..2426: mol_type = genomic DNA
gacggatcaaacggtttcggtccacgggatccttcttattgttttccttggccagtggtgccgtcctctctagtgcagagcgggaggggtcacctgtgttgggcgccacccctggctctgtctttccttcctctttaccattcgtgcccctttcgatgtctgtttcactgaagccataacgcttcgatgaggcggtcttcatctttctttcagtagcatcggtctctgcaagctccaccgcgatacgtctcagctgttgtttaacagaagacgcacgatccatcagtaactcgcgtacgctctggtttcgctgctgaatcgcgcgtgccctcttccttttacgatggcgcatatatagtcgaaacacatcccggagtccgaagactactaccagattaatgagcaaaacgaggcagtgctgcgctataggaagtctgtcgcgtagcgcattcaaggtgctgtcagtctcggccgcaccgggagtggcggcagcggtgctccattccccagaatggacaaacggtagagcgacagtcgtcccatcgtccgctactacataaaggttcacaacgcggtattctggagacactgcattcccctcctgcgccacactgcggtctcttacaggcggaggcgcctgaaaacttcttgaccgaagaatgtcgtgccgcatggcacgcctcaggaccgctccaacgcgggtactcactccagcatccagcgctatcgaacaaaccaggaaaaggaggaacaaaaacatgagcggtccacaatgtgacagcgtttttctatatcgtgatacatacgctgtcccacccgagcatggggtaggcagcctctgtggtgacagctgcatgagaccgcacgtcccatagctgcagccatcacctacaagcgacgacggcttcgtctgcatcatgtttttaacatttataccattcaggcaactcgcgtaaagctacgcagaagctctcgaagtcattggtacggcagtgccgaaacacggttgaaaatgatcgcatcacgccgaacaagagaagcaccaaaaccgagaatgcacgtgtcactctcggccatgatgcttccctcatcgtctgcggattgtgctggtggtgccgctgtcgttgtatcgcagtcgtcgatgcagcggcagagacggggacactggcggtgttagaaccggttactgaaaaagcctttcatgaatatgccaggataagcaaggaatccaggaatcttgtcggcgggtgtacgatcaatagagaacgtaaggtccgcggtggaggagactagcgtgttacgcccactaccactaatgattaccttggagcaaagcaacgacacgttgaaacgctcacggaacgaataaaacattgtttccagatcaattcagtgagatacagcgttaacaattgcacggatgccttcggagccgcatttgaacgaaaaaatcacaacggaatagtcgttcagttgcagtgaatggctgcgcaacgcttcctgcagctcatgcatcccgcatgtattgaacacagtagcaacgctgggtttagaaagagtgctcaagagccaagcgactctactgtccaatacaacggcaagaaatgttacaactgcttgcaagtatgaaaagaactctttcggttcaacgagaggtgacacgatcctcgatagcggtcagcgcgtatcctcctgggaggtggagcttcattccgtaccgatacataccttcgaggaggtggggggcgttgagtgttccatggcgggttgcctagtagatggcgcatttgtaacgcgagcatactctgaagttgcggctgagatggtatttcctagaaaggtagttccatcccgtactgtattttacaacaagtgaacatgtttggtgagagagacatgataacgtcgttagtgatgcgactccgcctctgtaactccaccgaaacgtttcgccgcggcacactttccaaggggccgcaaagccacaccaaggcgtttgccataaatctgggcgacattttgtgtgaggacttcgaccaaccagacatccttcttttttcgtgtttgccccacacactttttagtggacatcagaagcacaaggatcttagcctgagatgagagggattcgagtttcacggggcacgtagagcatgcaacgattatagtgagtggcgtgccagacagaatctgcatccaaccaggccgaattcacatcatgctatcgtctttctactacaatggctccctttccttcattcacccgacacagggctgttaaaacgattgaaagatgaattttgaaagcattttggtcacatgcttttgaatggagatattattgcggtgtcgagcaacacaagacagtccagcaccgactcccggtgcgggaacacagactgttccaagagagtctcgcaaaagaa

SEQ ID NO: 673 - DNA, 3795 bp, Toxoplasma gondii
  source 1..3795: mol_type = genomic DNA
ctctgagagacaggcaagacgacagaaacctcggagaaagtcagacgccgttcaaaaaacaggcacacagagatccgcatttgggggattcgtcacaggtcttcccacaccagcgcaagctcctcgcagcggcgcaaacgacctgtcacggtgtacatgctcgcgtacgtcgacaggtgtatcagcatgcaacggagacagacacgagcagttggctgtttccttaatagctcgagaaaggaatgaccgagccaaaagcctctctgtcatttacggggaaaaagacttcctttttcggctgtggaaggggggtccacagaaagagcagaccccgtacactacgaatcagaggcctatcctgaaagtgcgttggatgcgaaagcgaaagggggccgtcggtgtgtaagcgagaaacgcgcgttcaacagagttcactaagaaacactgaacagacgtggtgacggccaacatcagcctcaaaatgcggtggagtacgaccaatgcagacgcagtcgagcgaagaggcttccaccgcagaaaatcgggtgcaacgtagaattgtttcgctgcgactgtgcactctggtaattcgccattggacacacacacacagacacgtggactctctgtgctgaacagaagactgttcgtcgaggagccgcacaccgtaatttcgctgtggcctggctgcgggcatttttgccattcctgatatttcactgacgcgccggtgacagagacacaaacgaaccaccggtttcggtctcaggaactgtttttaccaccgcaaaaaatgctggaaaatacctcgtagtgacctcctcgcaagcggtgcgcggcaatacaaaacttgcttacttgttgccacgtcagcagccgccattttcgcaggaaaaacgaaagagtagtccagaaacaagcgcgggtggcttttctaagaaaacgacaaagtgcaggaggtgaaaattccgctccgaaccgtgtgatctcgcactggaggacgggaaaagaaaccggacggggggggagcctgccctgtctgtcaggttccgtacacaccgaggggacgaacaagtgcaaactcgcactggagaaagaaatatggcacaccgcacgcgagtcgggaagaaacttggaaaatacacgtcgatgtgaccggaagtccgctgttcattgccagcggcagtggtagcagaacgggaggcgtttgctcgcgaagagcgtcggctgcatgcatgcatgcaaacggtcaccacgccagcgacagatgcgacggaggaaaccaacacacaaggcagagaggccaaatgcatgcctggagaaaccttcactgcgcttagcacaaccggcgggtgcatctggaagcacagagactcaagcaaccgtggatggaaaagctgccccaacgtcagacagtgcagtggtactcccgtgtgcagagctccaggtttctgacgcgcgactccccggggtgcactgggtgagctgctggaaaaagcctttccacagacacgctcggatgcacgaagcgcctggagcgtgcagttttggggaccagcgtgtgtggtgcggcagaagaagacgacaccattgtttgaatagaagcagacgactcgacggtttctgtcctcgtgtcttgaatacgcggggcgaagtgggtcgctggattgcctttggggatccaaccatccctcggagtgaactgtcgatgacccgattcgatacggaggtgcataaaagctttcaggaaacagcgaaatgcacagggaggtgcctgggacggtaatgggggttcctctcgcttctcttgtgtgtagatactagacacggaatggggtctggagtcggcctgctctgcctggcttcataccgtgtagacggggtacggaaaagggaatccatcccctgttgtggacgcaactatcatatgccttaggtttgaaggatcatcgtaggcacttcggactgtggggagaacacagcctttaatccggtaactaatgagtaatgggtatgagctgaggcaagcctggcaacgatctctcgtccttcgttgttgcttgggggccgcttcagttcttttgcaacacagacaatacgcctctagtgtgcaaggcactttttgacgtcgccgctgacgcgctactgagcggcaagcagcgtggcgtaggcattggtcgagagtgctttccgacgcaatttcaagatcgttgatgacaactatatcgtttcttattccctctcgtgttagtgcttgaaggttgtatatgttgctgcctagattcacgtccacatcgtggaagtgggctcctcccagcttctgtgagcgatgcaccagagccatctcctcttctgctgcaaaaatcacaccattcttcctgttactcgaacacctgaggggtgaccgcgtttttgggtacgaatttcttaggttcatcgagttgtgtatggtacacttccatccacagtggctctaagagaaacacgccgatgggaatcactgagcccattttgcctccccttgaatctcgtccaggctaagtcaggcgtcccggttgaaaccacaaagagaagagaattcgcctccgttgtcgccggctttgtcgagcgctcacttggcacaccatcagcagacaaaagagatcacactaacaagtggtaagattcttttcgcttgctgctattgagttgtttccgtttggatgcgtccttggcgaggcgcacgactgccggggcctgccgcgtgttcctggctagagcaaaagtgctagaaaaagttgctttatcgtgtatgttttgtttttgctcatccgatgccagacgctcatacatctcacacatgtgggcaagaaacggaatgtatcgtctaagttgaattcagacccaacatcggaactaaccgtcacgggactaagcgcataatacggcttcgtacaggacatggtagaaggatgaggtgcatactcttttaaaggaaagaaaaagtactgtcatgcacttttgcatggggtttggcattgacaccccaattaaacttcaactggccttcgctcagagggtctggaggagcgacggaggaaagaggttgcttcgtcggcccagtggagtcccaacagatctcccgagctggctagtcggggtggaaaaagagaggcagtttgtggcgggatcgaggaaaattctcatggtgcggcagactgggacatcattccagtttaaccgtcccccttaatatttcggataactgaagcattagtggcgacggtgtctgccaacttgatgggggatgcatgcactctggagggcaggcgggtacaggacagactcgttcgctttttcgcgagtcgagtttcggtacttgtgaccgggaaaagcacttgagtctctaaagcaccaggatccaatgtttgaccttctgcaaaaaaggtttcctcctctgaagaaagcgtagaaagtgtgccggtaagcttggcacggaaagtccctcggacacagcagcgcgctaagctcgaagcctgctctgcgtggctgaaagcgtgctaactctgcgctgccccacttgtggtcccatgccacagaggaaaccaagaattccctttttgaatatgacggaaggtcgtgtgttcccatgatgctactattcgtgacggaattagtgtaaggaagtccgagcggactcagttcccagctccgtcttccgtatggatcgcccgcgaaaaccgataccagtttaagccagaaacctttatgtggagcagaaagtcaaagggccgaggtaggacgggctggcgcaaa

SEQ ID NO: 674 - DNA, 1960 bp, Toxoplasma gondii
  source 1..1960: mol_type = genomic DNA
ctgagagcggagaaaagcctgcttgcggaagtgacccacttcacaagccgggttcgtagcaccatgtaggacgcctggagcgcaggaagtggctttgatatgttttttccgccgttaatacgccggatagcaggaattcatatgtggcaactaaaatatacctcatgagaaatggcacattggcgtcttacgatattggaagccatcatgttgaggccaatcaacagtgcctgtttgatgcgttgcattttgtcgccacggctaggttgttctttcgatgagctgtcatgcgatgtccttgtttacttcatccaaattctgttgtgccagcttgttttgagaacactgagaacatctataagtccattctgggcactccttgttttctaccggtgtgctctaaatctaaatccaccgtattattattgttcctctcaaacaatcttcaggacttgtgaattaaacaacacagtaaccctaagaaaagccagaatggactatctcaaaccttcatcctgctgctacctctctaactgcatgttgaacgcttgcagatgcataaggtgcttctcaaatagatctgaatgctagattgatcttatggaatgcacacatcaatgaaactaaccagtgaaaactgtaggatgaattaaggcgctggcgccagttcagagtcccagacagacgtccatttgaaggcagatcgagaaacggttgtcgtaaggggttgttctgaaagcactttgagaatgaacgaatcctgaaacaagtgaaggacgttcgggaaggagcgaaggtatgccctcggctggttccgagttgtcttgtcgatgctcacagacaaagcgttcctgtaactcctcattctcagacattcgtcagccgtagatccaaacccgcgcaagctggcaatgattctacgaggcagctcctgacaccgaagtcgagagcaggggcgaggtctctttgccaagctgttttgctttctgttgattatgggttctgccctccggaactcaactgaaacgacttacgacgtgcgggttgaaggagcagctcgacttccacaccgtagctcctacacagagaaccgaatatccggttgccttatttacacccgaacacaaatcgttctttcaaattccgacagcgcgatgaaattccccgttctccctgagtgtttcaaatgctctttttcttgagaggcgcggtatgcgcggatgccccggcactttctgctgtgcctgcgtgcatgcactcattgggggccgccctccaaaaatcgggctttctcgaaccatactgcaaggtgtcgccagagcattagaccgcattcactttcgaagggtttctcgagacgaattctgggcctgggcatgcaggagtacgtgtgtagttctcatagaccttttttcgtggaaatctggtgaccttcgtagtcgtcgcgagcaagcccgtgagcactgactcccctgctgttccatagtcggcgttcgatctcgaagattccagcgcaggtcttctgtaaaacagcagtcgtcacttcttcttgttgccgtcggcaagctgatgcatcgtacactttcacggagaaattctgaaccctttctgttccagagtaaatacgggattcgtgctaggtcccttgagccaccgaggcaaacgtggccgcgggacctttccccttaacacgggaaatcagcgggagcgcgtttcaggaaatcccttgtgtctgttcccttttctcccgacacgccccccgcatgcacacgccgaatgaattgttggtcaaaacgtggagtctgtccgttgtcgaggcaacggttctgcctgccagagacgccgtacagtgctgtttctccatcggtccctgtgtaaatgcttggtttctttgtcttcagaaaggtcttttagacttcgcatttctggagctcttcgacttcttgtccaggaccgaaaa

SEQ ID NO: 675 - DNA, 1896 bp, Toxoplasma gondii
  source 1..1896: mol_type = genomic DNA
aaaagctaacggaggaaaacgggaaataacgtagcaaaaatggtcgtgcggcctcggcgatatttgtgcgttcccgacctctcttctctgatgttgtcccactttctgtcgagtgtgtttaggtggcattttctggagctcttgtacagtttggccttgtttcgtgaaatccttgacagaagccacagggatagcgtaccgttgctccgagaggagaagttggtttttatattcagtggttgcttcgctgttttacattccctccaggactggtggcagcctgagggtgcgcactttggttcaactgcttgcttgaatgagagcgcgaaaaacgcattctggaagcaatttcaagctgtaaacaagacccttccgctatttggaggaaagtctttgcgaacgcgattgcagaaaaatacacacatcgacaattcacgcttcatagggtacagtcaaacctggttggtgccaggatcgtggcaacacaggcgttggaagctgactgcattgattaaaaaatagaacaaaacagagctttcaggcgatggtcttattcgaggcttggcatacgcagttccagctctgtccacgaaaatgctcaatctggcgggctggtcattcaacaggcgaaagaaaacgtcgcaaagtggtgggagttgtcctccagctgagtgacacgtgacgctgcatccatgacagaagggaagtcgagcgtccggagtccaagcgccgtctgcttcaacaaaactctggggagtgcgttgtgtgtgacccgtgaactgtttcgctttagaaaagaaacctcagcttcacaagccgtgctgtctcgtagctacccagagaaatgggggattcagaaccgtcaggcgttccgaatgtctgtgctttaagaaagtgagaagcaagaggccgccgtgaaaatcggacggtcttggaggttcaagaagtccttccaatgcggcggatgtggctggtgggagcaaacccaagcaggcatccagaacagagactgttcgatatatattctagaaggggatatgacagagatcacccttacccgtttccgctctgtttctacggctagtaaggaacacggtgtgctgtttgtttcgtctataaaagaagagttcgacgacccccagagagtgcgctctacggcaccttgtccaacctacaccaccaccgaagccagaacaggaaaactctttatagtaagcacacaatggtgggggcttaaggaaaataaatatcgcaaacgctgattgggcatcatgcgctgcagatgtagtccctagttcgactccaggctggaccgagttcttctgtttccaaataagtaaccctggtcaacgctggttgttcagggtgaactgaacattccgtcaagaaccttcccgcctgatggtctgtccgttcctttctcgccctcacaccgaggagcaaagctcgtatcccaactgttagtcaaggactgttttctgaccccgcaaagaatgtgcatttcgcgtgttcgctgtattcgtctgcaccactgccgctttcctgcataaggagatgccaggaaaaacggggcgtgtgccaagaaaaaggagcttctgcatgcaaagaaatttacgacgggctggcggctgcaagcgactgagttgcaccgcggcttgcttgttgggcatgtgcggctatgtgcaaaaagagtttgcggcaaatacgggacttttcgaaattgatttcgactgagtttctttgcgtcttcaaaagcaaagggtcgggcggcgactccttggactcccgtctccagactttccaggcccatcgagaaaggcgtgttttcgagcaataaccgacccagacctccttttgcttcttggcgttaccccagtttcgtttcacctgaatgta

SEQ ID NO: 676 - DNA, 3346 bp, Toxoplasma gondii
  source 1..3346: mol_type = genomic DNA
attcaaagagagagaggcgaaagtgatcgatagacgtttccgttcccaccccaaaaagacctcgccatcaagcgcgcgcgtacgtacaccccaacgtcttgcagacatacggaggaccagcggcacagcagcagcgaaacagccttcccgtttctctctctctttgtctcaaaatagagggagagaaggccagcatgcgtgtatagatgctcacatccatgcacacatttgtggctgaagatttctgcccatcctggttttgctctgttcttcgcgttctgttttccactgtgtttgtgtcttgctcgtttcgttccttcctgcgtctctcccgccttaaaactctgccctttctcctgcaggttttcgcttgcctaccttcccagcggtctcgtagatcgacccaccggagcgtcgagcgccgccgggccgcgcggaggccggagcagcctttgtcagctgtggcgacattttttccagccgaacgtcggacagcggcgctgggagaaacgccggagagggcacaaacgcgagctgcttgaggcttgagaagagagagaacgcgacggagcacacacgaaggcaggcagttctcagaacctacgctgaggagcggaaaagaccggcgaagcgagcagagaagccgacgagaaagagaagaggagctcaacaggagggaagaaggcgcgagtcagggggaccggacggcgcctttgtgcgaagatccgtcgcagacgagtcgacgaagatacacagtcgctcgacacccttcttcgacaaaggcgagggacagtgaagaatggcctccagtttttcgttaaaaaagaacgagagggcaaaacggaagaacgggggggggggggggggaaccggaagggcggccaaagcagtcttcgacagaggtcggtgcgttaccagagttcgagtgtgcagtccaccctgcttccctccatttctccttcgccgttacttgtgattcctcgttggtgtctctctttctctcgctaggaagagagacatccgctcgcgttctcagcgcctctgctcgcgtcgctctttaaccagttgtaacgctacagagagagagacgcacacacacatacacacagagacagagagacagaagcgctctcggagcgcaatctgcgaacagaaacttgtccgagagcgacagtgcggaggcagcagtggcgagaagaggcgaagaaaggcgaacgagaagaaaggcgaacgagaagaaaggagagagagagagaagggagaccagagctcgaagggggatccaagttgcatgcgcgagattcctttggcctccttccgagagggggtcggcgcggtgtgcagagcctccgtcgaggagagaaacaccagagaggaaaggagagaaaaaacgagaaggaatgagaacagagaacatgtaaggaaaaactcaaagggggacaagcacaccgcaagactcaagcaggaaacgtcacagaaagatggtgacgagactggacaacggctggcgaattcgacgcgcgcgacccccccccccgacggaaaagacaaccgcgagacaagcggcatgtctcttcaagaaatggctgcctctttttcgcgaatgcttcgttttttcaaagagcgttcacaccttccatcaccttctctcgaggtccacttggaaagagaaaaagagagacagagagaacacagcagaacaagaaagagaggagaaaagagaaaacgggagagaaagggggaaacgcctgtattttttcctcaggattcaaccggaaattctggaaggaattcgagctttttcttgcgtcgacgcaagcgaacatcgcgctgcaaaagccgtcacttctcccgctctccctcactgcatcttttccttctcttccttttttccatctctctctcttgctctgtgtatcttcctcccttgctgtgtttcttttctcggcttctgcttccccagtctccatgctggtctccctcagggtcgaccggccggaagacacagcaaaaacagaaagtatcaaaaagatgtacagacatatttaagggattagacgcgtacacttcacttttcgacgcatgaatacagcctcgttctcaaccttagtcgacatgtatttatatatctgcatctttatatagagatttaaacatgtcagcatctgtgcggccagtggttcggcatgcagactacccaggtcacaaaatatgtagatataaacatgtcagcatctgtgcggccagtagttcggcatgcaggctccccaggtcacaaaatatgtggatttaaacatgtcagcatctgtccggccagtagttcggcatgcaggctccccaggtcaggaaaaatgtagatttaaacatgtcagcatctgtgcggccagtagttcggcatgcagactccccaggtcaggaaaaatgtagatataaacatgtcagcatctgtgcggccagtagttcggcatgcagactccccaggtcacaaaatatgtggatttaaacatgtcagcatctgtccggccagtagttcggcatgcaggctccccaggtcaggaaaaatgtagatttaaacatgtcagcatctgtgcggccagtagttcggcatgcagactccccaggtcaggaaaaatgtagatataaacatgtcagcatctgtgcggccagtagttcggcatgcagactccccaggtcacaaaatatgtagatataaacatgtcagcttctgtgcggccagtggttcggcatgcagactccccaggtcacaaaatacgtagatataaacatgtcagcatctgtgcggccagtggttcggcatgcagactacccaggtcacaaaatatgtagatataaacatgtcagcatctgtgcggccagtggttcggcatgcagactccccaggtcacaaaatatgtagatataaacatgtcagcatctgtgcggccagtagttcggcatgcagactccccaggtcacaaaatttgtggatttaaacatgtcagcttctgtgcggccagtggttcggcatgcagactccccaggtcacaaaatatgtagatataaacatgtcagcttctgtgcggccagtggttcggcatgcagactccccaggtcacaaaatatgtagatataaacatgtcagcttctgtgcggccagtggttcggcatgcagactccccaggtcacaaaatacgtagatataaacatgtcagcatctgtgcggccagtagttcggcatgcagactccccaggtcacaaaatttgtggatttaaacatgtcagcatctgtgcggccagtagttcggcatgcagactccccaggtcacaaaatttgtggatttaaaca

SEQ ID NO: 677 - DNA, 2498 bp, Toxoplasma gondii
  source 1..2498: mol_type = genomic DNA
ggggcaaaaccgtgttgtgtacacgcacgattttgtatgttgttgcgttctggagggggaggggtgaggaacatgagcgtggaacgctgcctcccccatccactttttcacggcagcatactctccaaacactcttgccgtttaccaagtgtctgacagacgtttccgaaaaaatcttcaggttgtgtgcgtcactggtctctggtcatgtcggcactggagagcgagagcaaaggcaaaagaccgcaggactcagtgtttccttattgtccactgtttctcgttgtacacagtgtgtcacaacgtgtaccgcatggcgtttctgcgtgcaaacactttttctcaagcaagagcactttatcgtgtcgtttccgtcaaagcccgttggtcctcaaggtggtgtctgctgcagcctgtctgcgatgtctttctcctttttaatcaatgccccgatccacgcctggcgagaccggcaccggaaagttacgggagaatcagagcagcaaaaggctcgcgttcacctgcaacgggattgccaagcttacagaactcgctgcgctttcggggggaagaacgctgtcgaacgacacacgctcaaccgaccggttttgccgatgagaccatggaagtattcttagagcgatgcgaccacatggtttagctatgatcttcatgtcaccacattatacgtagataggtcgtgtctttgcacaaatgatccgagaccccaaactgacctgactgaagaatcccagcgcagcgccaacagatgaaacagaggggcagagtgtaggaagatgaaacttcacgatacttgcaaatgctgtcggtgtgtcgtttgtcaagaaacgattcaccaaaaaaagatgcttgcttttgggtgcgaatgctgttctaatgtcggatatacaggaaaacaaaaggctgcacacacgtctacgtgcactgtagggggaaatatacttcgcagagcggcagaaaaaaaagaatggcaattgcaaagatgcattatattgtgtcattgccacacgacagggaaaagggacgttcatgaagattgtgtaacagtaaagaagccatctaaaagtgaaaatccggtttttcacgccccctattattacatcaccacccgaagattgatcgtgcgtcaggcgagaagttcttcagagaaaacgtctccgtcgtcggccggcctctgagtgctgagaccagacgagatatcagctttcatatcttcgtcgagtggatggacctacatattgagtttcagacaaaacaccgatttcgctccctttttctccttcttttttccacttttctgacgggacaggcaggaaggtatgagcgggtctgacattatcttctgctctttggtcgatgagaggcgtgtctgccttgagtgcattgcatgatctacacgcgtttcattgcggaggaagcccccacgtatatatttcgcccttccgattaccgcggtagggaggtcagagcggttctcttttctcatttcaagaaatatcgcttaagtcaatggaggcatgactacgtgggcaaccacatctcgttcccttcagacgaacagtacttgcttggacacctgcctttcgattcccgatatatagcaccaaatgaaaattactgcaaagaactcgttgatatactgttagaagttcttttactcagcttgtgattgccttttgtaagacagtcaatagccttggtataaagcggagagtggagaaaccgcaaagtttctggactcgtcgaattagtttcatgttcagccaacgcatttcctgactcgctccgagttgcttaccccgaaaggttttagaaatgaagcgttaatgtcgtcttctaggtttttgttaagcggcaggataggaatttctgacaacgtttttgtgccagagacgtcttgtgtaatgggagttccctgtggctcctcggaaacaaggtccttttctgtttcgcgagtgccaaaactggccttttggaagagttcttctacgaagcttttagctactacagtcagtagatccactgcttccgtagacgagttttcttcggccttactcgagggcatttcttgatggttttgaagcgtgtctttttcgcaacttgactcctctgactgcggagggtaatcagagttttcctgtctcgttccttttcctggagttccattctctacatcctgtgaagattgttttgccacgtcggtaaaacactcgtctccctccccggtggacgggtcaccaaacccacggtttgattccgatgcaggttcggtcttttcttcggatgttttcctgttagaacgttttgcgtcccctgcttctgcaggtttgtcgggggttttcgatggctgtacgcaaacgtgcagggtctctggaggatcagccgaccccgctcgctgtggttgtttccgatgaagaaaaggcatgcaacaaactaggcaactgagacgttttttacctccatacgcgggctcgaga

SEQ ID NO: 678 - DNA, 2457 bp, Toxoplasma gondii
  source 1..2457: mol_type = genomic DNA
cgtttgctcttcactccagacactcggagctcctgttgtccgtcgcctctcagtctcgaggcctgcgcccccatcgctcgcgcgtttttcgcaggctgcgtggacgcagccagcggcagaagcttcacattttcaggtcgcttctcgaacctgccagctggcaagtcgttgcatgcagccgcgccgagctgggatcgacacgcagccgcctgcttgccgcgcagcagagggggagaagaagacctgaggagttccgcttcgtcagtctccaagagctcaaaggcagaagcactctgcgcggaacccatagcgccagcaacgaaggagaccgagtttcgagagaaaacgcagaacggccaagcaacgaggagcgaagacgcaggaagaaggaacagtggagcacaggtcaagacgacgacacaaagtggaggggacgacagaggagactgtgaagaagaggcacgaagaagaaacagtggggaagcgaagacgaagaaacaatggagacagagaggcaagtgactgcgcaaagaagttgcacgacgctacagaagggagcagcagcttggagggaaatcgattgcaggcgcagcagacgccgacgaggctactgtcaagggggcggaggacaaggaaggaggtcagcgcgtcgaggacgccaatgcgagtctcgcgatatttttgcttccaggaaaaaggaccaagaagaaaaaagaaaaagaaaagaaaagggagacgggagaaaaacctgcccccgaagaggctgtcggagtcatccccaaggaaaagaaacgaaagagaaaaagagaagacagcgataaaaacgtccttcctgtcgtctggacaccgcctcccctccccccggtgtccctctcctcccctttaccctcctcctctttctcaatgctgttccacttttggtacagaaggattttctggatcttgcgccatccgaggcttcttccccatctactggccaacaaggagaaaagcggaggccgccccgctagggactggagctcgccgacaccagaaggaccttcggagaatcctcgctgggagtgaagaagagaggtgaaaacaagacgcgggagtccaaaatgtaggagaaacgtgtacagattggacagaggttagtcacgactcgagaggttcgcttggcagaagcagagagacgaagaactcggcggaagacgagtatctgggagaagctcactcccgcgtctctgacacactgctaccatatctgtctccgtgatgaagaacagaagagccaacgaagcaaacggttctttgttcatgaatgcgcaagctgcactggacgcaaagcagcatttcgagcgcgagtgggaaagccagcagcttcagccttgtcgcagcggaacttgtaacgagtccatcctgcacaggcaccttttgtctcgcgagagaggaaaaattcaagcgaagccttcggagctgggaaagacgtgagaggaaaaaaaagggctatcgtggcaaaaaagagaaaacgcgagaggcgtcagaaagccggaacgcgcatatctttgagtggcgctcccctcccttccgcattgaaatttcaacatcgaggaagcgcattcaacagcaccacacacagacgaaaagcgtcgaaacgaaaagcgagagaaaaccttcttttctcccgcgctagacctgaggaatgcgtacaaaaaaagcgcgcgggtgtttttttggctgacgacgatttctgatcggtcggatactcgaagagacaacgtcactggactctgtgccacagcgcgatgagttttctttctcgaatatgtggacgcgttccccctcgatctgcccggcacctcctccaagccgactgccagagaagtgtgtttcctcaaagcaagtggattttagagaaaaagagacgaaaaacgcacagaaaaacccgagccggcacttagatggcgctgcggtttgcgcaagactagcttcttcggcatttgccagtctccatgcagcggcaaaccgggtcgacgcgtgcaagaaacgggaacaagacttgctttcagatttgcaatgacgaaacgctgaattctcgttggcttacgcggaacacgcagccgcaacgtcaacaaagaaatccacgtttcgtcagactctgcagcttgcggtgagcagtcccgtgcatcgacaaaacgaggatcgacgcgaaaaaacggcggtggcagaaagcacagaagcgtgatcagctcccactgaatgacgaggagtcttttgccgccaacaagcaaggtgcaaaccggagaaaaagcaaagttttcggtgttcaaaagaaacggagtgacaaagctccctgcgagccacgggcgcagtgtacagacacccgaggcgattattgttgaacccgcgcgaaaagtgtggagcgcagtttgggaagacttcggacggtagcaaacgatcgtttgtctcgtggaa

SEQ ID NO: 679 - DNA, 3590 bp, Toxoplasma gondii
  source 1..3590: mol_type = genomic DNA
ggagcctgagcaggtccgcaagagtagtaaccataggacagatcttgagcaccgttgacagaagaggagctggtcgcgtcgcctccaaagagggcactctgctcttctgcatccccaactgtgtaggtgtatgtgtggctcccggggacgccgtggcctgtcaccccttggggcttctctacatccactgggagcctcggtgccgagacagagccactccacgggccttgtgaagcgcacatcgagtcagtcctatcctgttgcggacctgaagacgctgcaccagtcaacgtccccccaggcgcttgcggcgcggtagcggcgccggccactgtgctgcgttcggtcacatcttcacccgtctgctccgttccttgtgtttgggtgggtcgctgctcttgaggcgagacgcagtcgacgaagatctgctggcggatagcttgtctgtgagccaaaacgtctttcgacgacgaggtccgatccaccatgctgtttgtctgcgatatcacatctgcatgcgttccgtacgcactcacatgagagcccgaccgaaagatcggccctccctgagagagaactggtggggaagtctcgttgctcggcaagccgtaataactgcgtgacgagggatactgctccttttgagaggcgccggtagctgcgccgaggttgggcaccgaagccacaggcggcaaagacagcgcctgctggagctgcggatctctctgagcatagctgagtgacgtagtcgccagctcgggaagtggaattccagagccggaggcggctctggatctggtgccagatagcgtggaggacgcagccgttcccgctacgctatagagacgagctccaggaactccttcttcaggcatcggagtcgacgcctgtgaacctgtgagcgccgtgtgctttgtcgagtgctcagcttggtacatgtgcacagtcttgaaattacctgggcatgtaacgcacatatttcagatgaaatcgattattctccgcgacaccctgatcgggtgaccagagagagtgctgttgcttcaacatgcgttcgcagtgtcctaccgagatgcggttctgttcaagacgctttctctacttgcctgtgctcgaagacgacacgctggccgcgtccttgctttgggtgcccggcattacgtagcgatactcgtcatgcaggctgaggccagagaagaaagattcttggccactggcatctgcagctgtgcttgacgacgttgtcggtgcatggtggtagtacgactgctgggctgatgctgaggcggcgacgcgcttgttcggtgtcacctcgtacatggaagaggccgccattccacgatggtggctcgtcatgttgccgggggaaaagatacacgcagctgatgtgcgtgcagcacgacactcgggtcgatggaggcgagaaaccagaggaattcttggacaagacactggaaaatccaacacagacacctgttagatcgcagccaaaacgaggcaagagacggagagagggcagggtctgatgctcgtagaaacgactccggcaccagtgcgaagaaaagcggttgaagaacaactgtactgccgtcctcttcagccaaactaacgaattcagtgaacacagatgagaaaacaacctacgcctttgtcactgaataccctcagagcaggcgcgaggcagactggcgggtttgccgtcgcctgttgacggccggacacagccacacagtgacagatactggcaaaacgcgggttttcgtcgaaactcctgaactgcacacagtccagttcaatcacctcccttcctcggcgaaacacgcgctgagtagttgctcaattgtccttcggggagcctttcctggaagatgcagaaccgggatttgcgtggagcggtgtgcgtcttgcaactttggactttccacgttggcgcgacagcagaacaaccctggggtgtcaactatgtcaggaaagggaagcagacacgaaaaggcttcgtgggcaattattttgcgtccgaatatccggcgaaatcgacaggcaaaaattcagagctggaaaggcgtagaatttggcgaagtgtgcaagacacacgacccgccaaaagaagcgactgaaacgcgctcaaagctcgcgaactcgctagccacgtttcaacgtggatgatgcgcgttttcgcacatctcgtcccactctttgtcagacactgaacgcgtgcctcaggcggggccaaccgtccattcccgtgttccacgtgtgtgtggcgtttgaacgaaaaggcgtctttcacgcgcaagtcacaaggtgcttctgctggggctttgagacgggaaaaggaaaggctgtattcccgttacgcttggaagaacggggtgctacaaagggagcgttcgtctcgacaggttctgcgtctctgcgctcccctaacggcaaaacgtctcggcttatattcggagctaacggaccatcgcattcaagacacactttctcggctttgtcccgctcataactgcttgtgtcactacattttcacgatattccgtcggctggataacagagaaagaactaacctaccagttatttagggtttttcctgctttatccaaagttttcgaagcgagtcgtctgcagaagagcccccttgtcttgtagttcgccagacctgtgttgtgcccacgacctcttcagagccgtgagtagcctgcgactgccaggcagctactctgttcctcgcgctccgaatcggggcaaaacggacaggagaacccccataaagttttttttgcgctcaaaacgccttactgttttttctgcggagtctccaactcgcgagttgcattcagggcagtcctcgtgacactccccttacagatcgtcatgttctttggatctttgcgaatgtcttgtcgatgcattttctggtcttgaagcgaccagctggcatttccggtctaaaatctgcaagtctttctctgcctttttctgctgctccgatatcagattcttgtgtttggggtcaggcatgcgcttgcagacacaatccatccttttaacaacggagacgtggccgaaagaagccgtcttggcgctaagtgacggcttccgagttttaaagcttccataaatttccttgttcttcgtgccgatccgatgcacaggcccatatgtgacatcccggtgcccttgcccccactgtcttacatcgtgcgccgtggttcggggtttgaagatcttctctttctactgcacataccgatgcgttctggcaggtagctacgcgtgttggtccggctagatgggcatgtccgtatgctgccctagttgtgtttgtttcccagcttccgaagattgtggattcaactgaggtaacgcgcgggctgtatgagacattattcagcgccctcaagctttcttctgtctgaccgctttggatcttttttcccggcgcctcgcacggtgcgtttcccagcactctcccagccgaaaagatatatgcgcgacgttccttcttctgtgtctctgtttgtccgtgtcttcaacttctctccgatcctccaaagcctgtgtatctctccacgggtccgtcgaca

SEQ ID NO: 680 - DNA, 1921 bp, Toxoplasma gondii
  source 1..1921: mol_type = genomic DNA
gcgcaaaagctgcgaagtaaaattggacgggaacggttgcatgactacggcagtagacgcacaaacactggaaacgtcatgtattcttcctgtcttcatctatatctcctgcgctcgtataactgccacggtgagaagctctccatctccaatccaccgcgtgacgttccagctagatcagcaagtaggttatccttttcattatttgttcagagaaacatctgaaaccgggtagatgttcgaaacagtgctgcgtaaccaatcactggccccgtgaacgcaacaaaaacccatgtccccacaaaggtgataccggtgcacgggcaatactcatctcggtagcagcgtaacgcactacctcctcaccgcactttagctgcttttgcacgtgtttgttgcgtaactccactgtggactaccatagttcgtagtctgttggcgtacggcattccccatacggagtatctctacaactatgatagtcctgtcactttcgagttgtgttaacagtcgatccctaattgtcaagaggtcccataaaagcgtgcttcccgcaccaccaacactcgaagcattggtcactactgcatcgacatactagagctgcgtactaatataaattgactcttcctccactctgcatcgttccaccaccaatggtcaggtatcaataaaaacgtacgtgttggatggcggatcgaagctgatcaggtcgttgtacatggtgtcagactgtctgcctccccaaatgtagatcgtatcttcaagttggacaacaacatgttcggtcctggctgtaaaaactttgccatcgtggacaatgctgctgaaaaagaaatcaggaggtgaaagtatgcctgatgcggagtctccatagactagttttgacgattcactcctcgctgattctttcttcgagctggcctgatctgccttggtgtctgcaggctgttttgtgtcggcctttttctcaaccgccttagttgcttcagccttcttctcaaccgccttcgttgcttcagccttctttggttcctctttggttgattcagccttcttcggttcctcgttagttgcttcagccttctttgactcctctttcggagcggctttgtcagatgtctctatgttcttatcggctgaatctgacttgccggcgtccggctcatcagcggttttactcgccttcccaaggccaaaaagtgaccgcttcgcactctttttcttttgtttcgctccctcatcttcagtccaagatccatccgaatcgcccttgctgaaagcagattcagaaaaatccgagatatccgacatggtctccaatcaaaatccgcaatagccttccggcaaaaacccgatcgcgacagggtaaagccaccacacacatggcagctgccccgacagactggctaactcagctgcccgcaagaagaacaaagcatcaacgagagaaaaaggataattagcgtgctctcccgagatcgtttgtatgtggttgcggacccacagcggaaggatgggcacggttggttgtatcggggctgggaggcaaaaaccgacactcccgatagcgacgatacctacatttgccactacaaacaagcgtcgttgacctcgcgagacggaaaagcccgagacgaacgaaagaacaattaccctccagtttcccactgaatttcgggattgaggcgaagaaaaaaacagaacttccctgacacttcggcctcaccggcacgcaacatgcccgtgaagttggaaagctccaaaaagacagagtgtggcctcacgtcaaagacaaagagaaattagacacattaaaagcctcaaggtgatcgcaaaaagtgtggagtcctgtcgcctagaaagtgtcgatacgagacccgtctgcgtgagggccaacagctagtagcacatcgggaaa

SEQ ID NO: 681 - DNA, 3480 bp, Toxoplasma gondii
  source 1..3480: mol_type = genomic DNA
gaattcttgtttaaactctacccgttcattctcatgtcatgcatgcaatgaatctctgttgcttcttttggggcttctgggaatctctgacgttcaccaagctccgggcttggtaacgaaactcattctcggtttgcgttcggcactcgcggtgcatgcaagagaaatgaatcccttcgattggaacgtgcatgcagttcggactttttttcacctcatacaacagaaaccttttggcaaagaaaaggaggcatcctcactcgacgaaatcggttacacagttccgtggtggaggcctcgagagaaggtcttgaaagagaatgcccttcaaaaatctttcgcagtaacggcatgtgaagagtcgaaccaacttccacaaatgaccctgattatgcggcacgaatgtgtatctcttgggactgtcataatacacctttttacatgctactaaagggacagtgcacggattatatactttaactctaccgaggtatgagcagcctctagtggtgtacagcagacgctgtctctgttccactacctattcgtaacgtgatgttccagctgtgactgtcaaaaaagacacggtagaccttcggtccggtggacagagatcttcaggcttgaaccaggagtgcaacttatagtacaaaagccgcagcaaacggaagttaagcgacgcgtaagaatttctttcataaaatatgacacggggtccagcttcggttgttatctgattggtaagcatgccctgagaaggtaatgataaaggaatgctaacagcacagggtcaaaacgtctcggacgctcctgcaacattctattaacgtgtaggccactcctttcatgtggcgtccggcttgattccggatggtgatgaaaaccgatgacttcttttcctggagagaaaccctttctcagttcagcgcccagacgattccagaccaacgcagccgtatcagtggataggtgtgcgacactcttggagttgtgaaaaagcagaagggttctctagatcgatgtcacgcattttacgcagctcatcaagactacccgtgtttctgtaacagtgcatctctcgacgacagcgccgttctttctcgaagagaagaactggtgcggggacgtctaaacacgggactggaggttccccggggaaacagctgctttcttgaagaaaatccaatcctagtatcagcttcgccgctacgtatatgtttttacggtggaaaactgcagcctgaggaggtgtgcatggcaggagaaaaatccggaaagagagagaggaaatgaagagttctcctaggccacttgtatctttttcgcttcccctctcctggatacatgttccctgtatctgttcagatcactgcgtacttgttacgtaccgcccgaggctcacttgtcatcttttgatgacaccttcctaaggaaggatacatgtgcctggttggtgagtttctttgcggagagggaggaaggctagacaaaaaggagaaagacgtttccgatgctattattttcctggcttcctcgggggaaacgcgagatgcgtgaacctcagacgagaggcaaagaagagagtggaacggcagagatcgattacaagcagaccagcaaacacagggagaaagaaccaagctgatggggaacaaggtcgcgagtcagaaagaacgaatcctggagccgtttgacttcctacattactccacttctacgtgactgtcttcaaagaagtgcgcgccagacgtctggtctgtgactagaacctgttgtgtcttcagttcgtacaaaacatacccaaccaccctgatctcggtgacacagtcacaaacagtgtagaaacttgagacgggaaaaccctccagaacatttgttgtttcttttgcgcggcgtgtacaccgtgagatcgacccctggtttcgatcttgaaaatctctgtttaccggacccaagctctcttgagttggagttactgcatgattgctctcctgtgttgctcgccgtcagaacaacagaaactcttcaaaagcggtggcttgttggtatttagggaaactttgctgatctaggaggcaccgggttcacgtttcacgtgtgcagggggttgagatcccgctgattttaggtggagtttctttcaacacggataacttttctgaatcgcgtggagcttgccaaacgtgtttgtgtgcgtgaactttgttgttttccctgtgtttcccgtttagttgtaaaggaacatcagaaaagctcaggaatcggcaagaagactcgcaccgcttgcttgcctgcaggattccgacactttcgttaaaaggcagaaggaaagaggtaatatccagaagtctttacacaaaaagtgtgtttttttctcagcgttcttcttgtctttcccaggagaacgtcccgcaagttttctgacatagagtgaggattcagaaacatcaactttttcgatctgattgtggagtgtgtgcaaatttgtcttcagttctcggttttgatgccgcgagtggtcggacgagaacatcaggcgaaaacccccgaaaagacccagacagtttacgcggcagctaggagggcctctgtgcgctactctgcgttttctgatctgtctgctactttttctccctttgctttcgagcatcttttcacgagtttgtgtgctgttcacgcgcgttttcttttcctttctcttctcatgttttcggggtccccgaaggtttcctttccgccaacacttccgtctccctgccttcctgtctctgcctttctcttcctttctcgctcgcgctgtttttccttctgaggagaacctttctcttcaccgtcttgcgcgtcgccccttcgtctcttcggttttcttgctgtgtatttgcgttaagggaaaggttctcgactgtaactcgcctttcttgctgctcggttgcccttcttcccgtgcgtgtgtgtcttttggtgtcttcgcctcccttcttttctttttccgcttcgacgcctcttccgtgcttttcaccggactcgcccaaaaccggcgacccctcttcagagacattccggagtttccctgtgttttctgtctcggaacctctcccagtcttcttcttcctccccgcctcaggtgtcgctctttcccccttcactcgcgctgtccgttcctcttggctgctttcctccctcgacttctcttccctctctgggttgcgtcttctttccggtgttcacaacacacacagacgcccggagaccgagcaaagaggcctttcggacagcctggactttgaacgctgagagaaaacgaggaagacgcgcagcagacgacgcagaacttggtggctggggaactgcgcttccgctgaaagtgtcggaattcgactcgccaagcaccggccagcgtctctgcgtcatccgaattcaagactcgacgggccaagcaaaagacaacagaagggagagcacagttctctgcaagcaaaa

SEQ ID NO: 682 - DNA, 4846 bp, Toxoplasma gondii
  source 1..4846: mol_type = genomic DNA
gggaattagaggatatgtggctcgcgacaggaacttgaataggttctggagcttcctggttcccagatccagggtgggaacccccagtggacgcaaaggtcgatctggcagcatgcagacggccagttggcagcgtcgcggaactggaagccgagagccgggaacctaccccgtcggcagggctgttttccgcgagtccagtgcgttcttgcgcttccggattcggccgtatttgcaagccgttctggacaggcgctccgggtgacttctgcggacgaaacggaggagcttttcccacgatctgcggtgttccggcattcctcgctggatccgcgaggcggcaggcgggcggcgtcgcttgctggccgacctgcgcgtcagctgccccgcatgcagcgcttggagacaacagaggctcgcggagagcgcgtccattgttttccccgctctccggagcccccgaagacgaaatcagctggggaggaggaacaaagggaacgtcggagcgagactgcacgcccgcaagcgccacggagaggccagacttcgacatggagacgccgtgagacagagtgcctccgcctagcgaattagacgaggaattgcggagtggggcaccagggacaggagaagcgtcaatgccttggaagccatgtgcagagggattgccggtcggcggtcccgcgactttgggcgagactgccgagggacgcacggcgtcggagagaacctgaggtcggagagggacctgggcgcgagctgaaaggtggagcggcggatccgccatgtctcggaacctaaaatgctggagaaaacatgtacgaccgtcgagggtcgacgtcaatgcgggtccgccaggagcggccgcagacggcgggtacctacacggggatccgcagaacgcgggaaaggcgggcggaaagcataaatgcacttcgtcgcggggcaggtcggaataaggacgggagaaagggaatcatacgggagcgttgcggtggaaaggtcgcggcgcgcgtgcgttttcccgagccgctagtcgcgcggaaggcaagacgacggggaagggaaggcagcaaccgcagatatcggcaaagcaaacaaaaagtcgaacgattcaacttgagttctgtggaagttggctgcaaaaaaactcgggttccctgtcgagcacaagcgcagcgaaaagttttgcggaaatgcccgccaaggcatgcgcagccggagtccgggacacatgcacatacttcttttcgggggtgccgacttcgagtttgcgtcctcggagaggaagccaagacaaggaggcgtaaattggattcctcacacatttgcatttcacagacacaacacgcagaatggtggttgccatgtttttcttcagggaccaagtgaccagacgcagtggagcaaactccaggttcgtgcgcagacactaccgcgctagaggagggcaagtctacaacatctgtgcgtggagtctgccttgaaaaactggcgcgcgaaaactctttggaaggcgcttcctcgcgcatgaaaaagattcaggctgtgtggcctttctaccacccgcaaagtctagatgccagcccgcaaacacgcatcacaagctacacagtaaactttcactacaagccggggggttgctcgtgttcgtcggaagaaagttcccagaaaactggccgtgggcattcgatgctcaagtgcgagagttaccttgcaaaagttgtccagatctgttcaaatgtagagtacgacgaagtgacgcccacaggggaaatattgaaactgcagatgggaaataagagacactcaccatcgcttcgagttacaagcaggagcagagcttttcggattaccgataatcgcgagaaatccgtccttccgtttctctagtccgtagttgcctcttcgaaaggcgacttccacctggagcgaagaagtctctgggcatacaaatttacagaggattcttgagggctccgggaagtccatgaattcgcagtatacaaacgtacctgccattgcgagcgtcttttccccgggtgccgttgcttcgaccctggaggcgccatactgtgaatttcagaggcaagttctgttgttctggcaacttaaaaatgccaggcagatttcctgtcactgggtgacacctacgcgattggtatcctgcctttacaggaggtgctcttgttcgtatcgcccacgctgtttgcttgagcccaaaaaagtggttttccacgagttgcaagcatccgtcactgattcgttaactgaattctcaggtggcacagccgttcatttcatatagaaagggcccagagactcgcacacccacaacggggtgctattcgtcggatttcgcgtcgatcgtttttttttctcgaggaaggtcaaacagatcaccagtttcacggtatctgccgatgttttttacaagggatccgaagcatcccacgtctatcatggtagcagcttttactttcgtgcttgtgattcgtaacgaatcacccacgcagcaatcaatggtcaccggatcctcccaccgtcggcatagttactttgcgtcatatctggcggagaaaccgcggattcctttttccatctcgttgaccttgcagaactagcatgaacgaaactgctctccaggcttcagtgggctgcagagacttcgagatccttgtctagaaggaacgccaccgtgagactttagaatgatacaggtggcggctgctgcacgaactacaccgtgcttgtcacagtacagaacatggtactcatgcgtccgcagcaggaacgttgagacttccacaacagcgcagggcgtctgaatgccagcgggttcgtgtagcgtgactgccacttgctacttttttcccgtgacaaggtagaaatgcaggttttcgtttgcgcgccatttcgggtagtgcctataatggcaactctcctactaacggaacgttgcgccgtagaaagttcttggctgttccatcggctccggggcatgtgtatgtatgtagaaaagatgttacccaatgcaagttgcccgatcttttttattgaaacgagatttctcctgtgaagttgctagacgggttatggccccaacattaagtagatctgtctcgttcacaccgctgctttcaccagtaaaaagggaaagtcttcatttcaggaaagaacgaacacgaaaatacggagaaggtaacaaccactgagttcaccacgtgttcgattcgaggccttcagagcatctgcaccatagaaaatagaattatcttatatttcgggctacagaaaacaagaatcaccccaaccttcgagtgaatttggtctgtccgctggtactcctctgtgtcagagttgcctgacgccagccaagaaacgacaataacctactattttgtctgcattcgtcctttcgggttgccaagaaccttttagacagacgaggcttctttcgtgcagacacatttcttctaatgtgtcgaaaatgcgtgcagggcctatgcatacagccacacatcgaccacggaaaaaagttgtctgcaaagccccgatgcggattcacggtccttgtggcggcttgcatatttcgataaaaacagtgttcgcctcagttttgagtatatattcaggtgtacacaccgtaggtagtttgtgaaatagcctgagcaatttcgtggacccccagtgccggggttcaccgacccgcaacacgttcccgtggagtgcccggacgcttttggctgaagatgcatatcgagcatggcggccgttgctgccttcactcgaggttccgttgtgtgttttcgtgagttttgtgcgttgtgattgcccgccagcgagcatggggagtccagtgggtatcggccgttcatcccgccagtgcctcttccggcgagcaacttctgacccggaaacgccgcgagcgctgccaatcgcactgggcacgacggaacgaaatggcgtcccaaagaataggcgctgcgcagctgatggtgtccaatagtttagaggaggaggggcgctgcggatctcgaggagggaagacgcaaaccttacggcttttttccggaaagaccgcatgtatgacgccaaatctttccgcggagctgggttttccctctcaggaaaggcaacgcgtcccgggaaagctggcgatttgtaagacagacgcagcagagcgatgattacgactcctcgtgcgtctggtggcatgtgggcctgcaggaattccccgttgtccggctgttttctgagagctaccagaacaagctctcgtcagattccgtccaccgcctctgccggtttctcttggcatcctgcgccgacacacttgcgtgaaagccgaatccgctttgagttcgcagcgcacattgcttcttctggctcgtttccccggattttgtggtgtgccgatttttgacgtggaggtgaaccggtgcctggattcttcgttaggaccagcgtcccagtgaaagccccacgactgtcgggcaatcctgcaaacagttcccgtttctctaaaggcttgccccacccgcgctcctcatgcggtgatctctgtgttccgtgcttcttgaatcagattcagttcccgtgaagttcccttctagagatgcagcccacgtgcactgcctcgaacggtgaattcgcctgctaataacgcgccaaaggcaaacggagcatctgcaaagccctggctgcgtttccagagactcccgaaccggtaaaacccccccgtttctttgttcagcatctcacagacgtgaaccgtccaaacgtcttcttctgttggatctgttattacacactgtggcggtatgctattctcccgtgattgaca

SEQ ID NO: 683 - DNA, 1748 bp, Toxoplasma gondii
  source 1..1748: mol_type = genomic DNA
ggtaatgacaactacaggaaatgtcgatgtcgccaggaatctgtgaagactactcttgctaggtgcacgattgagatgcatttgcaagtgtatgaaaacctatagaatggctggccgattttcaattcgccagacgtttgcacactctgaacgtttatgtcgcaccgggtgccctagctagaaagggtattcactgttccatttatcacgtttcaaatgcttcgtctaaggtttcagtgggcggccggtcgacttttattgaattaagacggccatacatacgtcgcctttcctatgaatctctctctgggtattggcaggttgcccgtcacactgttcggaaggtttccactgcatttgaaactgccgcaatgctgtcgatgtgaggaagtaaccacattctgcatggggtgcccccttgagagaggaatagttcccctccaggatttagagagagagaaaatgtcatgtttcgtaaaaacaaatcggttgcaaggacgctgctttgccattccagtttacacactcttcttatcagcggatacacaggtcacgtgtaccttctgccaactcgtgacctgtatatctcttatgataaatttactatcccatagtttactccacggaacaacaaccatggtggaactaccttctgtgcaagtcattccagatcccttaagcaactaagcaattaaagcaaaaaaaaacacatagacgcttgacatccacgtttttcgcgagacttctaggtctaagtaaggacgtcagcggagtatagcggcgggtgcaactgcattgctaggaatgcagctgtgccttatcagaaataccataaatggaagatgaaatctctctgcagagacgggagactgtgcctgcctggcgacgcaacaccaggagggtcacgcagcgacgttcgctagcggcggggaagctacacctctgcatgactatgcatataaaaacacccggaaatctcacaagaaaaacactatggggtccttcataaacaatacgtgctaggtgttgaagatcgatccagctttcttcgtgtcagttctcagtttcttaaaaactcttgtgcaagacaccggggcaactcaaagcgccagcatgcggcatggttccgtacgtggagtgtcggctatcgcgcaaaagactttctgtgatgatgttttgtgtggcgtacgttcgttttcattaatacaaattgtcagatgaatgtatcttaacaagatgctccaccggcttctttctggatcaaattctgctcttttccttccgttttttttcgctgcttggacctcgtctggcaacatctgtactgcatgcatcgagcgtaggtcgttctgtctcttctttcaaccgttttcctgtctcctttatcctttatcgcgagttgcttttcccttaactctgcgttcttctttatttccccttcatctcactttttttagatacacctcttcgttttccctccacgtcgatgtgcgacttagcttgtaccgttcgacggagcccgccgatattttcgattttctttttttttgtgttcacctgtggagatctcgaatcaaacagacatccgatttcgtagtacaccaaatgatttcggctatgagggagcagttttcaagtgtccatcgtcgctgttgaggcacgaggtcgcttgctggactctaacggatcacaccttcccttccgcgtaaatctccttcgcatcttcagacaagtctttcttgctttca

SEQ ID NO: 684 - DNA, 4377 bp, Toxoplasma gondii
  source 1..4377: mol_type = genomic DNA
gaggaaatccaaaaacggagaattcacagaacttctccgcgcatacccgtcctgcaaaagaaaagccaaaaggaaaaaacaagtgcggactccaaacatccacgaaacaaacgccgcaaatgcgcacatgtacactttactcagcaaacacggggaaatacacaaaccccaccgcaaacgatagacgaacacgcgcagcataccttatatatatatatatatatatatgtgtatataaatatataaatatatatataaatatatataaatatatataaataaataaatatatatatatatatatataaatatagtcatacatgtttgcagcatagagacgcacatgggcatgaacacgtacatgcgtatttacatgcatacgggtgtgtatctatgtctagagttttgcgttggccagcatgtgtggtgtagttgtcacagaaggttctggataagtgccagaaacattgggagggcgcgtgtctttgagattggcgctgaagtcggtctcaccatgatgtccaggtgaagccagtcgcatcctgcgtcgaccattctcttggcgtctgacgcaagggaagaaaggtcactagcgaggaccgaggggcagatgataggttttagctgtgaagacattttcgtgaagagaattccaagagttcgcctttcaagtcgagaagctccagagtgttcggttgatacggtgatacggagagacgccgagactggctgttgcggccgccggtgtacagcagacttgcggggacgcgagcttcttcagcaactagctagggcgttcgtcttgccggagtcggtttctgccgttggtcgttttcacccggcagactgccctccgagaaagcacgcagccggacgccgtgcaggcagcagaccccgcagaaatcggcagctggaagcgccgcaaacgcgtcaaactgtgtggctggagacagaaaactgaagtttcaacgggaaacgacgccaacgttcgccacaggacaccaaaaagcgcgcagaaaaaaaagcgagtttgaccgcggcggagacaaggagtcgaaagactgcagtgcaggtggtgaggaagatgagccgttaaccgaagaaagccacgggccgcagaggaaaattcagatacgaatgaaaaaactggcgcgtgtgtagaagccaagaaagtgaacgaggctgccaggagagaggtgagtcgcaggttcagggaaacgcgttgagtcgaggcgggattcgcgcagcgcttgcggagaaagatcgcagatcgtgagtgtctgcagtgttctacgaaagggaaacaaaccgatccaagtaggggagaagtgaaaatcggccaaagtggcgaagcgactaaagaagagtgggaaagactgtaatcttcaaattcccaggttgaacagtatagcggacaaggcatacgttcaacgcgcgcatgcaaattaaaaaagcgcagacgttatgcttgtgtgttgtcgagtatacgacttctctgcggtggatacttcggatttcgaaaagacaacacgggagaaacccgtgtgcttttgatcaaaacggagtagagcggtatcgaagggcatgcttgccggcgtgactttgtaaagattccagctgtctgccagcaacactcggaatctgctgtttgcgaagaggaagtgtgatacgaattcctgtttgcggactgcagtacaatgcaacactgtgcaggaaagcgttggggtgtgctcggtgtgcttacagaaacgtgttgatgaggattgcctagcgcctggtggtgtcagaaaaaagtccatgtgtctcatataacgtcagttacttcgaattcacaaggtggcgacggtcgacacgatgattcagggccattgtgtatcatcgataaagacaacgctagcgttgcttattacccagtacaatggtactgatcacactagcattcacgtagcaatttatctctctgttaatgcgaatggaaaataaattaaacggtaagttacaactggagcataatcgatgtggagcaattttgatatcgtacgatgggttggtgtacagcaatcacaacgaagtggttctccatggctgcaaaactccacttttctagcgctgtcggcagtaacgatatagatccactgtgctggtaaaattggcgttaaacgaagtgaatcgcataacctcgcggagctcgccacgcgcatcttgaacaagtgacttgtacgtgacaaaacctgcagaattaagatggttcacagcataaccgcgccgggtgccatgtcttatgtacaacggaagcgcgcacgatcgaactgcagaacgggtcaggtcagttctctcgtagagtctacaactctaggtcttgagagtctgccgcgggactatcaaggcccttcttcctcatatatttgacggaaaacctagaattcgcatgtttggctcgcatttagccgaaatactccgacgcgtgaccaggaaaagtgttcatcatttgcgacgtcaacgtgttggttacgagggtgcatgagatttccgtagctagaacggcacaaggtgtgtagagagtcgtctgccagtcacgacctctgcgaaatggctgtccgtgagacagcaagaatgttttgacaagcaaatgcgtttggtacgaacatacacggagaaattgagtaggaaggcgataaccgataactctccgtggtctcgagtaagagtttatgagagtgtcttatgattcctgttgcggttccgggttgggcgtcatcggcatctagacgacgcttcttcaaaaaacgagtcgatttatgacgcggctttttcattgacagcatcgttgtcacgcatttgtacttctggtcctgccccggtttaccgtgtaatgtaatcttgtacaattgttacatggctttgcgatgttgaagagctgcaaactagatatcacgacgtccacaagggagcgccgcattcttcaaacaaggcaatcgttagtcaactgctgaacttttggtatgctctggcaatgtggtagttcatttgaagagcgatagaacgcagtacttccgatcttagataactgttttctcagggaaaaggcaaaacttcagtttctgtaacatctttgcggaggccgattcgcacctttttcaagcgtactacgtcccgtctacggagagggcgcccttgggtttcttgctcagagcggctccctgtaagctggaacatttacacggcattccccaccttttcggtgttttttgcctccagtaatgcacaccagccgtcggaaacaggcagtgacgacagatggaacatgctaactaatggcgatcctcgttcgcagtggtcagtgctaccaatcgcgtgacacttcctgctgaagttacctggtgcacgctgcacggacgcatattctgggggcaccaagcaaacggatggtttcagaatgcgacgacacggctgtctgacacatagaaaccgtcgcaggtcttctaccagcaccgtaacgttaccagactctgaacagatgcgtaacacccgtacaactagaaggtcccactgaaagcagcaaactgtgcgaagtctccagaaaacgtaaaattccctcttgtttacctatgagccagcgaaaagtggtggcaacacaacgtcatgaagcgtagtttcgtgggcggcaaacgtagttgaaggctcgaacagaatttgtgtcctcccgaaggtgtagagacgcgcaagatagaagagtgttcctggcgctcgacgcagttcgtggtatttgcgtcctctcctgtggcagaacctttgtatgtcggtgctgtggcagaacacgcaagatgaagtaactcctgtgatcgtcacacgctcgtgggtgttacccgcacaacctgtgtagagtgctttaaggggacgggctcaacaccatgaggaaataccctaaaaagctcgaacgtccttcagctagctttaaaaagcatcccgaataatcgaaggagtcgtttcttgttgcatctgctagtttcggttgagtcacagggtcgcggacaacggcgcatgctgagactcggctcggcaaacagatcgatcgcatatatagtgcgttttcggggctgcctaaattcttttactccggagagctgtcgtgtcactagttttattggccacaaatcgacatgtttgcttgcgtatgtccttcctgttagggaccgacggtttttcgcgcataaactgcaagaattaccctttatctgccagcacctttctggttcattagtgcgccaggcaaaaatccattctgttgaggcagaccgagcgaaacgcaccacaccacactgaaaagaacacgtttggcatagtagaaacacactgacagagaaccttacagtggta

SEQ ID NO: 685 - DNA, 4058 bp, Toxoplasma gondii
  source 1..4058: mol_type = genomic DNA
agaacagtagcgacgccgacaggagtgccgcgcataaatgaagaagctggactgcgtcgaagcgagcaatcgagaagagggtgccgcccggcgggggacgcagcagagagagagaagaggaaagagaagcgtagcggaggagcagctctcccgaaaacgacagacaagtggagagagagaaaccaggactgggagaggaagctgaactgaggtgctaccgacacagccgagagcggagaccgccagagcgaagggagaccggcaaagacgaatcaagaaaacaattgatcaggccaaaacgtataaagacaagaaagcagagacggcaacgtgtaaggcatgcgctcgagagacacccgagagttctatagaagaggggaagcggcctcgcaaacggaacgcagagaggggaagcagagggtggaacacaattggcgactgcgcgagagagactggaaagaagcggcgagggggggagacgaggaaatctcgctcgcctgagcgcatgtggaaggcgaagcaagcgaaaaggtcccggctgcttgtggcgagtgagcttcgcgaggaggctccgacgagagagtaaagagaaaggagaaggatggcgcgtttcgaaggcagaacgtcgaagaaatcgtcttcagatgcaaagagatgtttgcatacaccgcgttcgcgccagcgttgcgtcagtgggagttcaccggacatacttcgatgtctctacagaattcggagcaacttccgtcaaaacctccgacaaattctcaacaaagcgccgcagagagcccagaggattctcggctctggatcgagaaaaacgctgctttggggtgtacatacaccttaagtcgcaccggtatcccgcgcgagtcactcgtcgtccggtttgcgggtctcgaacccacggcttgtttgacaaattgctgcggtcgcaaaggaaccggaaaaaacgcaggcaaaaaaagagaggcgaatcccttggtgccgggagaaaagttcgcgttgatttgaaagtgactcttcaccagggacttgtcaaaaccagaagcaggttaggctctcgagtgaccgagcgcgagggcagcgggacgtttgcgggaaaaggggcgagaagacgggcgccttccggcgaacaaatgcacgtctagatgccaagagcacggcgaaagtcaaggaaatgaaaaggcttccacgaattcaaggaaatcatcacactccgagaacgcagactccacgttatccaactagctatcgagcgcggccgcgtattatccgccacatgcctctccgtgtcgtcttttcgcgcgaaggcagtggcagttcttctgtaaaagatggcatggctccgacagagagagccttggtgtgaagacgataaagttgagggcgcgcagagccagtttttatgccagagaaggggaaaatgtcgcacggtcgcggacccctgtcgcccctcccagtctcggcggcattcaaccgttcgtctcgttcgctaccacaagtaacgcggaatgaagtcgtcttccagaaaggcgtttccacttagcttctggatactcttcttcgcagcagttttcccgcgtctcggaagtgcgtttctctcgatgaaagcgcctctccaggctcgcggactcgctccggccgcgaaagagcgaaactgcactgtgtcaaaacctggggaactcgacgattggtccgcaggcacagcccaccccccgggtgaacatttcgtcgatcgtgggagaatagctgtgaatagtaagggagcagtactgaataccatggcaataggaaccgatttgtgaatcagaatgaatcttaggtgactaacagtgaataatgggaggctgtgaatgtgggtactagttgaaacgagagaactcagattctccagttacgcaggaaaggagctttgctacacatctgacacagacagcgcatacggacggcacagaagacgaatatgcctccgggtttctcagtaaactcagcgtccgaagaagtgccagtggaaagctggtaaacactgagcgcgtctcaacgtagcagaaaggctccgcggttgtaaatcgctcgtggaaccgggacaatagaccgaaccagacctttgaaatttgcgaagagcaaggcgcgcgttgatctgcaactctctgttttgaccacggcctctcccctggtctaaaaacgtcaaataaaagccagcggggagcgccccatgttgatggtcgagaggtttcgtctttcgtgatactcgttttcccagaaggaagtcgagaccatcgcaccctcgacgttttcgctttttcgcagttccatctgaacgtgctggtggctgtgagggaatgacgcgtgagagaaactttcgaatcgagcgcactcgagaaagactccagacgtcgtcgttttggggaatggtggactcgtagacaaaagcaggcatatgaggctaccggtgaaagggactctcgaggtcttccaagtcgagcatcagcgaatctctcgtcacttctctgcactctgtgtgtctggcaacaagggagagacgtacacaaaaaggaaatgctttcgcgttttcagagcgactctgcatgcgtatggcggaactcaagagacctttgtggctgcctggagtacgcagatccctcagtgagaaaggagaatcaactttgtcgccggtaaatccagttgaacaaagtgctcctgagaacagcgcggcgcaactggaaagaacaagtgaactgatgactactgttcagatcccgagctttttattcgacggcgtttccgatcaaccttctgtcctctgcgccgaccattagccatggagtgcctggctcttcacagtctccacatagacgctgcgaggaacggtttctctctgaacagtctctctaagaggtccgggcggaaggcattctctcaggagaaagccactgacaagagaaaacaacatccatcgtgtggagagcaaggcggcctgtgaacagatgtagacaggtcgaacgcggagtgtcgcctattttcgagtagcaagcagtggaggcgaggccaagagagaaaacaacaagagtctccactcttcgcaacagagcgcttgcttttctgccgtcaacgcagtcgacgtataagcagtcgacgtataaaacgcaggagcgattttcctcccgtaggcgcccggaccgtcactgaggcggaagcccctgcgtgggtgactgaaatccgccaattcgaggctcttcgccaggcccactggtgcggtgattgcccgagactgagaaaattcgcacggcgactcaggctgagcggccctttcattccagaaatccagcgatgcgcctagacgcctagacgcgtgcagactcaattctttgtctcgtttcctcaaacacagctccggaactgtgcagtgtctctagctcgcagctcaacatccgaagcaagccccggtaaaacaacaacagcttcctcgtctcgagaggcgctctgttcgtggtgagcacagaaaccttaaaacatatctacttttcggcgaccgtgcaccgccgagagcgtccggtttcgggagcctctttcccgccaggcttttctacggaaggcggattcgcttccattcgagaaagctcttttaccgcttctgccttctgctctcgcaaaaacgggtcgatgccgccgaccttgagaacagtccgctgtgaggactgaggacatcgggactcgagccgtctgcgtgcatgcaagcgagagcagctgtgtttgctctgtgcgcgggaactcgcgcgggaactccgttcttttcttttcttcaaaagagacgtctctgtctgaagactcgccgactttgcggggaaacgccttttccttttctgcgtattcccggtgtctgtccacgccattttttgcgcatgccttccctgttttacccctcccccgtccccgggcacctctgcaaacctctgcaaacctctgcaaaaaaaccactgacttcataccactgcatccaagtctttgcaggcaacttttcctgatcttcagggcacaccccttcctccacgcca

SEQ ID NO: 686 - DNA, 1848 bp, Toxoplasma gondii
  source 1..1848: mol_type = genomic DNA
gacgttcacagttcaatatgataaccaaaagctgtatcgcctctgaagcccgcatcgacacttggaccatgcagagggacatttcacgtttaggatgggagaacctatagctttcgcatgaggcgcgatgcgttaccaggatgcccaggaaatgtctccatcggacagactgcttgttgtacatgctgaaataagaaacatgcatatgtagcagaactttttgcatcgtaatcgacaggggcgacagtttccagatgcacaaggctaagtatgtgcccaggcaacgcccgtcgcccgtgcagtcccgcagaaaagcccctgcttgggacaagcgcagctggacagcgatattcttttagaacgggcagtaggatcgttcccacaccacctgtgggggccgctgcaatgaaagaggggaaacatctctgtacagcaacacgagataccgctaacagcacagtacacgtatacgatgtcatccttacacatggcctcggggttgaaatacctctaaattgacatgtggccagcaggactttacagcaaacgtttacacgtggcacggtgctgatgtagccatagtagcacccacgttacggagttttgcccggcaaagccttactatagtgggcactcatgtgaatgatgaagatcaagctaatactgtggcagaggcgccccctgccccggtaaacgggacgctgtctaaacaatgtgcgcgagagggaaggatgttggatatctcatgataaagagaaaataaggagcaacactaaggatggaaaggaaacttactaaccctccgctggagctccggacgcggtgacgcagggtactcgcggcgtcgcacagggctgaagatttgattatctattacggtggaaaagtacccgtcttctgcaggaaaagggcttagctgtaaggctgtcgcacctactgctttctgaaataatacactggtagcggatcaacttccgagccaggccaaccacgaccagcagcatcagttcttagacaagaaagtgagttttcttggggagccttgtacaccacataagcacagcgcagaggtttgtatgggcaacttgttaaaagctttttcgcatggcttcgagaaaaacggcatgttgccatttgcaatcgagttccttctctgcttcatccaggctttctaactgcatgcgtggagcacaccagtattcaccttcttccttcagtgttctatgaaaaacgacagcttagtggttattttaaaacattctctgctttgtgtattcgtttaagaaactagtaccagagacgcagcgctccctctagcagtcgtggcctacaagcagcgcacgccctcagcagttgctgcatctacttacgtgcatgctaacgtgccatgttaaacgccgccaacacttgttgttcccttcgtctttgtgtgggttttcttagcatcccaaggcttgatctgagatgaaaacgtaggtggagcaatcccagtacacaccggtgtaagcatttttgcccatgaacgggtagatgtcggcagtttttactggcgccctgcacggctgaagtcgccaaaactttcgccggtcaagagcctgtttgagtctttttgctgatgtcgattgaacgcaagagtttgtcattgcgaaggttatacaaatgcggagtcgtaacgcatgttttacctcacttttgaagtttctttgggtcctttccgtccagttgcatgcaagcacttgcaacttcgggctggaccgttttcctcattagggcggagatcaaggcgttcattttcgctgacgaaaagacgctatttcggaagatttgcccactatgtcttttaaacca

SEQ ID NO: 687 - DNA, 1504 bp, Toxoplasma gondii
  source 1..1504: mol_type = genomic DNA
cataccgtttgtagtttctagcattttgtgcggtgcgaaagcatgtgtcctacgcagtcggtgctttgctcgtttctatgtcaccactttccatctaagtttactctctgagactcgatggcggcaacaatcgcaccagtctgcctcccgaccagataggcgggttcggccaattaagctcctacaaaggaccgcatgcaatcaagtcgatagcatctgggccaagggaaggtgggaagcaacttttatgtgacgagagtaacgacgtgaatacgtgtgcggggtttagcgtgtacatccaccatcacgcggaaagcccccaaaaagtaccttcaaaacctcctgggaactactctcatatcagacccatcgatacaagccaggcaaatgttgtatgcacatgtgcatagagatgcgtagaggcgggtggataaagagatttatttagatttgcaggctgcgcttgtagtacacgaatacaggactctcgaggagagacgtagccttgctcttttttccactgctgcctcttccatccgcaccctgatctgcatatacactgaaagcagaaatacacatttacaaacatgcgtatggtggctttgtacggaggacattgtaccatctttgtcccaggctatactggtggttcggatgtgatacatctaaatacatgtccatatatagatgtgtattatgtatgtagatgtacatgagtgcgtatgtccacatagccatgaagggagatgcgtagagggcagagcggagcgtgggtcacatttgccgatgtcgcagcgagagaaactgggaggcggcgaaagcaaaaagaacggaaaaaagagactgcagcgttgtggtgggattgtgacctttgctcttttttcctgcgtgtctttgtcaccacgcatgcgctggagcaaagacgactagctcgagagagacgacagcgggggatgcttttcgcagaagtgcacaggacgaacgaaacgaagaaaacgaaagaatgcgcgacgcagataaaacaaatgcaggaaacacacgggggcattcacacactccccctcgttttttcctttccagaaatttgcctcagctctctgctcggtcgaccacgcgcccaaattgtgacacgctgtccagtgtacacgcgtttcccttcagcgttagaagcctctgaaaacagcactttctcatccgttcttccacctccatttctttccatcctttgtctttttagtgtgcaaactctgctgatttccccgagtgtcgccgttgtctccgtatctctgtggcgcgtctggcccggggatgacccgctgcgcttcgcagactcacatccaggcttacaccttcgaagctcagtgtgtgtcaactccatgtggattttggtaaatgtttccttcttaataactggacacacttgctcatgcgcttcattgaagagagccgtttctcgaggtccggctcctcttccatttcctcttcaccgcctctttggcaaaca

SEQ ID NO: 688 - DNA, 2458 bp, Toxoplasma gondii
  source 1..2458: mol_type = genomic DNA
cgtcttcgggtaaaccttcttatacatctttccaccgacttcaagcaatccataaataaggaaaacagacgtttaaaatatgtatacatacttctccagttttctctcttcttgtatatatatatatatatatatatataaagttatctatgtttacgtgagaaacaaaggggtcttgagaagacacggcaaaaccagtatccagcaatatcgtatcaaacacacttttgatgtgtgtatcgctctggctctaaattcgttcgttttttgccgttcatctagtatatagatatatacagacatacgtattgtcacgttccctctaattcatatatatatatatatatacttgtagaactatatatacatgcatatttatctatatacatggagagctacctgaacgtggtttgcgcctgttctgtcggttttttttctagtatattgtacagggggttgcttcaggtcgcctgtgttcagaagctggaagtcttttttgatggatttgaaggatgcgtttctgccgacgtttgcgtcagtgtctgggatggactatcctttccagagtgtagtcagcgagaaggtttttctgtttctttcctgcgacgcttgtcgcctttctttgcatcgaaaagtcagaacatttgtttgcttcgactgaatgctctttttcgttccacgcctttctcagggcacattgaagtgcgcccctgtaacttttttcaccgtgattcagagacctccgagatctccataagaaacggtttgtgtcttcttgtcaccttcgtcagctccctctctccgtggcaactcgtatgtctgcttgtcccttcgtgtgccaccgagcattctccaaatgtttaaggacttttctgtctcctgcggcgaagattgcttctttctacggaaacagttccggtccacacactgcatgcggttctcgaaatcctccgtcaaaaggcgctgaaagccttctttccgtggagaaagacaccggggaaactcacccgcttcgctcgtgcccctgcacacagagagggcagagggggcgtccttagaggtaattttcctggagaaataaagttctgcggattctaaaagacaccaactgcgcggaaagagacgagcgttctgcggagcgacaacgaatgcggcatcatttcaggaaaaagaacttcacaaagagagtacgcaattcggatgccgtcgccactgcggagtgtgcaagggcaagcaagcgtcgaccgcgcgagctgttcgtcctgggagaaaggctcctcatactttttatgaaaaaaatgctcgctttcagggtgcagttggagcagacgatctgtgaactcgcacgcatacgagttggcgactctgcggatcgagaagaggaccgcgaaatcgcggctgaagacgacaagcctcgtggagatgcgtctggggaaaaagaccctctcgacggagtgtcttgcgcacgggcgccaccgagagacttttctcccagaaagccggagacaaagcgcagcgagacattatgccttctcacgggtctcctgtccttttcttccaaaaaatgccagctctgagctccgcgatttcaaagtaacttccgtcgggaaaaccgagagatctgaacagtccaggcgtctttctttccacttcgtctcgttctctgactccgccgatttcttggctttctcctctactttttgggggtttgatctgcgtcagagtgtcacggcacatgagctgccttgggagcgaagcgcacggagaacatttcttctccatctctcacacattttagtttctttcctgttcgtttctctcttctttcgcgtctctccctgacgcaaaacagccggatgctctccggcgttcctctgttcaaagtcctccccctcggctctctgcgccgcgcgcaccgctccacaccacccgctttctcctcgtctccccgtccgcttttctcagcggcaagacccgatcgtgttgtgtgtcgttctttttcttttcctttttcggaaaatccaccctctctctttctctcttggtcctgcgcgtcacgccgatccctcgacttccttccctcgcttcccgacagccgcgagaaggcttctcgcgactgaggctcgcgagacaacgcagcacacagaggcctgaaaagactttgaagagagcgggaaggttctgcgtctctgcgtccgccgaaggattccttttttccaggttctctcacgcaaaggaaggagaacctgcggatgcagagcctcccgggtgtcgagagacagcgtcagacagaagaaatgttttagttccccttttctcgcgagactccacgcgcgaaaacgaactccttttctcccgcgagtctcccctcgtctcaccgatcgagaggagacgaagagtctcttcctcctccgctcttccctccacagccgaacggtgtctcgcttctctttgaaaa

SEQ ID NO: 689 - DNA, 1884 bp, Toxoplasma gondii
  source 1..1884: mol_type = genomic DNA
aagcagtctcgacgccgcgccattttgagtcgagaagaagaaagtcgggcaggacccaaaacgaagaaaaaaacgcagtaaaaggaggtaggagaaaagaggtgtaagggagcaagaggcggcagacagagaagcagagggagaagacgggggagagaaagaggaggaaggagagaagacggatgaagagcaacagggaggagcggaagacagcggagaaagcggagaagaaacaactcgtgagcaggcaggcgtcaagcggcgacgaagcgacgagagacaggaggaacaagagacagctttgaatctctgaacatcagctggtttgacaaacagtgctttgaaagaacaacgaccatcgagaacgggaagagccatgcgaagattcagaagatccacaagacacttggagccggtctgccaaaaagtcgaacctccactaattgaaaaatcctacagacgctcttcaaggaactgttccaccctctctccttccttctccttctcctcctcttcatcctctctcgactcgcggctctgtctttcttctccttctcctctctctgtttctctatccccttctcctcctctttctgtctctctctgtctctctctgtctctctgtctctgctgctccttttccttcttttctttttccttctcttctcctgcccttttcttctactcttcctcggctttttcctgccctgcgcgttctgcgtattcgactctcttgttttctgcgagagcctcgccgtccagcacagctccggaagagactggcggcaggctctccggcgacagagagagagaaggtcgccagagagagagagaaggtcgccagagagagagagaaggtcgccagagagagagagaaggtcgccagagagagagaaggtcgccagagagagagaaggtcgccagagagagagagagagagagagagagagagagagagaaggtcgagatagcgcgcgaaggcagaggacggacgaggagggggaaactcgagctggtaccgcgtgcctgcagccgaattgttctccctcggagcgaagacacgatggactcgcttagaaacggaaatcctatgcgaatttctttcgacctttcctcttttctgcagctgtccctgcgcttcttttcgggtgtgcgtctctcgctttcaaggccgactgcgcgcatgcgcatgcactggctgtgtaattcgaaaagcagagagcggtcactgctcgagcagcctgcggaggctgctcggccttcttcgtctccagacggggagtttcgattcttttttccggcgttttcttctctccatctgcagcgaagtgtatctctggaaacgcggcaacgtcgcaaggcgtccgtccggctgtgcacccttccctcatcttcagcgtcacctgccgggaacggcctggtttcgcgttttttgtctctccacacaactgcaggcggcgctgcctcaccacttgctcggctctctttctcgacgcagacggtccgctggtgcaactgcctttttttctccgcgaagtctcgccgttcttctccgttctctggggacgaagacctgccgcgcgggaggcaaatctggttcgccctgcgcagacgccgcgctccgtcgcgaagaaaaaagaagatcggtggccgtcgttctctccgctttcttctctctcctcgcctgcaagtcctgaagctccgactcgacagctcgcttcgactttaataaaagccgctcgcgccgtttctctcttcgcgctcaggttctctctcgcgttgtcgctgcgcctctcttcgtgtgtctcctccgtcggggcaggagcgtctgaaagccgcgctgcggacgcagcttttcctcgaactcgcgctcgtttcgcaaaa

SEQ ID NO: 690 - DNA, 5012 bp, Toxoplasma gondii
  source 1..5012: mol_type = genomic DNA
aatgtcgcagagtgaatggtcatgttcacacttggtcggataaaagatcttgttacaacccgctgttgacttgactccagagaaaagtcgcgtctacaaacctagcactcccattttaaaaggtggaacaaggagttcctcctcgacgcgttcaggtcgcctcgtggacgcttcgttgcagtggaacgagaaaggagctccactttctctagtttcgcgacacacaggaatgactgttgcagaaacgaaagcagaggctgagagaaagtcacgtgaggtctgccatgtgtatatggttagagttccacaggaaccgagccgcggaaataggacgagagctcttttttagtcggaaaaaaactgcacagcgaggtgaagagacaaacagtgacaagtgcgagtcaacatgcggcatccgccagcttctcggatgtcgatgcactactaaaacggttcttaccctgatgcgtgctcctcgccaggcgttttttctcctcttcaatgattcgcttcgacggcattttcgacgtctttctaaaaaacagatggcaaaagaagcgacagcagactccaaatagaacaccctttgattctttttcgtccgcgctgattagaaacgaaggcaaactttagagaaggaagcgagtggacacccgcagcggaggaaaaatccgcgacaacggaggactgaaatcttttctccagtcgtttccgacagaagaggtccgtccgcaaagcgcgtacaaccagacgcatacgtgcataattgctggaatgcacagactcggcgggcatatcgatgccgaaagggacatacaacggcagtgacatcggtagggagaatcggttggacgcagttgtttctgggagagcatcacagttgccgggtcatcggcgtttccgctattgaccccgctttgtggggaagagaatggaggagtcactcaatccttgttcccaaaaaaaatggtatcctccttgtcttttcctttcattccagtggccatcttctcccgcgtcccccgggagaagagtccctcttccagaaatcccacttctctttgtcaccctggggtggcacagaggcgtttccagagtcgcgcccgctcgcttacttcgagattttcctccgctgctcttgtcgccggggccgttcgtttgtgcgcctcagccgactaacaaatccttgaatgggcggcagcgaaaacgcagagcgttgctgcgagaaagtcgcagcagccccaacgtcgtccctggcagagaaaaaggcggccgacaacggggctgagagcgctataaaaaaagatccaaaatggagaggtctttttcacagagctcgcccgcggttttgcggtcgggtggctctccacttccttgcagaattgcaaattccaaagtttgtgcgtcgtgctcgtgcgcgggcccaccgttggatgcatcgcccaagtgcctgccgctctgccgggagaacatgcaccgcgcgaaaaaaagccgaagagcggagacatgggcaagcaagacacaggggaaaagcagattgtgtcctcaccgcagcatagcggtctttaaatgccaaaaagacagaaaaaagccgggccttccagacacaaggggaaaatgcgaaaacgccgaaatcgcgataccggacaccggaacggcgggcgataacgtctaatatatcgatacagcggattcacgtggatggctgcaaaaacctgctgccttcgcctcacggaattgggagttcgtctcacaacatgctctggtacggtgacagatacgctatctgtttggataggaaacaagctcaaatccaggaactggaaaagacgcgcaaagcagccttgaggttgacgcgctttggtgagggctgcttgcctgcctgccagatctgcacgcgagaacgagcatcttttgacgctctgtccttttctgcgttttgccatggccctcggcgtaggctcgatcacactaactttgacagagaaaaccgaagaagcatggacactttccgaggtgtacatacacctcatcagtgacgaccaggaaccgcttttcatcagtcccacggtggatgtttgtgtctgttcgcttgggtctgtggttgcttatttcagtagaaaacgccgtagagtgcgttgaacctcccccacggttgaagaagaaaagtggatcttcgtgtgactgtgtttactcagaagctcagatgctctacacggatgaaagccagttctggaagcggcgctttcaccgctgttgtgagtactcgggaagtcggtacatgtgacacgacggctctcgacaagaggattctctaaggcacgatgatgccatggttttgaaggactattttcctccagtggctgtgtgaatgcgctctcccgagtgcgtccgggtacgggtgatggggcaccacaaactcgccagtctgtagatgattttgctaaaacatgagcacgtttcagtttgtcacggtggctgctcgcgtggtgtttgcagaccactttcccgaactggaaaagacagataaatggagtgtattctggacatgcgtgggcttactaggagcgagtaatttagttacaattgatgtggtacagatgaaagactcttggacaacaggcactctgacatgtgagcaagctgctcgcaggtctcggtttcctcagcgtcgagaaaatggctttcccctggggaaaaaaacatatctgcatctaggctgtagcaacgtgctcccactgccgattacgcggtgttactcgtcaatgggtgataaggttccgtaccagcgttctaccgcaattcgatggacacaggtctcatggtaagtgcaattccaattgagggagaggatccgatccctgaaacccaatgtgttgtgggcctccgacccgaaaacgcaacgatggcttcataccggaaactgccttcaactaagacaccgccggccgtcgtatcacacaaagacagcggaagaatcccagtcacaaagagtacggaagtgaacctgcttcgacagcatgcaattattcgttcgaacgaatcgaagcatgttcgcaagccgcagaggcgacgattagatccatgaaagcggcggtcagacaatcccagatgttaggtgaaaaaccattgcgggacagaaaccacacgtgaatgccccccagtttcgatttgggcgacgatcgaagaacatctacagtccctgaattgctcgtatcactagatccatcatggtaagtaacactgcgtttctctgactgtctacgccttagttcttccccgtttcagagttatctgaaggttccagcttcgcgtagcattgctggacatgtcaactcagatgcccaagcatgttttccacggtgcatttcggctttcaggtgtcgtctcctccctcgtgacaggaactgcgagtcttcagacatgccagcaacaaactcccctgagctcgctgttaataagggtgataacagaactacgtatgttgcgcgtacagcataaccgatgtgaaagggactggagccaacctcagctctatcgtcttgctaaacgttccctttcccgccagtgttctgagagcacgccattcttcccgtcatcaccgtgtcgtttgcgtgtcagcggccagacaacgacgccgcagggtctgtcacctttcgaggtcaacacagtggtggacgaccactgcctttgtctagtttacctacccaagacctcgggttctgtatttgccgcaggacattgctggatctgagaacttttcgtgaaatagccttgccccgcataccggcggaaccagcagatttcccggtgtgggcaacgccttctggcgtatgagtgactacagatccatcccttattcgatgatccttgaattttatgtgtctgccttctcgtagacacgcctgctgaaacatgcatttgggtacgcatctttccatctgcataccttgactgtccctgctctgtaacggggtttaagtctggtcacgaggaccttgaagaatgtagacaagtctgttgagtcctgtcccggcacactgaggggtaggtcgttttcatgtccggcgaaaggcttgcttttgcgggagcgtttctacaaggattaatgctaatttttgccgggtctgggcccccaaaatagctggattcatcatcgtgcgaacgaaaatgtgtctgagggcagtggtgttgcgaggcaccctcccgtgtgctgccacgtccaacctttctctggaagaggaacgcttggggcttctttgccggacacacatttttgctccagctgtggcgttgtttttgtcatacatgtggaaagctgaccctctgtttctcgtcgtcgcgtacaatttcagctgaaatcctcactttgcgcatctttcttttcggcgcttcttttctccggcgagcgtccacgggtcgtccgtcgctgccgctcactcttccctcctcacgtttccctctttccgcgcttcaccgcagcatgtagtgtaagcgacaagtgcacgattttcacggcctttatcgggtcaccgttgcgatttcggccgtttgtacaactcgccatccagtccggtagagctcgattcgcgtccctcggcggttccgctcgcaggttttccatttcttttggcttctcccgcgctttctcatcgcttttcacttgacagcgcccgggccgaccggctttctagcgttcctgtccgttccatgtctctctcccgcgctgtttcgcgacttttttgcttgtatccgcccacttcccgtgtggcaggaagcctccggatgtccgccgctctccacgtacttttccccaagacaacgccgctcttttagcgctctccgtccccccttacgtcgccggtggtcccgcgaggcgtacgttcacgtttctgcctggccgccgcacagattccgccgacccgttccacccattctcatcgaacggggtgcagttaaactaccgaccgcgtcttttcttcaaggcagttccgctctcttcttcgtctcga

SEQ ID NO: 691 - DNA, 2174 bp, Toxoplasma gondii
  source 1..2174: mol_type = genomic DNA
ccaccatcgctcggtgagtgtttgtctgtgtgagcaaaatttgtttttccccggcggcaattgtggactcctattgttcacgacttccgccacgtcttttccaaagggatgaaacgccttacgtaattggtgtgtggttcctctagctgcgattataatagcataaacaggagaattcagggagtgtttttggatttggcgggggcaccagattttgggaatctcagccacattcagaatcacaacaagtagatagcctgacagggtgctagactggaacatagcctagacggtttcggtatgaccaactgaacagcaacgtctttaagcggctgaacgcggatctcctcttttgcttcctgtgagcccttccccccactctcctgatttcttgttggagcggcaccaacgtacgttgctttccacaatggttgaaggaggcggattagtgaggacgatggtatgtgcgctaactgatggcacacgaccgcacacgtaggcatgtctattgaaaaattcatgcaactggaaatgtttcgcgcgtttcgtagggttgcagaagcacgacgaattcttaggggaattgcggtgtggcaactgtttgagtttgcactggtgacgccaggagcgttgcaggagttctatcacctccaatggtaggaaacgtgaaccgcctctcgcggtaatcgcttacaacctactcgtagggagagaagaaacatatgatacggactttctgaactgaccagtaaaagaaaaagaacatctcttgatttctattttgaagttgcggacgattgttgacgcggctccatcacaggccgcaatgactcgccacccgattacctctttcgaatcaggcggtcagactcaactgccatatcaaaatataaagcagcaacgattctggagagcagaaaaggggcaggcgcatcgtcacacacgtgcggacttgcttgctttcgctggacgtccacttgccggaagaataaccaaattgcgagttttactcaatagcctgctcacatcgacaatcgtattatacacggctccacagagtgagcccgctagtgttttaaatctttagttaaaggacgtaaaaagcgacagaacgactctttctacgtggaaaaatctttcccacgccgggactcgaacccgggtcgcccgggtgaaagccgggtatcctaaccacctagactacatgggatgatgtttagcttgaccggctttccattagctttatggaggctgctactatggactggcgaggcgaaagaaccaaatcacaacgtgtactgtagaatggtgacatggaaacgtcgagaggatcagagaactcgatcctcaagagaacagatacattagaagtcatatctgcatgcacgtggtaacatttttgccaagcatgccgtggcggacgcgcctctgtcgttgccgcaaaatcacaccagcgaatgattttttttcctgataaacgagtgttgtctaatatgggatctattaaaactcagtcagacatgatagcacccataggtatattttgtagagtcccagaggtccttaatcgtttaagatgcatgctactgagacgcaagggcggcacgctgcatgcgtaaggtaatttgcttgggtaaaatcccgcttgccttcgggttgcgtcgcagtaattttatgtgggtcggttctgacatactctcaacaccaatgagctgctgccggattacgatcaacgcttatacacctgacagtgttttcgtcagcgttggcgaaaaatagtgggtttgtcttccaacctagttatcgaaagcgaaccgtttacacattttcccattttgtgggtttttgcagcaactctcgaggacggcgtggtttgggcattctttaatgggcatgttccctctgcccgttaatattgaggatcggtaccagaaagtatcgtagccggtgcactcaattttccccgtggtggtggtacgtgttatccaacgccgagcacctggggtcagctgagttgactcggcttttgcctttgacgcgagcaactctttgggaggcgacgtgaggaacaaaggaggcactgtagaagcttggcacccaggctggtgaagcactggagggagaacgagcctgggattgtggcgaaaggctctaacgatcacgggaactcaaga

SEQ ID NO: 692 - DNA, 1962 bp, Toxoplasma gondii
  source 1..1962: mol_type = genomic DNA
agaagagaacgaagacagggaggaacgccgcagaacaggagacaacgtcgaaggcgccgagggagttccaggagagggaggcgtctctgaggcgagaggagagggtcgccggacagctctggagagagaggagagatgcgctggacgcgacgacgcctcagagtaagtgtggagagaggataagcgagaaatcgaggcgtcgagaagagtgagaggagcgacagaacgcggaaaaccggcgcgtgcagtcttcagagaactgagcctcccctggagctcccgcagagaggctggcgcctctgtcgtgaagtccgcgtcgtccccgcgagcggcgcatgcaggagggataggacgcgctgccaagaggccgtccagcttcgaacaaaaacgaaggggaagtcgcggtgtatgcgcagacaccgcaggactgagcacgcgctcgggcgccagctgcagtcgcagcatcttgccgcgccagaaactcgaagataagccgaaaggtggaggaaagaagacgaagaagaacgaagacgcggagaaaggaaggagagacagagagacgaggagaagaagaggatggatcacgcagagagaagaagaacgaagaggggagaagaagagtgaggaggcgaacagaagagaagaagagaaagaggaaggggggaagacggacagaagaatggaagacgcgaagagaaatgctgcagaagaggcgactctctccagcgacgcctatatctctagctgttcgcgcgactgcaactgagaaaaagagaagcttctacaagaagcctgcgtcctcgacgattcgaagaccttctgatgagcctcgaaggccaggaagaagctgcatgcgcgtgaatgcagcgtttgagtttgtcgacaggacagagaggttgtttccctcttagttctcgtatcacttctcctctgtctcctcatttgcgttcgctttcgacagatccgtctttcgttttctcccctggcggcggacagctgagggaacctggtgcgtttccgcccgtctcctgcgcacagaggaaaagagacagaaggcgctctctcgcagagaagaagaaaagtcaggagaggagcgagacacgaacagggtgaggagaaaggagactcggaaatcgagagagcgaggaagaaagcgaggaagagagaagcgcgatttgcgcgccttgtgtgtgtgctgcatgcgcatgcgtctcaccacgagccgagtcaacttttgcgcctttcctgtgttttccgtctaactttcatgcatttcctttctaggtgtcttgcgccttcttttggttcttttgtgcttccctagtgctcctttggcaaagacgagacatgagaaaaagagaaaacgcacacactcaacagctttcgattctcgcggtggaggtttttcctctctctcccgtcttcttttcccggtggtcgtcctcttcgtcttccttccatttctgagtcggctgtcggcttctcggtcctgccaataacgtctcctcatagctctctcttcctgcttgttttctcgcggtgccgctgccagtctctcctccgctctccctccttcagtcaattctccactcctgtttctctccatctcctctttctctccatctcctctttctctccatctcctctttctctccatctgccctcttgtctatatcgccctctgttaaagttgtctctctctctctccacctcggtgtgtatccttggcgtttcttctcgttccgcctcgcgcgattccgctgccgtctgtgatgcgcatatcctttcgctttcccctttgtgcatttttgcgccgattaaccagtatgtctgccgcgtcgtcttcgtctcccttctcctcctctcgaagttcttctctctcctctgttcctcgcagcctcgggcgtctccgctgatcgtcttcgtcgcttcaccggaccgaggagcgccgcagacacaaga

SEQ ID NO: 693 - DNA, 1852 bp, Toxoplasma gondii
  source 1..1852: mol_type = genomic DNA
actttgaaagaactgttcgtgaaggtgtgagtctgcaaggctcgacgggtgaacctccaggtgcccctgtgtggaggaaagcgtacctgccggaaccgggtcctcaatggggacgttgtacacgatctgtggtccactctgagtgttccccatcttgtcttagccgctatctgagacaaaatgcgaggaactgaggaaacggaggttgcaccggaagtcgttcttcctcgaagtcgacaggtttcggaaacaacacagtacgcagttgagaaacactctctccttggcgagacagcacacacaggcgacacatgaccgacaagatccggtagaaaaaggtactccctgcatcgggaataagcagagaaacaggttttcacatgaggaactggcgacacaccgtgtgcacaagaacgcctctcgtgtcgcgcgtccagactcagcaggcaagaaaagatctacactcagagtcagcgtacaacggggatttttaacgcgaatccacttcgttcgcgccttttgcaggacgaaaacctacgcgtttgctgcggaggatctgtacaacacaacctaatgagatgtgaaaaggcaagacagcccacagttctactttcgtctggcacacacgggagatgaaggaaccgaaacgggaagagagagtggtaaaagagcgcgggacgcagtgcagggggaaccgagaaagaaacgacggaccggacgcgtaacgcaagagccacagatcatcggtacttcctcgacggtgcagtgtacggatacctgggcaaccgccagaaaaacgaacgaagccagactggcaattccgaacggacgggacgaacagctgggccgaaaccagagtttggccgttttctccacgaccacctttgcgtctttgtgtgctggttcgccggtattcgttgtcccttcccctcgtttaccgtggacacacagtcgccaggaaaacgcttaccacagaaaaaggtcccttcgagggagaacaggaggaatgctgagatgccagtccgaggcgcagcgatgcctgagaaaagtgccccgagagacaaggaccaggaagaaacgagagacggaaggagaaacggtactcgagaaccaggagacgccccggggaagacagcgccagggaacgcgatctgttttcacacgtgcgagaacgcagacgactaaaccgtatccccagactgggtgcgctaaactgggagagagctgtctccccgggaaagaacctttacgggcatctgtcggctcagaaggaacaaccaagactggacaaaagcagaagaatctgacgaaaagaaggcgaatcgggtgggccgtctccgtcgaaagcagtgctgaaccagatccacaaaagccaggttgcacgaggcacgaatccgacgtcgtcctggttgggaaaaaaagcacagccacctggaaatggcgatattgcccctcttcctgcaagaatgagcccccttttccaaacgaaaagcgtttcccgaaacttcttttggccaaggactcgcatctgtgcagcccctgctctccaccatgcggttcgctgtcactcgcgcgacatcgcagctgcatatccgcggccctgttccacctctccgcggtcacgtgtgtcacctgtcagtggcgccagcaagacacgtgcaacgtagaggggcccaaccagaacaaggagcttctccggaagtttcttcagctgacagtctctctgcagaaagaggtttggcgttccggcccggcttctcaaggagctggtccgctctgcaggcaaactaccgatgcagcgataccatactcttgcggtgaccccacatttcgccacatgtctgtctcacga

SEQ ID NO: 694 - DNA, 1981 bp, Toxoplasma gondii
  source 1..1981: mol_type = genomic DNA
cagtgcacggtctaggtaacggtagcactatcaagcatcttcttccaaatatatttcatggaacaccccaaattctcatgtttgattgccatttagtcgctaatatacaaccatccaaggtatatttatctatcgcaggttcgatctaatgtcccgttatactatgtagacctcatgccttctgatactgtgaatgcgtgactctcctaggcatcgttcaagtgagaagccgtttttaggattcatcagaaatgtacaacaacgcccgcccctttctaaagaggcactactctggacagcactctctcacgctgtttgacacgcccctgttcttgcctccgttcctgagggtctgtatgaacaaaatttggctgtaggtcacacctccgaagaggcaggaaaagcctctcccaactggctatgtatgtgtaagcgtgtgcgtatcggtttctctctgggtcacgtgtcctgcacacctgcggtctccgcatttgccagaacgtgagctttgttccgtccgtactttggagttggtgtgaagtgctcgttttttttcggcttggactcttcaggccgagagccgcgagggaagaacgcgggaaaaccagtttctgcatcttcgtggtgacgtgtgcctaaaacaggcgcctgccgctcgactcgcggctgtcaagtcctgtagtacgtacacgcgcaagcacgaaggtctggagaaatttctgctcggcacaactgcagcggactggtcgagggatccgcggccgatgaaagcgaggcacgcggagaagcgttttttccagcgaagacgtcagcgcgcagaaaaggggggcgcctgaagtgccttggaggcttgtgtgtcggcaagaggcgtttgcggcgagagaagcagcctcacgacccgtttgaaacgccccttgaaaagagaagcgactgaagagagacagtcaagcgggatactctctgggcgcaactgaattgttagagggccttcggctgtacgtacacccgagcggcaaattcttgggtgtatggacacctggacacgcgggttgagtcgcgaagccggcactgtcccgccccacgctctgcgaagtgggtcgtctcgcgctgtttcgacgggatttttttctcagcaatcgacgcggcgcggtgtttccgctcgagtgtttcctcgtttttccgttcctttcgcctttccctgtctctcttttatttcggcctcgacttcgcgtgtctccctgtctctctcctccccagctccgcgaaagtcggcgtgggagttccaccgcgttttcgagcttcttttcgtcccgtcttgttcacgctttgtttttttcccgcctctcgctcagacgtatcgctgagtctcagatgaactgagaagaggcgaacaaatctgtttcccgcagctctggcgaccctccccgtcagctgctctcgtcgaaaacagctctcaactcgtcccagttccctttttccgtcgcgcgcccgtcgagctttcttctccttctcctcccgccgttgcccccgagcagaagagcgtccataataacgaagttctttttcctcgtgtgtctcttcgcgcttctccagtctcgcttgccttcgtctcccgtcgggaacacgcgccggcctctctccttcagctgccgcccgcgctcgctcccttctccagcgtcttgtttccccgttttctctcccccatcctctccgcggggtctctgctcaaactgactggctttctcttttttccttcccgcgctctcacgttctctcctcgtcctccgcctccttcgtcactggccctcgcgtcgtctgccccccaccgcagttcttctcctctccgttctctccgttcccctccgttttcctcccggagttccctctggcctcctttcggcttctcgcttgcctgcgtctcctgcgctcctccggcaacaaaagctgcttcgctgcactcgccttttgcccttgttcaaga

SEQ ID NO: 695 - DNA, 3004 bp, Toxoplasma gondii
  source 1..3004: mol_type = genomic DNA
agtcctgagtgacggcaacagcagcaggagatgagacaccgacagaggaggcaggatccacgccgaagtggacggaagtgacgggagaggaggcatctcgagcagcgttgcggggagacctgctgaggccgttcttgcaccccagaagaacgtcggtgtctgcagcttcataaagaggagaccgtcccgaggcaggcagagacacattcggcggctctgcttcttttccctcagtttccgagggggctgagtcagctgatgcgggcaaaggagatgtggggacggccacactgcatgcgttgccgtagggttcgtcactggagagagatgggtgcggggacgaagcctggacagacccagagtacgaggaagcatcgagaagccctggagcggaagccgacagctcctccgctacagactgactgcgcctttctccgcgatcatccagcagctgtggagacgactccgcctcggcttcgcgagagccctgtaaaagagcctcgctctcctccatggtttgtgtgaaaccctgcggccatggacgtctccccgaagcattcagggacgagttaaactgcaggtttatagatgtccacggtctctaccaggtccaagttcgatagtgctggcaataaagcgccgcggggtgtggagacactccgcggttgacgcacaccgttccttgaaggacgcctcttacaacgtgacacaaaaaacagcgaacctacgcatgcttctttcaggtgaacaggcttctgagaagtcggtcagaaacgcagacacaaacaccaccagagtgcaaagcgaggaggcgcacttgggggttttcggtggagaaacttgaagcgatctgcatgcacgattgcggacgcagggaaggtagtcgtggcttccccagatctcctttaacgaattcaggagggtgagaactgtaatccctccgagaaacttgggtggaagacgagaaccgtgaagggccgcaggactacacgagtccctcagtgaaatgtgcagcagggcggctgcctcagctggcttctgactggcactgcatgcgccgaggacatccggctcctcactccttttgtggtgaagagaaaacagtcagaaaacatgaggtcaactgtgttggtcgtacgcgccggcgctgcggacagtgtgaggggacggcccagaacactgcgcgagagaatttagagcgctttcccggggattccaagaaagcagaagcaagcaatcccctcctgtgcggaagctgcggctggcacgaactgcaatcactgcctgttggttacgcggaatcgtgaggcacgaccaattgtgcggaacccgggccgttagactcggcaaaagtgagactcggacgagaaaacactccaacgcttcacgagtaactgaggcacagaaaataaactccaacagaagaaccgtgaagccccagtagtggacctcaaatgtaactcgtgcgtcgaggtgtgcgaggaactcactcgtgtaagcaaatcctagagctgcctctccaacaagaaaaggctacggcggttcgcctgggcgcttctccgggagagaccagcgtgagtacgcagaaatgtcagactggagtagatcgacaaagttctacgcggaaaaaatggatttgtgtccactcagctggctccagggccctttgaacagttaatgcgacttcgaggtgacctggttcgaaaagcagagagcgacggcggaggcaagcgacctattgggaagaaacagaggaaagaaggtgttaaaggggagaaattcgtcgaaaaagccccgggaacccagcgacaagcggtgtcaccctcattttttccagggctgacggcggctgcatgcaggcgtctgcagaggaaaaggagagctggaacaagcgaggtgttctctcgaaaggacgcaaagatcagcctcaaaacacagaccgcagcgaccgaacggtgccaaagatttgaaaaacacaggaaactcgagggtggaagatgaacttcgcagaaaaaaaaggggtagatatctcaaattccaacacgcttgtcgagctgctggcttcgacttgtacgaacaaaaagtgtgtccctcacaaagggcttgtgtgctagccgagttgcgtggattcttctatcttttttctaggaccttttatgcactcatagacgcagatacacccaaaacgaatggattgttggtgattatgtcactcctggtcaatctaagatttccttccgagattcgagctttgaagacccgaatgctcagtcgtcgacagtgcatgactcgacgcgcagtggatcagtaattgtttgcgtatataatgtgatcgttttgatggtggttggcagtgccgtttctggcctttctaatcactatcgctagtgcttctcctactcttcttgcccaatctcgaccatgttattccgtttgtcctcgctcattctcgacagtgctcttcctgctctcccgtcttctcagtattcctagtcctggtcgtcttgctttttcgagatggcccttctccacaggcaccaccgaggagacatatagacgaaagattgcctaggacaacggcacccccaatgggaaacaccactttcgctggccgtgcacacaagcgccacttggagtcacgttggagtacggactggatgcacgaacatgaagcaagacactgtcgcattcactgcacacaaaatgcccaaagtgaaaatatatatgtaccaatgaatatatatatatatatatgtgtatatatgcagcagtgaagaagaatagaaaacgaatttcgcaagggagggctaccagttgcaccatgagcgacctaaaggagtttggcctgtggcgaaaagcgtccacaggagcctcttgtcgactgtatgtagactgttttcccgctgttttcaattgtcaaagccgcatcaaatcctgaactgttttaaatctcttctcaacgggaggatctgaacaaagtgggtcgaatgaaacgctgacgaaa

SEQ ID NO: 696 - DNA, 3115 bp, Toxoplasma gondii
  source 1..3115: mol_type = genomic DNA
ctgacccatgcctaggtagtcgttcgagcaccacagctgtacttcagtctgcgagagctgtttcgcgacattggcgacggcctcggaagcgacagtttcagatgcttcttcgttgaccgattgacacatccacctgtccgcttcttcttgcgcgcctggtgcgcctgccgcctctctccgtatctctgtgcctccctctgcgttcggcgacgccgcggcggcctcgcgagcaccttgggctccagatcccgcagactctgcgtcgccctcccagccgctttgtcggtcgaagaagatcgccgcggtcgggaacgccccgcgcttccgctgcagctgcgcaaagacgcggtagcggccctctgcatgcagttcgtttatggccgccgtgaaacgctgctcgtagaagaacggagacagcgccgaagcgcccgccgcctcgccctcgagaccctccaagtccgccttcgactccagcagagaagccaccggcgcggccgcggtcagagcgtccgtggagcccaaggcgtcgccgcggctctcgaggcctgcggctgcagagggcgcaggagacggcggaaaatgctggtggttgagagtggtggcgcgcatgactgcaggcagcgtggaggagtcgaatttcgaggctaccgggcaaaaggcgcgaaacggaaagagcgaggtcagagactggttcgtgtgtcgagacaagaaagggcacaggtgcgaagacgcagccagcgacgcggccgcgcgacgagcacgagcggccgtcggagacggacgcaccaggcgagacatctcgactttcagagaatgaagggagcaggaaacgcagagagagaggaggcgcaaaggcaggaagagacgcgcaagagggagggaaagacagagaggagcgcgaacggaagggtcgcggagcgacaggaacagaggagagcgagacgccacagcagggagacgggagaccaaagaggacagacgacgagaagattagagcgacgagaactggagagactgacaagaaaactggggctccgggcgggggggggggacaaaggggaatttcttcacagtgctcagggctacgaagaaagagcagcggcgccgcgcacacagacgaggaagacgaggatttgcaatcgaagcacaaacccgtgaggatttcgatctgccaagctgggcctcccggcacgcgtggattcctcgcctcgagagagacgcaaaacgtaaattcattcaccagagaatcgtcacaggacaaatcctctctcctggaaacgtggcaggcggcggggccggcccttcacaggatcgcgcgatccgcagacctctttctctacggtgtctgtacacccaggtgaggtctttgagacgatcaactgagacgtcagccgagcgaaaagaggtctttctctacaaaaaagcggatcagtggggtctccgccacctcaacgctctgtacatgcataaaatctaaatcgatcgtgaactgcggcttccgggtttctcccaatcgctggaggggaagcgagccaagggcgacgggcctttccgtccctgtcggaacgccggcgaatcttccctttctcgggtgtacatacaccggaattccagccgcatttccccctggtggtgcggagagaaggaaccgacaacgaggggtggaaagcggctactctgcgtcctcgagagggcgacaaaaaacccaaggcgacggcgtggcaccgcggaagttcgttccgggaatttcttgcgcctggaatctgcgagttctcagtgtgtcgcgacttctcgcggttcctaccgacaacgaaagcagcgacggcccaagcgaacccgtcgcagtcactgcacaagacagcagcgatgcgagtttccgcggccagagagaaaataaaacagaaagaaacccggaagaaaacgaagaaaacgaagaaaacgttgccaaacaggcgccgtaaagagctttctgtcgcgaggccctggaactgccccgcaatgtcgccggcacatccaggtgtctctgtcgctgtcggccgacgtagacgagcaggcgttgttgaggtctgcatgtcagctttgtcccctaatttttcacaaacacgaaaaaaggcgtctcttttgcttgttttctcgggtgtatgtacaccagagggttcgactcccacgaaccgacaaggtcgagttactgtggtgcccgcgcctttgcgggtctcctcgcgtggctttccgccgtttccttctttcttcctcttccttctttttctcttctgttcttcctctccttctcgctggcctctcttctccgtgtggatctgcttccgccattgtttctttcgctttttctgtccccgaacagacggcgagacgacggcattctcgctttccgtcgctcctcaccgcttggagacgctgacctttcttccgctcggttccgcgacgtctcttccctttctccgttccttaaaactcacaaatttcctgtcttctcccctgactcctcttcgtcttttgaggaggcacacagtttcctgtcgctttccgctgccctctcttcggggccgcaaaaaaactcgagaggtttccggcgaagaagccctgccttttcggtgctgcttcagtcgatccgcaagctctttgataactgagctggtcgtggagagagagaggagaagaccagttggacatggcatcaggaaagtttgagtcgctgctcgtctctagtctctggccgtggtgttcttttctttgggagcagaactcctgacgctctttgagtcttctcccaggaccgggttcgctctgtctctttgaacgtttttcgctgtagaaatcatctgagtcagacgcttcttccacctgcagttctcgtctcttcgtgtcgaatgtgactgggcggcacagagcatgcctgttcagtcgtgaagaagaggtccaagtcgcggaggcgagttcccctttgtctctgcgaccttcttctctccgtgcgtctcttttcttggtgcaccagagctcccgcccgtgaagcacgaggcccggtttcttctctctccgctacagagcacccttgctcttctttttgggacggcgcgtctgaggctgattaccgtcagga

SEQ ID NO: 697 - DNA, 2034 bp, Toxoplasma gondii
  source 1..2034: mol_type = genomic DNA
cctacttctcggcagcgatgtttcatcgtaatttcacgacgatattcttcagtcattgcaatcatgttaaccgcgcgaactagggaaaaacactttctgcagtttgcaaacggcagccaccgaatggcgttgcgtggcaaaggcccgttgtcgcacaagtatatttcagtctccattgtttccagaggcatccttcgtgcgcacaagacttccttgatgctgacaaatgcagatacagaggctcggagtcgcagaggctaatagagtaaggtcacgttcatatgggacgtaccacccagtgccgattttggctgatgaagggtcgactccagtcgcagaagcatgcatggcgagggttgacagggaaaacaacgcctcaaaggaccggatggcttgtgcatcagagactgaactgtactgtagacgacgccaaaggtggtttcttgcaggcagcctgatcgcgagtgacactgccgaacacggaacagtgtcttttttcccagtctagtgaattatagtgaacacgtataattaccgcagagggacactctgcaatagaaaccagcctcgccttggtgtgtggggtctacgctgccaggttacctctatgaccccttcatacctgcttcaaatctacagtctcgttgttgatcgataccaaagacacgatcatgcttttcgctgcaatgcggatctactgttatgcgggaacaaaccgaattcacatgcggatttagagccagagggcgtcacaagtaggaaaaatctcagcggagcccggcacggttaaactgcatcgtagcgagctgaaaaaaaagtgcctgtgcgtctcatgggatggatggacgctgcgccttacgttctatgaataacaagatggatagataaatggacacgagtacaggacagcacgagcaattactggggcgtgctgaagcgctggtcgtcttcacagttacccaattgttttcggaagcgtaaatatgttttaaaagcttttggtaaaaacacagggtggaaagttgcaacaggcccaatggaagtagtgagaacatttcgacggcgcgttcccatcaacacatttttgcccctaggaactttcagtacacctgccgttgattcgtgtcacgagactgcggtgctttcttggaacgaagcgtcgcagttgagggtatgctacctatcgaaatgactaccctgtagtctacacaacaccgacctgcacaataggtaacgtcacgcggtcgatcggagtaggccaaaaatacgctccgactcctaccagaacagcgatttgtcgggtggtcaccagctcacactcgaggtatgcaaatataaaggagatcctcttgaggcattgggttatttaacacataattcttccactggacaaagattgccaagtgtcaaatctcattttgggcagtggtgacagttagcaacatggctgggatcgctcgatgctaccatcaatcgagaaagaatgcgttcgttgtttgttccaaacgatcgtcacattactaagcggccactcgtgtccgagcgtgctgcaatcgaatttgttttcgtaatctttgtcgcaagcggtcctcttgtgcatgggcgcagcttttgtgctcgtggacctggaccttccgtcgcaaagaatcacactcgctgcggcagacgtcgctcagagggggtcgctcggggctgtggccgtccgcggcatttccaagcgggtgagaagggatgagacttgctagtgattcgcacttgtcaaccatgtgacttcacatacacggaccatccagcactcttcttctctttggactcactgccgaactggcgcgtttcgtgtgtctgcttgtcgaggttatgcgtcgtgtccttttttccctgccgcgctcttgtgaggggtcatactcgcgccgcatgccagtgccccactggtgttcgattgctgccgctgcgtcactactagagcatcaagttctgtaaagtttcctgggttctctcatccacactgaatcattgtttagaggtctagaataa

SEQ ID NO: 698 - DNA, 4386 bp, Toxoplasma gondii
  source 1..4386: mol_type = genomic DNA
tgtccatcaaacgcgacacctccgtctggtactggtgactctcttggctcttctgcaccgcctcctgctcctcggcggtcaagggcgccgccgccttctcgctctcgtcgatcggcagcgaccgcggcgcctcctccgcagtcaaaggctctgcggcgtcagtctcagtcgccgccacccaaagcgccgagggagagactgaagcagaaaaaaagctggacgtacatgcaacggagacgcccagaagcagggccgcgaaggccagcttcttcggggtcctccggccggccggagacattgtggtgaaggcgttagcggcaacaggtcagaaccgaagggcacacagactgctagcaggcgacagagaccgacgccttcagagtcgacagagcgagcgtgaaaagacaggcgctctgcaaccggaatccaacaagacagtccagcgaagtcgacgggtgcgaacctcccagagagaggggaagcgtgtgacgccggagcgagagccgagcgcaagaactctccgactcagctgtttgacgcaagagactcgcgcgaagcctgcgaacaacaggaaaacagatgcaggtgacagagacaggatcgttctcagtcgagtcttttagcaagacggcggacatgtagaggcccgcgagtgtgtccgggaggaaaagtcgtcgaatatgcaagcccaagggcgtctgtccgaagagcgcgagccctggccagtcctcgatgcatacgttcacaagaaaccggtccacaaaacacaagcgcggtggcaggaattgctagcgtgacgccttcttcgcgcgggtcatcatctacagtcaacacgggagacttcatgtgaacgtcagtaaacgaagagatgcgaaggatatgcatcgacgaaacggtacacttcacatgcgcgtcgacgaagaaatacccagacgcgcttctgcctgcagttccaaggcacgtcaagagtgccggagaaataggagaggccaccactttcgtgcaaaggacccagcggcagatctactactactatctctttggacttcgcgtccacttctctgtaaacgtcattgtttcaacgcgaattcatgcactccgggggcttgtgcgcgccaggcgacggaaacgcccggccgcgcgcagagtgcacacaaactcgagtctacttaatgcgtgaaacaaagacgcatttcgaaagaaaactcgcgttggagcggaaccgaaggcggtccgaacgtctccacggaacgtatgacgctgtccgctccgtctagaaggcagtgcacggaagtctcaactgtacacacccatgcgtcgacgcttacaccaaaacgctcacgttcacccgccttgaacgcgagttgaaaatgcggagttgcagatatgcacagaaagaaagggaagggggccagaggagaaggccatcggatcaaagcaaaaaaaaagccttggtgttcggcacccgttcgccggcacagatgctgccggatggacgcacacccctgcgtcgttccttgccacttgcactaatctgtcatgtcacgcggtggataaatgtgtatatctgtgggcataactacagaggaatcgctgtcactgtcccgtaaaacgggcaaccggcattgccttggcggcctccaacgtgaggaggaacgcccaggagttgcttttcgctcgactgagaataaagagtgaaataatatggtgaacttcaaagaccgagagtgcaatgcactctcgatctcccggtatgtccaaagtggaacaggtcgaaacggaggaaaactctctgcgtcgaggtgcacgtcccccgttactgccgcctcagcaggcgggtggcacaacactgaggacggggagaggcggcctcgtttccgtcgactcaaagcgacacagcccattccagagagtgttctctggattcccccgggttttttcctctttcttcccaccacaagaaagtccaaggtagacgcggttctgccgtcccgaaagatcggggaagtgcgccgaaagcgttctgccttctcgcgcttcgttgcgccctctgtttcgcctctttctcccagtttcagcccgcgttttctggcagagagatcgaccccgtatgtggctggaattaacagacagcgaacgacttctggaagtcagctgaactctcctctccatggccttcttcttccacagcctctcccgccaggactcaccggaaaaaaccgcagcaccgccgagctcagtgtgtctgggtgacgtcgcgccttttgtctcctttcgacggaaaggcggaagaaacggaaagcaactgagacaaagaggagcggcgaaaaagcgagacggtcctgtcactcgtgcgtcaaagtctccgccgagattaaagaaactggccgcgtcgcagttgctcgcgcctcgcgttttctttgcacttctccaaatcctgtgtgccaggctcgaccccttcccccccctctttcttctggggggcgagtgcgagacacacgcagacgagaagggagggggtgaggtaaactccgcgggataaacatggtcgcgcgagaaccagcagaccactgaccccacatttctatccgtccaggtcactgccacccggaaaaaaaggcacatggcagaagagagagagaatctcgagcactgtgtccagttcaaaatgggggatcgctcccgcgcgtccacccctacggaatccgacaaacgttccagcaccggggcgaaacgtccactaatacaaaaccacacagagctgcagcacacataatgcgtggatgagagtgcgaagatatcgaaccatctatcaatacgtacatgtatttcacaagcagctaggcacgaagcaatcgagtatttacgaattcgtaccccacttttagatgtgtataggaatgagaaagaaacgtcagttgtgccacaccagattcccgttcattttcctcctttttagcttcgttgtctaggctttcaactttcgcgttgtgtcgccttctgtgtcccccctctcctcgtgcccttctatctcttccgtctttccgtgtcgccgcttcctgtctgttctattcgcgaggagcgcactcggcacttttatctgcaagatcaatagttgaaggagtggataaaatttgcgcatttcgactagccaagaatccatcgacagccacatgattcgggtggttgcttcaaccgcagggaagacaaaggcacacgtcctgctacctgcgtcctctcagtcgtcttctttgtctctctcaaccagacacccgcccgcgcggcgaggcctttcggtgccaagggacgcacgtttcgtccttatctttcggagaaaggagacagtttgtaactcttgagtactttccctgctgactgactcgatcgctggcgtccaaccagaccggtccgccgcgacacggtgctgtccattctcgaattcctggacactcgtcccgcacattttcgagagcggacgagagaaagattcaggaatgagaccacattgttttaggcaagaaacggcttctaaatagaggcggagcagtgccggcaaccgtcaaccccctccccatggacctcgtcgatcttgcctctcgaggacgggagggtcgagcaatgtgcatggatgggcgactatgtattgttgagagactctctacgctggtcagagactgagaaaagctcgacatctgactttcttgcagatgtcttctttccgtttgcatttgtttctgtatttttttgtggtttgtcgcgctcattcgtttccttcgtcgttaaggtgacttccgcgatgggtgcccagcaggccgcaacggtgttttccacgcccggcatgcgggcgaaaaccttgtgaatcttttttccgaccaaactgttggtttccggaatcccgtcattccagagtgaacatggtgcgtggcattttctcgaacttcatcttcgaaaaaaagccgagagtgcgccgccgctgctctctgtccacttcttctgctcttggttgcctgctcgttccctgggtttcactccttgtttcttgcttctcctttttctctcgactctgtcttcgagttgtgagcctctagttcccccgtcgttcttccccattgtccacttcgttccgcctgcgctcccttctcgagtttttcctgcttgaccagccttcctcagagcgtggtgacccttccccttctttcgccgtacgcgtgacctccgggtactggcaagctactggaatcgcaggcgtttagcgtcttgagcaatccagtgcgggggtcgtgtgcagcagtcgtgaagaaccaaacctggttgtctgtatcgcgtgacggaagtcagtcgaaaactctagaccctctcgagttcgtcccccccccccagatgcca

SEQ ID NO: 699 - DNA, 3203 bp, Toxoplasma gondii
  source 1..3203: mol_type = genomic DNA
ctgatgatgaattcttcattgctgaaaacgccaccactgtactctgatgtacgctgttcgggtgcaggctaatggcaagcagatggatggggaaaaacggctgaatgtgggaaagtacctcacggcaacagcaactctggcggatactgtttgtctcataccaaaaaaaatttagagcttttcattgattccgcctaaacggtttcatcgtctctttgtgctcatgggggagactacgtttcttgtacaaagttggcagtgctctaaataggcgagaccttgttgcctcacagcgttttgatttctttcgaaacatgctgagtcacaaacttttcagccgtgagggcttctttgcttgccgtgcatctcgccacggcggcatctacctgatgttctctacaaccacgcgacctgcagccgctgtggactttacaattcaaggcctgctagtgcagtttgtcgctcactagaacacgcttcttcctctcttccacgtcaatgaccgcagcgatagggattcgtccactgatgttgcccaacagtaccctttgtaagcgttctaacagccgcaagcacgaagtattcaaggataggaacgcttctggaccagttagtgtgcctttcagagacaagaactcacaactcaactaagacttcaccgtcttgagggtagtcaagtaacagtcactgctttggatgttcttcaagcagctgtggtatattgtgtattctttagaatatccataattggctttgaattacagtcgtaacttacaatcgtcggcagagccctaatttacttaaaggctggcatagtcgccgtgcctccagatggggtggtttgttttgcccgaagccgcatgtttgtacccaccactttcccggagttgcctacgatctgaatagcgcacccgagctcattttacatgctgcgcaaagaagtcggtctcttgtgatctatttcgatgccgtataaatacttgattgagagggtgaccctgctgaagacataaccggtcagttgctttccgcaaagggcaacaatggagcttgaagccgtggagaaacggagtgccctttgatggttgtgttacctgaaactgatgccatgtggcagcttccacgagacgcgatgggtagtgggctggccccaacaccacagttttttgacaatttttttcagtgatcaaccgaccgtcctaaacgacaatattgatgaccgcttcaagataaggtcagtacgtctcttttgagcccaccgtaatgacctggcctgacttttatgtcggccctcaaagtggttttggctgcatatgctggctcgttgccgactctgacgcgaccgtatacctttgtctcttcctcgtgaaagaaacgtatttcagaatgtgaatatgagcacaagtgcggcacagaagggcttgcaaacagaagagcaaaccaggacaaagttactgctccaatgtatcgtggagtaccgccgcctcctcaaaacggaagtgattgtgggtacgacgacgaagaccgggcttctgtaaatcaggataggctaccgtccgcaagtggaatgttgtgcagaggacccgcgtatcgccctgaattcctgtgtgacggggaagtcgtgtgtatctgacgtgctttaacatcacgtgtaatacaggagttttcagcaagatcaacgagcctggccaacagtccatcagctatcgaaaaaatgaccgaggcacatgtatacggtgcatttcacaactgcttccactgcctacacatgtttttgaataacgtgtaatggactgggaacagcgggcatggcttacaaaaaactgagccagttctagtttctttcctttcatagggtgtgagatgtttccgctgtaggttcatgtcctaaaatatgcgaggaaaataagtcacaggctagcatttgttttcctttcagtgcagctgttcagggatcctgaggtgcagttcttcaagttttccttgaaacaaagaagactttgtcttcaaatgaaatggtaagcagcttttcccctagtgcaacgctgtgcgaggggggcagcccgcgccggggatgcgctgagtgaccacgtcgttggcaaagaaggaattttcttggggtgtaatttctttttaagattcaaccacattttcttgggcatatttccttctgaagaggatgaacaacagtacgaggttgggtcttattgagggactttcaaaatatcgtggtgctactgccgacctctattgagcgaatcaatcgagcgtacttcgtcgtgttgccgacagtcgagaaacacgccatactgggcacatgcggcaccgtatatatcccaaagaagaatcacctgctaaaacatcgtgtcgttgttcttcattttcagcacagtgacttcaaagaaggaagtcacatctcacatttacccgtatgcgaatcttggtcgtcactacgtaggagtcaactttctgccgactcctgtgacgtcatcacttctgaagtgcatccgccgctgcgctctgtatcagaaaagtacccagagccgtgttctcgcccgttaccagttgaaactggtatcattctcttcgaattttgcgttgtttctcgctcgcaggaactcttaccgacttctagcccttgcagagaactgaacacgggcgcatttcctgttccactccaatcggggctggggatacttctggtgggtggcacggagctgcgggtttttcctggagactttcttgatccagggacgcatgtggcagcaacggttccggtggcttaaccttgtaacggcacaagcagtcagggggaaactctgatgagaagcctgcgaagaaggcgcagaaatgagctccagcctgtatctcacagaatgcgccggcgactggcgggacggggtcagatggtcgagctactctgctgtcaacttctaggttctcagctccgtcatgtctgatgactgtggaagagtacggattcttaggggcagcaggtgtgtttgtccagcatgccccgacgcggcggcggcgcgagtgtcatggcacagaagcgtttcttggtgtgccgaagaaagaaggactctctcgttccttcgcatgcatccgatgcttagggcgcgtgtccgcatggcggaactagggggcgagcggctcggagaccttgtttttcgtgctcttttgaaatctttccgttgcgaaca

SEQ ID NO: 700 - DNA, 2094 bp, Toxoplasma gondii
  source 1..2094: mol_type = genomic DNA
agacaaaggaaaactggcgaacgtgtgacctcagagacaagcgtaaattaacgccaggggagagtggccagcacgagcctttaacgaggaaagagacacaacagcgacagccgctgtccgatggggtccaccgtcgaagggtatctcctggggacggacatggaagagaagaaaactcgagacgattcgacgcgagtggcaacgcgttcaccgccgaagccttcctctcgaactggagagaaagacaggaagtcgatgacgagtttgacgaggtcgttcagagtttggggagaagagaagaaaagtgacagagggcggcgcctcaaagagacccgtgtgggatcgtgggaaacggacaagttcactgtctttttatcaacgttccgattcgtggaacacacctcctgcctcaagcgttcgttgcctgtcgccggaacgaacagacagaacaccgaaatcaagcgtcgtctgccgaatggagagcaagcacgctactccttctcatccgagacaccgaaggcacaaaaaggcgaagacggcgattcttcaacgggaatgcttctctagtacaagagtgaggaaggacgctcgagccacacagccacagacgcctgacgcacagcgtcagctcactgacgagatactggagaacggtcggagatgaaggaaatcaaagattagagtgctgccgagaaggcctgagagaagagctacttcagtcagatttgagcgaggcagaaaaaaagtctctcagcgcagctcttcttcggagagagacgcgacactccccagggaaaagcatccattcaccgaaaaaggaagaaagcgagaaggagtggaagcgcatttccgactcacacaagcgaaggcgtgcgaaaggaaaaggggcaaggacattttttttgcgtactcgagttcgttcgagaatttgtcaaaggtcactcgtttaccagacgcagctttcgcgaaaggaaacccccgtagatgcgggtgtcgagcctacttcagaggcaaatgcgcgaataagatgcagaataagaggaagctgacaagatttgtcgtcaagaagcgaacgatggtgtgagaaaaagactcagctggaattgtgcagaaatgaatctccggagacttgtctcaaacgactagcatcgactacacttgcaggagtggtggaaggcaggagacggatgaaatcccgttttccttgacgaaaaagacgccctctcgtccacttgttcgtcgaacgaagggattcaagttcccttatcaactgcggaatacgatacaatcattcttatctaaataggtgtacaaaaggtgtcttgtctgtcacggttattgtgacgaggaaaccaagttggctagaagtcgcatgcagagccatatgcaacgactctgtcgttcgttaaagcgttccttcagtgattttggggagtagatcgccgccttcttgatgccgttcctctgtttttctcgagttttttttgggttcccaccgtcacttctcgacaagatacatgaatcaagagaacggcaagtggctaagtgactgcaagcgtcgtctccgtgttccgctagacgcagaaaaggaagaatttgaacagcttttcaagctgttgaatttgaatcccgttcgcaagcccaacaagtgacatatccgttgccacagtgcttgacgcacctttatgtctcgtttttacacactcgctaacccagccaactgtgcgaggcgtttctcgccttgttttgcctctccgcggattaaggtttcagagacaggagcaggagccttacccgaagggcagaagagtctcgtctactgcgccatgtttgtcttgaatcatgcgttctctatgcccctggtttcttccttggtaaatccgtttgagagatttaacacacaccggtgctgaaggaacttcgtccccggatttcgggcaacagaagagaaaatgcggtcaaagcgagcctccctgtttcctgacgaccacaaaagtgcatagggaacagaaaaaagccgtaaacgcgtacgtctgccccacagccataaggcgagtctactggacccgttcctcccttctttgtcttcatcga

SEQ ID NO: 701 - DNA, 3039 bp, Toxoplasma gondii
  source 1..3039: mol_type = genomic DNA
tgtaacttcagaataacgacgacaacgtagtgagacgcgagtttggtgtattgcggttgttctttcaggtgttggcgtcaaggtgggcattgtcgtcggctgcttgattgtaggtctgctgatcattcttgttgtttggtacgcgtggagacgccgcaggaaagaagaaaaggcgcttcgagaaaagcagaaagcaaatgctgcagaacgcagggcaaaccgtgatatcgccagatacgcgcatccgtgagaggcaggtatgagcgccacaagtcggggtgtacgtacaacgaggcagttgatgcgtaagctgctgaaggtcgtcagcttgtcaatccctcctgcctgtaagaactggaacaaatgaagcagccatggcaaaaaattgttatatcagttgttacctcaccggcctatcttgcgccgaagcgtgtgcttgacgagaaagccacgcggtcggatgttgtttgttcgtgctccaagagttttccatgctccactagtatcatgtgctctggtgcagtctgtggagacgcacttggtaccaaggattcacagacacactacgcttggcgaccgctgaattgtgacgcccccagcctgagcagtctgactcagacaaggtggcctttccgaaagtggattggcttttcctacggtgctccgtccaattccactcagagtgctgccgttcggatgccatgacttgaaggcacttccgcatgtttagttgccgaaggggtgaaacaatttacatgtctatgcttggcacgtattgttgtagtggtttcgaatttttgtgttcctgttctgtcgtaaagaaatgcagtccagctctcgtcaaaaagcactgcccgtgagctacgtttcggaaatttgcaccttctttattgatcacatgcatcaattgttttccatgtgcccggcgaaaatccgctaattctgtcggcgtgaccccaaacctgagaaagtggtgcgagcatctgctcggatgtgctttctaagtgctgcaactgtctgacaggcggctgcgcgcgtgtgctcagttcagagctataatggaagcgaattatattttatcagccttggttgggtttttgtaatcgagtacagtaataaggaacacaaccgaagaaatgtgtagaaacgatgagttgcgtgtaagcaacccaaaagtcgcttatgctgccaggacactacaaaagatgacgcacaccaagctgctcatgtaggtatgctattaagctttcacgcggtcactaagcaaagaaagaaaagctgagacgagtgtcaccggtgtcttggcctggccttaagctcacaacgatatggaaaaaacggagcgtcgtcgtggcgcagacgaaagacgattggcatcattccttcttttgcgtggttgcctgaccacagagaggctctaatttgatctcatctacccttatttgtgccatacaggaacgagcgcactgttctctgaccggggtgggccgatgaaaagaactccgggaggggagccaaaagagatcgacgatctagaacagtgtatcttgaatcgaatgccctgctgaatatgggggcgtcaccccatgcagttttcagttcctggcgtcattttaggctacaaacgtccgcaaaacctcgcgtttcgaagagcgtatcagtttgctcggaagcctgcttcgaatcatgcatcgtaactggagtgtgccctgaggaagtagtaggaggcagctctcccgtgctagtgaggtgctacattcttcctcgtgtatcaggttgacacagcagccccgtaggaagtccgatgcaaaatggccgtacggcagcggcaggtcaattcgacgcgtggctgttcgcgagctagttcccattgtacaacaaaggagggtattaggctctggtgggttagtgcttgggggtgtccacagcactcgatgactagaattttgcaaagcagacgatttctggctaactcgcctttctgttgtgtgcctcttccgacgggggaaactcttccacgacccgttcatacacccacggacttgcaaaccacaggactgttatcacgatgttcacatacagagccacagtcgcggctggtcgcggtgtctacgcaaacctgtttagtctggaacgcgccgtctctccctttgcatacggtcgctttcagtcgttaagcgacctcgtgtttctcaataaagtccgtgtggagtttcttaccgaatgtcgtccagaaccatgtcagactgcgcggcctcccctaacttgttggcgtattaccacgccagcagaccggttgttctcccgtgttaggcccgccttgcctgtttgtggcgggtgcacagattcggcacgtttagaaatttcgtgaaggcgcctccagcgggacggtgtcccgtgtcgcttttgaaaacatgacactctggcacaatgccctagcgacggtcgtccttagtgcggtcaggacttcgatgcgtgccgttttccgcttcttttcgaaactctctggagttttgtctccgcggccggaggcacattccatttcacagacaaaccagcgcagtcgggggaccagcgagtctcgcaacccgcatagtcgtcccgacagttctgcgtggcgggcgggccccgcaggtttccgatgcagaatagcgagtgacggaaagagtgctattcaagggttttttagggtcttattttgaactccgcatactccctgtccctttcggttgaccggaagtgtcagaaaacggatctgggacaggtaccacttctgttgcgcaaaccccggcgccggtgcacggcgtttcgggacggtgaaaatacgacaacaccgatcgaggagtctgacagattcgctatggctgtgaaagttcgtgaagtggacttcttttcccgcatgtgagaaccactatgtgacgactggaaagctcaattctcagtgggagaatgctgctgttcgaggccctgtctgcaggtgtcggtgcaaacaatcagttccctcggccgtttcctccgaggaagtgagcgttcacgcca

SEQ ID NO: 702 - DNA, 2399 bp, Toxoplasma gondii
  source 1..2399: mol_type = genomic DNA
atgcaacattcgtgaaaaggtgtcattcttcttggagaaactcaattgttccatctgcctcaaacggtcaaatctccagggaaactttagggaccctagcgggtaggtgggtacaggaaacagagtggctcgaagcgttaggccatgtagacgagaatgaaagacaggacaagcgtgcatttcagtatctgccacgaaagatgtgtctggcaggcgctgaagcctccgaaagaaaaagaacgaacaggaggcactggctgcttttcagcccgttttgacgagatttctcgactgctgactacttcttctgtctgttcgtcaatttgatcttcgtcgttgccgctttccttgagaatctttgatttacctttgatgattcgtacacattccgcggtgattggtacatccctcaatcaacgctgactttccttagcaagtctattcgatggctgggccgtgcttgcgcagttcctttttgctgcagtgtggagtagtgtgatgttccgtgcttgcgcagttcctttttgctgcattgtggagtagtgtgatgttccgtgcttgctacgttttcataatctcttcgtggtcgcttcttccgccgaatgactctctttgggtcccctggtgtcttttattgtggcactgctgcttccactataccgcaaaccacaaccgtgggctgccgaccgagcacggaaggacctttggcgcaacttcccctgagaagacattttgttatcgtcttccctcaatatgacttttgacatgcagttgttgggcatagtggccggtagaacaaagtctgaaatcagccgagctgttcacaatggggagaggaagaggaaacaagagtgcagccttgttcttccgctttctgtagtgttctgcatcgatggccagattcctccagtatttccgactcgcgaaaacgctacctttgctaataaacacttgtgcatgcattaggattcaacttcctgtcaagaaggattccggattaccctaattatatgcatttagacttacagctatgtatccagtcgaactcatgtgtcgactcattcagcgtgacaacgcgcgagaaagcgacctgtctaggtctgttggtctgtctaacgcatgctgtttcgcggagcaacccgtcgacccgcgttccacagtccgaggcaaacttcggcctgaaaacgacacacctgatcgcttgatgagcgggtcaccgctgtggacgagccgctttacgcatagggggcagaagcaatggctgccggagctggaccggatgctgcgcatcggtgtctatccgcttgagatttttccagccgattacaccgcgtatatattcgctgcgaaccgggacgcgaaggcgtgagcaaggttgagtaacggccactgttcgcgccccccccctgtacatctggagacaaaagaaggcagtggtgacgccagcgcacatcacatcgcttaacattcagtcaccgtaagggcgtgctacggtttctcgtgtcttcccccaacagagttaaacaaggaacctgcgtacctaacgtagcaaagaggcgggtcagcggccgggggttcgtaacagcgaaggggttgtagagtttcacgcagatacagcatgcgggtgccacgcgtctgccagatgaaatgagagttttttcagaaggagtgaatgcacatggggaatggtcactgttcacttgccacacgcacctgcgggacgtcgccatcgcggcatgtgtggactatttcgtattttcgacactgggtggatccctgtcaccaacacagaggttcggctggtaacacgtgctgccattgctgctagagaaatcgcggttttcaatctcttcgctgctcgatttttgccaacgggcaagtaccccgcccgacaaacgttcgtcactgaggtagacccgtaaacctgtttttgtgcggacccatcacagaaccttgacctttgtaggggaacgtaggggttgtagccaggaatatcttcaaaggatatccctcaattgcttacggggagaccccgtaatcgcctgatagagcgccgggcgtacgggggctggcacagcctgcccgacgggtgttcacagcgaatttactgcgtctctggtagcatgtgcgtctaaaatacgattctgcgttgaggccgtgccattaacggaaactctcttaacgaaatgctttatccggttaggccattcgtagtacccacgtttcgtacggtgcgagcgttaggattcgtgttttttctcgtggatattcagatatgtggatagtgagcaggtagcaacagcccacaaacctggacgtcctgtttcgagcccagacagccgccccccgtcgtcctgaaataccaccgaaagtgttatggttgacccctctcgctcata

SEQ ID NO: 703 - DNA, 4408 bp, Toxoplasma gondii
  source 1..4408: mol_type = genomic DNA
gaagagagtaccaacaacctaggcagtcagatctccatgtgcatgcactagagaggaagacgcacatacgtatactgggaagagcggcgttataacggggacgcagacacagaaaacgtgaaacgtatctgtggtggcaggagtcacactgggacacgtgtctggttatcttcgccacacagtcgcttcctgagggtgttcatgacggcgaaggacacttgaacaatcggataaaagagaggactcgataaaggaaatcggaaacgtttccggcaaactcacttgagccgggtttgtcgagctcgcggacgacgtgggtcatgccagccttatagcccatgaaggctgtgaggtgggggggcttggacgggtcatccttagggaaggcctttactgcagcaagcagggaaaaaagcaaaaacaacgtcacaaacaatgcaccagataaacataaaacacataaaaaaaaggccaccacttggaacccgaacttttcgcatagaaacgccacgtggcctcaacacacacttgcaagcttgccgccgatgcggatcgacggcggggctgggtttgatatgatggggtggagttggcgcttctgcaggaagatctttaaaaggaaaccagaaaggtcagtgaaaagcactgaataagacaccggaacttgaacaacaaaggcgaaaaagaataccttcacccctccgtaacccctgtggcagtcgcctccgttggaacccatgcggtcgcggttatcacgcacagtaggcacgtgcggaatcatcgcaaaaaaacgaaggcgtcaaaacggaatggagacggacgaatgattgatcacccttaggtgagtttgcttcaggaaatcagggcctttcggccacaattctccatgaaaatttggaggaagtgccacgtacgaaaccggcgaacaaaggccccacgcggggtacgtggcgctttcgcgtacacaccggagccagtagaattgaagaaaacagacagaccaagttacaacaagagttaggaactatatacgttccccctgcgaggagaattgtggacatcggtctctccattcttcctcgggaacgcgactctcaccttttcctctatgacgcttgcatcgcttcctgggcaggaaacccagggagccgtggcgagggcgctcaaacttccggtgggacatcttttttacccagaaaaaaccaagaacttgaggttctgtagagtccagcccctccctctttcagaagaatgttctgaaaaagtccgtcgaggcggtcgtgcggagaggaaaaatcacgggatccacgatcaccccgcaattttcgtttcgcggcgtctgcatgcgcggtccccccacgtctgcaggaccctacaccgcgacgggttatggccaaaccccactcagcgtcggctcttattcggaacacaaagttgacgatagaacaagcgtaggctaaacacctgtttgcctcaatcgcagaccctgatcttgcagctggaaccccaaaaaggcgctgttacaacaacaccaacttgcatctcgaaaaacgcaggagggactggggaagtttgccgatgctggtagcattaggaacgaacgcaacacatgaagctgtgttaagtggtgaccagaaatatcatcctttccccaagcaaaaatgcgattgggagagcggcccaactcacacctcccacctatggagtatgtgctcccagggaggaaggacattaattttccactttgatgtaacaggaggagaggcagtcgaattgccttctgttcggagaccaagggaaagaaattggttgacgtaacccgaacagggagttttgcacagatcctttggaacaaagacaccgctgggaggcaggacgaaaccgacgcctctgccgcgttgcgacctaatgcaagatttctcgccttttagggaaaacacagggaagtgcgggcagtcacatgcgtggagagagaaacgagttgattctctttaatttttggttctttgacacttgccaaacgcttcatcctaggagtgttgggaactgaggcacagccaatcatgcaagacactctccttggcacttcaaaacaaaagagaaaagcccctcagggatctgcttcccccttttgtccctcttcctctctttctacctgcccagcacctttgaaaccgatggtgtgtcaagcgacgaatgccaaatcccctatatacagataacagaaacctgtattttactacctatgcttgtcgatacgggcgaaaggtgctttttgtcgtttccgcatatgtagaaacgttttaaccacacagaacccttacttgtccaaagtttgcagaacttccgggagaacaagcggtacacatgttccatttccttggttcatgcagttctttcacgaacgaagacgggaaatatcgcttctgtgagggcaggggacttctggggtgctgctttgtatttcaaaagttcgttatcctacaccgaacacttccttctctggatcgtctgccgcgaagatacaccccggcttaacgaccgcgttcactgacaatttccacgcgtttaagataccgttcgtcgcaacaatgaggaaaaatcgcaaaagcatctccgcaaatggtagtggttgctctgactctctgtacctgccatggggctgacccaggatcgatccactgcaagaaaaaacggaattcactttgcgttgtgtctcggcgaatcgtgaaattccttcttttccccacacgagatgccgactcttcgtgttctagcagctgtaaatggcccacagaagacaacccgcacatctctccatattatagatagatgtctttttgtgtggacacagatatgggcggcgatacttcctggacagttcactcgaaatgttgagtcagcagcagggagaaattgttgcctttgctgaatagtgggcattccgcattaaataactatccgagacatattgtttgcttagccgcaaacatccttcttctcgatggtttgcgatgtttgattttttgccgggcagacgtctccggttttgtttttcctccgtattcgctatgctgtgactcggtaggtagcagtcccacctttcaccgttccccacaacagttccgggatttaacgaggaaatagtgcattgtgaatcgggtaaagatacctatttctgttggccgtaaagtcttcgaggacagatgattgaacgctgctgttcccttttttccgtatgtgcctcactctccaccaagaccaggtgctcgctccgaccgacaacttggaaagaacgcagagataggcgagcttggaaagttgaatgagaataacaatccttgctgtttggaaggagagacaagctctccaaatctgctcttgaatcgagtggagggaaggttgcaaagccatgcgctgttccaccggtatctccgggttccaaatatcctaaagccacacgaggaaagagcaggtgactttgcgtctttaaacccttctttatcatggagcttgcagagaaaggaaacacccgattcgctaacaaagcccttcaaaatttggatgggtagtcgaacgcgtaggttagacttcggagaaaaaagtcggttttagaaaccgaggaagctgtttcaaaatccgtttagagcggcactagcttcagctgtcatcctaaatgtaccgcatggcccctgcgaattttaggtcttccatggactctatatttcaagagagttgacttatcctccgtgcaattgttgggagaaaaaagaggaaaaactgttaaaacacttcgcgctgaacgctcggatccacacacacgggtctcaactgtctcgtctccctgtctctctgcgagcacctataaaggctggaaagtgcagtgccaagaaacgacaggtttttctagacaatcaaggcgtattttgccttcgttgctaagccaaagaaaaaacctggacgctatttctcctcctcgtaggtctctcgctttggcccttggtggtgagcaagtcggcagccacacaccagcgctgagatgtggagacaccgttggccttcctgcacaattttgaggaatctcgaccagttgagaagaaagaatttttcagcatctcacccgctcaatttcgaatttctcaccttgagaaagatgcgagaaatcctccagttttgtatcagttccttcgctcggtctgaccacacgtaccttgttgccacacagctggagcactgtcaaagagactgaggaaagaagaaagcctctgtttgtgtcttcagttttgttctttgcgaactctgcgtacatcttgtgaaatatctcgtcctcccctcttcggatttctctgattttccccttcttccccgtctctctgccgtgtctcatgtgctcgcttggtcgccagga

SEQ ID NO: 704 - DNA, 5000 bp, Toxoplasma gondii
  source 1..5000: mol_type = genomic DNA
atgccgcgattgcaaaacagccaagaaatcaacatggctcactacttctccaggacactgtttcggtccgcataagaaactcctttttgttatcatgagacggcgtcactcaacgaataggcgccagtgcaccttaccaactgactacgtcgggcgccgcagcgggtttccccgtgactgaaaggtagagagcagtgaagaaggcgaagtgccgatacgcttcgtaggaaatggaatattgctcctgtcgtttctggcacggaaacacaacgtccagatcacactcacgatcgagggaaagcagggagctacatagctgcgtcttctcatggaagcaagaaaagcaaacagagacgctggaaaccccaatactcgcacctgaaatgggaaaagcggaacaactcggtttctacctatttgacgttataccactgctgatagtacgcacttttctagtcgacacagtggcgtgtaatgacatgctctgtagataaagtagaacaccgtgtaacgtttcgttgcgcggcacaagtgtcgcggaattgaaggagactgcaccgccttgctgttcatctcttgcgcctcggggttctgtgatactcggcagaatccaccttaccttggaccctcccaagacgccggtctctgcgtgtgctgctcgaggaagagttgacttctttttcagtctctgcattttggcaaatgctacgaggaccgcgttttctttccggaatatcggcgcgtaggtgggggacgataaggaatacaagatatctttgaggagagttctagcgttccacagagaactgaggtgagcttcggaaacaagagaagcagagaaccgcccgatggccgcacaaaaaagtgaatgccaaggtagtcgaataaaaagctgcaaaatacccgggataaccacacgtgcgcaaaccgagaggcggacccatcgatcagtacaacagaactcgtgagggactactgactgaagaggaggtgccgacagcacacaggctcgaagaaaaaccaagtattccccgagatgtttgccgcaaggctgccattttgtttcattcaaaagttatacagttcagtgagggtgcgaagacataaaagcgtggcgcaccgaaagcatgccacacaggcctgcgctttccccgctgtcgccgacgtatgtagaacataaagggtggattttcgacagacaaagtgcgcagtagaaagaggagaaacgctgttgggtctcggcgcgactccgaaaacaggcttcaaagtgtgtctggtgaaagttgccgcctgtcttgcacaactggggggcacgcagccagcccatgcatgcgtgctgttctgcaaacgagattccccaagagacgatttcgcgcctttttgcggaaaatataaactggaaacaggaagagaaatgttcagaagtgtcgctatgctcgcacaggatgtcatactggtgaatttgtgtactgcgcgtaaaactggagtgtcactgagaaggccgcggcacgcagcaaaccgatgggtctgttgttgattgctggtgtgtgatgccacgacgagatgtgccacacaaaaggattgtaactcccgtgttttgcctgcaatatactgtagcaagtagcagaactgggctacacatgttgtcgccgatacatgttgttgccttctgtgtttcgaaattcgcgctgtctgtagttgcgtgcgacaatacaggcagcggtcctgatgaaatgcttggtgcagtgcccagctagaatcagagaagttcatcatcttccagtgattactccagaaacatcgccaggcttttgtttttccctctccggagaaccaacccacgaaggtgaatggcaaacgtagggcaatgcatgcacgacggttgatcgctattcgttcctgttaccaggtcttgtttgcaaatttctaacacacaccaaaggccgttcactgcagtcgaattcactgcctcagacattgcaatgcatatgatggtccgttgtgagttgacttgagatgaactcaccccctctgtgtccgtcgtaagttcgatccaaggcatcagaccaaaagggtgtaatgccgtgcgaactaactcggtcaacactgccgaggaaccagacttcgaatgcgcccgggcaatgcattaagaccagtacagttttctatcgacatcaaatgcgagaccgttcggtgtataagcagctgcttctaacccgttacagcatgtgcattggcacgaagttgtgtgggatctgcacaaggtggctgaaatcagaaggctttgcactggatgggaaacgaaacttcaaagctcttcgcatgtcacgaatgattcatcggccgctttccttcttgatgctttcttaccataaaagggatgtcttccactgctttgtcgattcacgggacaacgtgggcggcacctctgcaccccgacacggcatgagttggtgccagtctcgtcgaacacttcttgtgattcctgagcctggcaactctagtgcttggtgccccatgggaggccgtggcgctgtttgcaaaacaggccgttggtctgcccttttttcttttctgcattaaggaacccctcatgtgtgtcgaaatgcgaaagtcctgtcaggacttcaatctccatgctcggaagccttgccaacaggcggtttcactcacctcgttttcggggacgtttcatttactcgaaaaaaagacatccgaaggtttagcacttgaatccctggagagaatgcatggaccatagcgctgtcgagccacgttgccgcagcctcaatcgtgccatggcattttacctgctttcaaagtttggtaatgcgccatagccaggtgttcccacgaacaattcacggaagaaagagcctgtgaaccctggagttccccaacggcgtcctagtcttcacaattccacaccattcatgtgcggcagcgaccgcgtgccgcacccggtttctttcagggctgaaaactatcacagaaacagcctgtgacaactttttaaaaaacaagactcaccgcctttccgtgcttcccagtgtggctcttctgtggcctccactttatcagacatgcatcagtgttctctcaggatggctctgtgtcgggtaacacgaagcttcattgccagtatccgcgtgcacttaccgtacagcccgagcgctatcaacaagtagaattctgtgtctatctagcgctgcacggaagtggggatgagggaaggtcacctgtgaaccttcgggttgaaaaatcaacatattcgtggggcgatttgagagtctgcggtcgtgcaaatgctccacgcgtgaagaaacggcgccttcccgttgaaaatgatcgattgtgtcgctgtatcgatctgttttcggtgtgctgacgttcccggtaccagcaatcgtttccctcgtcccaactgctggtttcattgctcattttttgagcagcaagtgcacagattttgcccctctcttgctcacgcaaatccccagtctttttagcgcaaaaactgacgggaaccaccggtcgggtttcctatcggcgcaccgtattgagaccgaatcacatcgacaccagctacacaccaacccgtatttacgactgatgccataccactcgtcggctttccccccctttttcttcgcaggaccagagtttttccgaatctgcatgtcctcgaagactatgaatcatccgtcgataaggttcaatgagggacttgacattttgcggttgtgtcgtctatcgaattttgcccctccaggcacgcttgatcctccatagtagtagcggtcacttctgcgtcgtcgttcgcctctcccgcctgcttgaatagcggtttctctcgagcgcctgtgtttcagcgttttgtgtctcggttttccacggaccaattcgtttctcatcttttttcactggcggaggccgacctgattggtaatctgtatatcgtaccagccagagaggccatctcccactatctttcgcagccgacgtagctgttcatgtggcactggggaatgaaccctcggctgccgacaagctattccagtgagactctgagctaccctgaaagccggttcgaggtgcttttttgcccggaatttttctcaactgaaaaaactgccgaaatttcttgtcgagcgcatctttctccgaatgtcttcagtttaggaccgaggagaaacttttgtggcagagacacggcacctggtgcctacctcccgctgcttgttggcggtgcgtctttctcagagttgcggagaagccgcgttcgcccttttataactctctgcgttgagctaaaattattttgattttccttcggcggcatctgaaattcactattttctggcgtttttggcaaccaatataaacttgccggtggctacttttcttcaaagacgaggcatctgtctgaaaaaactgggcatggtctttgtgaggcgggtgttgtcgcaacaagtctgtcgctgtggctttctgtcggtcacgacatccgttttttttctcttgacgcaagcgcctctctctcggatatttttctgaaccgacctcccagtggctttctccagttaccttttctcctgctgcaaggctgcggcgcgaactggtggtacagcctcgagcatatagtagccaaggtagagccacgtctcgcgggcgttggacaccgtttccccactctttctggaagctttgttgggcgacacatggctagacctgcaacgggataacggtttctagtacacaatgtgcgtgagctgcgaatccaccttccggcgggggtgacgactgtgtgtgaacatcggacgcgcttcgtcctctgcagccgcctgtggagcggtgaagtctgccgtgcagcactctcgctttttcgtgtagtgtacaaagacgaacagggaatttctctgcgcctcgaaatcacggggcgtctcgcttccggactccgtagtctacgcagccccagacgacacgcagtgcaagcaaaa

SEQ ID NO: 705 - DNA, 2660 bp, Toxoplasma gondii
  source 1..2660: mol_type = genomic DNA
acgatgtgcagcagtttcgcgtcttcagcctcgatctgtgctgccaccggcgcttcttcgctctgctgtgtctcgcagagacgcgcccggtccctgagtccgcgcgctcgagcggcttcttcgcgtccggacgcgccagtctccgttcgcgcgcgtggaggcgaagagacactctgagacggagcctcgactcgagactgcagccgcgccgcagcctcggccctccggtgtacgaggcgacgcaccaacgcctcgacttcgtgcgcagccgccttcctcttctcctgacttttgtctcccagggcgcgcagaatctgcggagacaagagctcccctggatgcccagcctgggagccggcagacagcgcagccgaggccgagtcgcgcgacaaagaaaacatcttgagcagcgaaaagaagaaagcgagaacgagaagagggacgaggccaggacggtgcgagggcgaccaaaggaaaacaggagggataaagaggaaaacaggagcgataaagaggaaaacaggagggataaagaggaaaacaggagggatagaaaagagagagagagaacaagagggaagaaggatgactctctttcggtatttctccttttctctctcactcggcctctctctctcctttcgggacctgcgttgcgtccttcctctttcctctccgctctgcttccattatctctcgtctccgaacgctttgagttctcttctctcctgtagactcttgttcgcaggcgaagagaaggagaaaaggaaggacccgcccttctgcgatagatttccgaagcgtttatgtctgaagccccagctgtatcaggttagagagaggagatcgaggagggagcggaggaatacgggagagtaagagaaaatcggagaacaagaaagagagaaaagcctcaacctacaaaggccggacacagcgaagacgaggcgcgacggcgacagagacggaaagaaggggagaaaaagagactcgccagcaaaggaaaaagaaagccgaggaagcgaagggcagcagaacgagaacgaagaaaagaaagttatgagaggaggaatgaagaagaggaagagacgctccgaacgtatgaggcagttgtcgaagaagaggtcgaagaaaagaagaaaaacgaggacgccagcgtgtatctttcacaggaaggcacggacaactcagcctcgacgaggcgagctctcgtcgccacagagggatcagaaacatgtaaaaatcacagtaaagatggacgaaacagaacgagggagaaggcgaaggagagaaagaagacgacgccgggctcaggatttaccacagttcgttctccgttgatcatttataaagaggagaaggaaacgagggatcacagtttaggaaggaactggccttttacgacgaaaggaaaggaacctcttctgtgaaacagaacagatacgccagatctcgagtccggtgtcccgctacacacttccgttttctagttttttctgcctttttttctcttgtctctccttgtctccctccatctctctcgcctgcagcgagacagtcggcaggcgcgcgtctggcgctgcaccgtcgaccgaggaggagaagagaagagaaaagggaacaaaaggcactctgaagaaggaaatctgcagagaagaaacgctcgtttcctcactcgctcgtggagagaaatctggagtttctcctcttcgcttgggacctctcgccctcccgctgcgctcccgtttttctcttcagcctcgagacaaaacgagtgcctggtgtctccgcgcttttcgcgtcctgtgctcacttttttcctctctcttgccgtctccttcttctctttctctctgtttcccctagtcgaccgttggagtttgctcttctcccttctcagccgaccccctgcgtcttatcgtttctctttttctccagttttctgtgtctccttgtctgtccctgatgttccgcttcccctcctctgcgccgcccatctttcttctcttctcttctttccccctcatgcttcgtttccaagttctctctcgtccttgcaggcgttcggtctcgagtcttcttcttcttccacaggacaggaagtatttcgtcctctcctgactccgcagacctctcctttcccctacgcgtcgcctttgcctccctttgtcgtcttctttttgtgaactacgtctggctttctcttccgctggatgcgcggcgacatggaagcggagagagagggaagaacgcacacttgagaacttcaacaagagccccgcgactgtgcttccgaaaaaagaatcgtcttctccgcctgtctgttccgcttgtacgctttgccttccttgtccttttactctcgctttcgtctcctctcagcttcctcccgccgaactccagactcacagcagaactcaagtccgtctgtcactgagctgcaggttcttcctcgtcttctcctcgctgtccttctctcgttgttctctctcttttcctcgcgtgcagctgcggcttgattccttcctctcttggacctcttgtctgacagtctgtctctatggtgcgcctccacctctccccttccgtttctcttgcctctttttcttttttctcccttgtctgagctgtctctcgcttcttccttgagctggaaagaa

SEQ ID NO: 706 - DNA, 2630 bp, Toxoplasma gondii
  source 1..2630: mol_type = genomic DNA
acttcgcttccgggccttctgaagacttctgtgacgactgtctctgcttctccaaagtcttctctttctgcttctgcggcgtcccccgtcggactgcggacgccgagtctctgcgtctcccgcgtctgacggtctgcccaggtgtatccgtctgcgaggctccagcgagcgaggcggctctggagcaggtcgaagcaggtctccaagtggctcatggcagccgccatcttctgctgcaggacgtcgaagaggggaggaaggcggtagatcttcccggcgacaacggcgtagacgcggagaggcagagtgcgggtggcgccatgccgcgccgactcgcggcgcagcagggtgatgtgaaagatcgcctgtgcgttgaagaatgtgcatctggcggcgaagtcggagacagtgggagcctcggcctggcggtcgcgagcctcggcgcggaagaactggggtgcctccgcgcgaaggacgtccagattcgaatacgagaccgagaagagcaagccttgcaagtccgcctgcagacgctcgccgcgacgcatccgctcgttcagcgtttcactcgcctgctcgacgtagaagggggacaggtagaaatactccagagccgctccctcagagtccagtgcatgcgaacacagccaccgccaatcggcaaactccagggcgcactcgcgctgcagagctccttggatgtagcgaggaaacggcggagacgcagaggcaggtgcagagccaggcgcagagccaggtacagaggcaggcgcagcggaggggagagaagaagggagagaagaaggctcagcggagcaggcctctggcgcgcgcatggtggtgtgcaggcgaggaggttcgaggccttcttcttcaggttccagtgggaggccctcccagcaggcgtctgtacacccctgcgcgcgtgtgggcgagagcgaggtcgcctcggcaggggagacaacttcttcgagtgtctttcttcctgcttccgctttcgcagagagagaggacggaagtccaggacgccgcgttcgtctcgcgaaaggcggtcgccactgctcttgatggttttttctgcgtggagctcgccttcgcggcgttttctttcaaatggaagttcgtgcatgcaagtgtgacggacgaagggggaaaactgcgagaggaccatccgctgcgaaggcgagccgcctctgcggccctgaagagaaacaacgcctctctctcgccgccagacagaagaagagaagtttcacggagaaggaaccgcaccaccgagacaaagacagtcatgcgtcggagcgaaatccgccttctcccccagcgtctttcctcccgaagcgcgacaaaaaagacgactgctttttcggcgcgtggcgagatgcgctcggtgtctgtacacctcagagcgtgcgtctctgcgagagaaaaagggcgctgaacaggcgaaacgaaggaagagaaacgggaagcgagaaaagagactccctttccgttgttattttcgccagtcgagtttctaccgactccgtcacagagtgcacggaacaatacatgcaaggttttcttttcgacatgcaggtgtgagaggaagagaaacagcctggagtcacccattcgtagaaaacgcaaatgcccttttccctgttttcggtgtcactcgcgaggagaacatgaacgaactgcgtctgctttttggactcgtccttgtctcgtaaatcgcctttctctgacagaattccttcagcgtgcccgaacaccgccggcttttctcgcgtctctgtttcctcgtggatttttctttttccacctgctaaacgctgtcttgccgagcggaactgcaagctgctcccatcgccaggctcttctttttgcggacgtcaacggagagcagtccctctgcggcgtttctttccttctctgcggcttttctttccttctctgcggcggttctttccttctctgcggcggttctttcctcttttgcggtgtttctttccttctctgcggcttctccgttcctctttcctcgtcacgtctccttttgcctccaggtggttctctgtctccccgttcctctttcttctccaactcccttttcacacttctgctctgcgtctctgttcctcgtttcttcccggcgccctgggctctcgtctgcggtctcctctctcgcccccgcgtcgacaatggttccgtccccttcgggtgtacatacacctcgctgccaggtttgcgtcgcccggtctcatgtgtgccagcctggcagacgccgaggacgctcttctgcctcttagagggacggtgatttttcctcgggggagttggtggtgcatctttcttttctctttttttcggagaggctctctcttctctttttcgcgctgagatagtgcatctccttcttcttttcagagaggtagcgcttttctctttcccctttttctgaagagacaactggatggttcggggctttagcttgtgcccatgattcaggcttccatcctggctgtctcggctttcttcagtgtgtgccccttccgtgttctcttcccctgtcttctgcgggggatctgtctctttccttcccctcttctgggtctccccctctgtttttccgcaggcgggga

SEQ ID NO: 707 - DNA, 4317 bp, Toxoplasma gondii
  source 1..4317: mol_type = genomic DNA
aagacgaacaagggtcgtttcagcatcactgatgaggaaacatcgtcgcctgcctccatatacgcccgtctcaccattgtatctgattccaaaaacaaaaaggcgtctccaggtgtctacgtggagttcggacatacacccttgtttgcagcccagtgaagtgtgcagaacacaaggaaaccacgaattgtggccgactacaggcgctcggaagacaggaactcctcaagatttgacaagatctgtttacacagacaaaggtagcgacgcatacggaaaaatgcagttccagccagacacatgtacgcagttccatgtactttgggacaggtggcgcagcgttgcgtgcgggtgcatacctttaagtagtatgtatgcatagaaacatgctcatatgcatatgagtgtaggtgtggatagttttttttcgagggtatgcttcagccagctttcagacatctcaagagttttgccacgaaactccgcagctgacgttgtaaggcggctgttcacaaagcctacattgacatgaatgtgcacagcgacttgctgatgtaaatgtggacacaaagacgggaaagcgacggaattaacggttagttacacactcacacacattgagttttggtgatggatagaaaaaaccaagtttacatcgtccttacctccgagtgcaccagcccaggatcctatgaaaacgacgcagacccccgcaggccagagagcggaaagctcaccatcgtcctccatttttcgagtgtgtttatctgtttggtctaccccagttccttcctcagctctttgagtccgccgagagagggttgcttctagagagaagttgaggaaaagtacggcttctgaagacttccgcggtcgataaagttcatagctaagccgcgaaactcctcactgctgaagcccacagtggaacctcgaaagtgccaaggcatacaggcaaattatgccgcgctcgccataggcgccttcatttgtctccgctgcctctctgctgcacggaggaaaaccgaaaccttcatcctcgttgcacgaggctaagagaagcgcgactgtttctagcagagtgtctagacggagaaagtgcaacaggcaattgtcaccgtcaagaggcgagcacttcctctacacctgcagtatgcgaaaagcaaaatggatttcctggtatttgttcggcctgtgcagccccgaaggaactctttccagcaaagagaacgcgagcgattcggtgttgagctgaggggggggacgcaagaacgccggggcatggggagggggtttactaacgaggagatatgaagcaaagaacggagcttttaatgtggctgaatcacaaacggagagcctcgagaacgagggcattggtggaccctctgcgtccgggaccgggaggctcgccgtaacgcatggagagtaaaggcggagactttgcggtgaggcgagaaaataaatcgattggaagctccggacttcatgggctttttagggaacacacaatctacacttttccgccaagtttactagaaaaaattacccagctcgcacgagagggagctgccccatgaggggtggcaacgacccctaggaacttgacccgaccttggtatagccgctgtcagggaaccattgctccgggatagaagagtctttgaaagtgtgaagtatatcgagcaaaaggtcgtctgatgtgcatttcttctgcttcttctgtgaaagacaggccatacatgcggtaaaactgcaaagacacggtggcttttcacgctgcgaacgcgcggcccttgcaggcctctcggggcctctgaaagaaatgcagtttggtatagatccagaaagcggtagccgtcggtgcagatgcaaacgttcttcgttcagaagaagctgactgaagaaggacgccggcaacttgacgcacctgccgttctcatctgcacgttgaggaatctcatcgagacatgcaactccctcaggcatagtcgaccgcaacggcaccccggggggtaatctgttggcgttttactcgcgagagggttcggtgcggcccttaggagcagacacgacacgtgctgctcgtttttaagagttcgaaacagcaaggcagcttaaatttccggatccatctgcataccagaagaacacaattccgggtcccctgtgttccttgtagacagctggttcttcgggagggccgggagccgcacactgacaaaagccagcctgcccatgtgccgcttgtccgtcgacattcccttacccaaaagcaaatatatacattaatatttccaggcaggaaggaacgagcgctgcacatcaacactgagggaacgctagtggactgcctgcatgtttaggttcaccgctacttttgtgtgcccgcgtaagccatgcggtcgcctcactacaacattgatgctcccacaatagcagcgagagcggttgatcggcgcttactagcgtaaagcactgttcctgcaaaccggtaagtatctaagtcaatgttctcgtaagggtaataaactgtgctgcagctttgcccacgtacagttatggcagtgtgatacgaccgtgtcgttctggtgcgcgtggccgccgcatccagagatgtgaaacagataagtcgaagtcagacgggagaagcaagggacaggcagagacacagaaagggatgcgagaaggagaaaggcgcagttggtacggggaaagaatgcagggagaagacacagcgtcagagcacgggaaatggcaaaggtgaatagacgcagatgaaacgcgagaaatggtagaggtaaagcgcgacaagagctcaacgtttccaccatcagcagatacaagggaagaaagatcattggttgagtaacagagggagtacgaaaacagagcacactcgtcgactcctgtccacgtcagttcccgagacgcacagatcccatcctttctcgatacacaaccgaaatcacaacccctccaaattacgacagcattcctctcgtttgtctctttgaatttaccaggaacagcagatccgacccgcagtgtctctcggcatctttctgtcgtgcaagctggcttcctccggtagacggaggccggtgcctggttaacccgaaattcgcgcacgacagatgactgggtgaatgtagaaaagcgatcttccacagagtgtatgtctggtcctaagcattcgtttcctctttcgtgagtgctcacgaaagtgactcataactgcactgaaattccgttgctagggagcctcccgattcttgactcaagtctcgtgcctctccgacactcacgttcatttcgtcaatccaacatctttaatttttgatgcttcatgaaggcaaggctggctgtaagcaggcgtcaccttgcagtttttctgctgccagtttttggctcccgagatacttgtcccagagcatttgggcgcggcgttcctcgtccggtagctggttcttagagaggggaggaactcaccccactcagtgcttcccccgtcaccgcattttctgtctgaggagtcgcatgctttcgcaagcttctcaaagactgctgagttctcgggaattcataccgttctttgcacacagtttttccaaccagtcaaccaatattttgtcaaacctcgacgtccatatctccccataaggaaactgagggatgtacttgattcacaagtttaaggatacatctgctgaaatcactctcttggcaacaacaccatcattttttggtcagtggagcagcggttgtgtatttgtcagtgctccaaaaaggcggtagaggactgccctcacgttcgttttctccatctatcgaatttacacgttcggactgaggtgccgtgtctgtacttttcggaagacacctaccatttctcttgcatattttgagaacccagagagctaaatgtgtctcgtccgtattgcgggggcgaggcagtcacgtacatcgagtgccggtgtaagaatatcctttgcaagaaggcatatacatgcatgtgcgtattcggcggcaacttaagtatttacacggaagcgtgagagcgaccgaaacatagaaaagagttgtgtgcgtgaactccacgagcaatcgttgacttgagtgagttgccccacttttggcgttgtctttgacttcagaggaaacttcccagaacttcgttcattttccttggcgcataatctccatcgctttcctccttgccgctccacggctacttggttccttctttgaacgcaaactatcttgaagagtcgttcccctgagggaacccacgaaagctcgaaaacaggttcgaga

SEQ ID NO: 708 - DNA, 4845 bp, Toxoplasma gondii
  source 1..4845: mol_type = genomic DNA
cgacttcacagaagaggatgatgagacacatgaagatgcctagccctctcgcgcgcttgcagaggctccagtagacgtagggggtcgagacgcgcgtgacctcgcctatggcaagttcgaacgccatgatggggaggcaaaccaagaggagggctgctgtgtagatgaagaagatccagcctgcacattcatacttgagaacttcggcccagagatcctccatcgactgcgtgctcaccaggacaatcacgcacaggatgtacagacaggctttctggccccagtagccccggtttcgctggcggtcgagccagttcactgtgtcggcgtcgagcgtcctgatcatgcgagggtactccagaaggtcggagagcctcgcgacctcatctgggctccgcgatgcaatcgcagggttctgctccgcccacacaaagtcttgcggaaggacgtccatctgcgtcccgccagacaaccgcgtcacgacctcgtggagagcctggaggtgtgctcggctgtggttcgaagctgcgtagctcacacttcggtagataaattcgcgttcgagttctcggcgggtcatcgcgcctccgtctgggaagattcccgccacgttccggtacaagggacctgcgcgaaactcgccaatcgcctggcgatatagcccgcgccgcgccgcttggaagagctctgcaggtgtcgccagagtccgcaggctgctgccgacactcgtcgaggaaaccagcacagctgcggcgctgctttgagacttccagccaccctgccctcgcgtgggccgccgcctgaggctgtcggaggagcgatcgcgcccccggagtagggctccgtctgaggcgttccgccgcgggtttggcatccccggcacaaccgctgggaagctgttggaagccccaacgtctggggcgtggctgttgagaggcgggggcacatgattcccagaggctgtgagtctctttgtgtccaacttcaggagctccgtatcgagtgcagggacaggcgggcgaggatggggttccctggtggaccaccggaggcggcggggggtcccctgagtgtccgagcgcccgccatcggtgcggtaacctgcagagaggtcctccaccgtgtctgcagaggatcgctcaaggagtgtttgtcgttcacatgcggcacctggtgctcggccgccgtcaggaaacttcttctcggatgctgcgtgaacagtcagcagcggggatagcgaacatacgcttcgaagacagacgcccgtatccttggtcacgtggctaaaaccgtcgacagattcgtccttcgaagaggtccattctgacaagaaagctttggcacttcccgtcccgaaggagtctcttcgggatcgcgcccccatgctgagacgcacgacgcgaagccccaaactgttcaatctctcactcgcatgcgaacatccgggcgtgaccgcgcgacctctgtcggcgacacgcaccgcgacccctgcatcatcgaaggcttcctcttcggagtcttcgttttcccctttttcgtcgtccgcgtccccctcttccactgtggtgtgcgacggagcctggcgcgagtgccagggaacgagggcagaaatccagaaccttcgagattctccgtcgtccgcgagcggaggctcgcgagttgagtcacaaggaaagttaagggaatgcgacgggggtgcagccgggcttagaaggggagagacgagcgggctaaactgcgtgagcgtgtcgggcaaacttgacgcggggtcgccgctctgctcgccaccctttccacttccatggcagaagtggcggtggccttgtcgtgaagaaaacgaacgaagaagcaattctgcaggcacggatagctccgtctggaacaggtctgcaaggtcggtggtgctcagcggcggaatactggcatcctgcgccgccgactgggacgttgctgaaacctcagtgagcggcgcagacgaaactccttcgaaggcgcagtcggcgggcggccggccgcggatttccgagtgctcggtcgtcagcgaggagcactcccctcgcctggacatgttggattgcgggtgtcacggcggcgaccacacagcgcgaggagtcatgctgctacacaaggacagaatgcgacgcttggtggacgcagggtcgcgcaaggcgatccgtcgttccgatgtcggcgaaaacttagccgaaaaaacgagtctgcaggtggacggtgacacccgcgatagaacgacacaggaactggactgtctgtacaccgcacaggcgccgcagcgcagcggattttgaaccaggccgacggaacctcacaaaccactgtcttgactagtggcaggaaacgaaaagtcagctggggcggacaatagaacatcgacgggagaatggcgaatccgccttcttttgtttgatactcgaatttgaaggcgtccaggaacttggtttcgtagcgttccctatcctttgccagttcgtgcgttactctagaaacagtcgggggcgtgcgggattcgcggtgttcccactgccacttcgtcccgaaacggccaccgtccagcttgccgtccacagaagactaggggaaaatggtaaatgaaacaagggggtccattcgcggccgagttccgagattcctcagagcaagttctttacaaccagctcaaaaggcgaagatgagccggaagagacgcccgagccgacgtgcgcatgtgtctgcacagcgacctgtctcgtgtgcccctcgcagttcggcaacgttacctcttcgattctccagtaatttccgtttccctttcgcgtttcaggccagttcacactcaactaattacaaaaatgcgaggaaagggagtgcctgcgggctgtaccccagtctcccggcttctttcggggtcaagtagacatgcgacacacagtcggagacggcaccttacccccggagagtccccgcaagagacggatacccacactgcttttgagtcgggcaaagaaccgccaacgtgaagtcgacgtactaagtttcacttaaagagttcgagaaacgcaagaactctcgaggttctcagcatttcacggggcaaagctgcacgacaaaaatccaatcatgccgatgaggtccagcctgtagtagtgcaattgccgccagtcgcagatccaaggacgcggagaatttttatccgacactactctaacaggtgctcggatgcaacttcgctaaacagaataaaagagctgccaaaaaaggtcaactcatttgtcatctcaagttgtgagctagcgcctgccctttgcacatgtccattctagtctcacctcggtgcgactgagacgcggctggtgtggcagagagaacagaataaatgcgtggtgtgcacatcacaccgtccggaggtcaacagctgtttcttcgcagtggtcttgatgccaggcagctagaaggggcaattttcaagatgttgagcaggttcgattccggcgtggctaagacagagagaacagcagactgtcgggaacctttttgcttaacaggagctcgtcgcatgccgttttaatacttgcctccatcgcttttagcgcctgttggccacaccaagatagcagacgcgatccgcaggacaccaattccgttatcaagtctctagaaaggcgacgcgttagggacgtgcagcgtgtcggtcctgctcacgttactaccggaacagcagctacagcgatatgaagctgaaaaaactgtcgaggacctgaataatctatttgcctctattcttcgaaatctttttccgctgagtcaagggatgtcaggacctctgcatgtcttgcgagtgtttacttgtgtcaccatctccgtgtaatgtcctgttttctgacggttacggttaagcgcagggatagggaggcaggtgtgccttaaggaatcggccttcaaaaaaactactagacacgaacgagcaaggagcgatgtactttggagacctgctagcgtccagactgaagtcattctcgacactcacgcccagaggtgcaacgcaagaaaagcgccatagggtttttctgaaatgtcttctgtgcaaaaatcaatttagacgcgaattcgcttgcgatatcgattgacgtgaagtgatgatgcttcgttcagctaacaaccgactcaaaggtcaagaagaacttctacttcctggctgccctacgtatgtattcaaagtcggacggagaaaccgtctgccgccgcagcgaatcatgttggcaccacagaccgcacagattgaatccattgaatcaggtggactcatttcacagcaaacaacagacagatgcagtttccctttcggatggtggctgttcgcactatgacagcacgacgcgctcgcaagggaaatcaaagagcaggtttgagtctggcaaacgagtgtcacgaacggaccgtcactggatttgtttatcttcatgcctagtaaagtacacctgtcatgctacacaaatgctgcgcgcatccagatcttcttgtgcgcctgtggctagaagtaaagagtctttctgaaacgacactcacgttccgcagtgtttaacaattactcttacgtgcagagggaaagaaacggaaatttgacccgcagccgcacgtggttgaatcagtcgcaacataatacagttaggaacatgaaggtctctcaacactacgagcggggcaacggcctcgtacaaggcaaggctagcgactacaggttttcagcgagggctacggttagtcacaattttccttttgatcgtttttcgtttgatcggttgatgtgagattcgatttccctaatcgcacttctgctgagttgcaaagcaa

SEQ ID NO: 709 - DNA, 1468 bp, Toxoplasma gondii
  source 1..1468: mol_type = genomic DNA
ggctgtggtcactgggtgcctttctctcgcagaacgctcaagttttgagggggttgcttttgtgcagcaagaaacaagacagtcagttgcaggcctgttcggcgttagtctcgttctcaaaagcatcctcataaaaatccattagcggggcacgggagagtcacgaacaaagccgcttgagatgaaaaggacaacgcacattttcagacgcgtcatgctgtgccatgcagcgcgaagtacttgcctaggagtgtgcgaggggacctttcgtgtccattgttttgtcgcaaatcaggtttatgaacatccgctgtgtccaaccatgacgttcaaatttagctcagaataatggcggggctatcagttaaaattagttactcttgccattatgacacgtttacgtttcagtgttacatcagttccgtggcatcttccaaataccaaaatcctgcgtccccagttctttggcatcacggtttcgacaaagcactccgtgtatctcttgagcgtattccggacactcctactctaatccgataactaaagacattcaagatctaaaaccagtatttcacctcgcagtataggctcgaaaaaagagaggaacaccatatcaaacttttttgcggggacgttttctgaaatgatacgcggtatgtaaacgtcaagcggccggtgtgaaaaatcttcaacaggtacgccaacagctgttgatgtgcgccgtcagccgcaatcccacggacgctacgctgtgacttggcagtagcgttctgaagcaaatgttatattcggaatactctgaagcccaacgcttgaaaataatctctggttctcatgggaagctctcgtgtaaagttgtggtcgctgccagcgaacaaggcgacgttcacaagaaatgcgtgccttgcggtggatctacaggtgcagataaaaagaaaactacaaaatgcaggacagcaataacaagtagtaagcaacagtcttgaccaggtaaaaaacaagagagggcaaggaatcgttccagggtaatggagcaaactcgtcattcagttccaagataacgcattgcatgccatttgaggaaaagtctcgaattgtgtaggaacgcgacttgagtgaggcggcagaaaaaatatcgcccccggattttccactgagagtgaaatgctctggttgttgcttactcttcacgcttcacgcaagagaaaagtacagcttctgcgcaagacggcccttgtcagttggccaatcttgtttcgattggcagaatgcatgcccgtggtgagtccagttcatagaaagcgcgcgcgggttttacgctactaacactaggaggtttccccgcatctttgttccttgtttggtctgcccgtttccttgtttgttctctttcttttttgcattgagagagggggagacgaatcaaaaggtcgtacgcctctcgaacccggcgcgaggagagactgca

SEQ ID NO: 710 - DNA, 2226 bp, Toxoplasma gondii
  source 1..2226: mol_type = genomic DNA
tgtttgatcgcagaaaacacaaaacacactttcagttccaagagaatgaaatgagcaatgcgttttttccagaaaaaaacatctctgctgcgatgcccgtgcccagtcggctgcgaccggctgagaaaacaattcatatgaattccttgaccaagcaccggcaaaatccgggcttcacggtgtaccagtaatgcttaggaacgcagaccgacattacatccatcttcgttgacacgatagaccggcattctcaactcttccccccacgggaacagagaggagccccggaccctctgaatctaactttcatttccacagttttcgtcgaatttgaaaagtgcaagtcagcgtttagatggtaaggtgtccgaaaccgcgccgtccggaggaaacagacatgcgttcccggtgaagcgttcgcgtgtgcttgggaataaatattcatcacgtttctgctaccagaaagctcgaaaaacctccactgtcttgtaaacgcaggggttctctcggctcttcggttgctggaggtccctgaatttctcccagcccttccctggcgtctcgcgaatcgactctccgtctgcctccgaaaaaacgagctcctttgctttgttagaggagaggtctgactcctacgcagggaacagaatctccactactaaacaagtggagttcggcgcctggccagccctctgctttcacgcgtctttctcgtcaggcccagtgataaagtttctccgacggatgcagcattcctgtgcagcgaagagactgcgagagttgttgttaccgaagacacaaaaccccccagaagcaagtgatatttcttcgcgctaaatgccgtcctatcttccgtttcctgcctctctgtgttacgcaaacttgttaaaagctgttttcctgtgagcctttcccttccgatacagactgttggggtatcggacggtcatccctagaaaggccctgtgagtcacagagggcgttgcacctttgaagctggaaaagtagaagagtgtgtgctcatgtactgatggctagtcgtctccagacttaggttttcatggaattcaccggaaacctcacactcccgtgtttccttggcatttagctgccgacgactttccccgtcatttccttggagagacgccgtgacgttctgtggcgctgacacacgcctccccgagccccgttgttttcgttgtttcttcaccgttttcgatgcttttttcgggagtgactctgtgcgatgtctgcatctcaagaaagtcgcgctttctgtagttttcggcgcggtttctcccttccagggctctcccttttaactatccctgcatgcgcgcgcacatacacatacccagagaaaaagcctgaacggtggaaagggaaatgacatcacctccgcgagtagatgatgcgtatttgaagaagaagcggaactgacggaaacgcgaggaaagaaataacatgtctggtcgacagcaggctaaagagaaaggcttttcgtttgagaaaagaagaacgcagagaaggacgctggagtcttttttcgacggagacaccgagctctctcaggcgcgaaacgtggacaacaaacaaatgaagaaatactaatttgcctctcctttttgctcttctcaagtttggaaactcagaaatcgaacgtcagaacgactgaagaaaagcggtctcctcttggctgtctggtcgccgaacccccatcaccagccccctcgcgagtgctctgccgtttacttcttcgacttcgtatgtcaaaagaaagagccatatccatttggataaatatatgtatatgtatatgaatatatgtatatatatatttatatttgaatatatatgcacctgtacaagtataaatgtgcatgcctatatacacatgtggaggtatgcatgcatctgcaggtgcgtgtgtaggtgtgtgggtccacgattgttaacttacaggtgaggtatgtttttttcgtttcgttttgttttctggcattctctggggccttctttctccgccgattgtctctccacgcgccgtctgtcgcctcctcacctctcgcgctttttcgaggcctcgctcttggccacagcgaggaaaggatcctcagccaagaagcagaggcgaatagaacctctcacaaaggcgagtttctgggctgttcagttcgtcgtggagcgcagacgcgacttttttcctggataccccccgaagcacca

SEQ ID NO: 711 - DNA, 3225 bp, Toxoplasma gondii
  source 1..3225: mol_type = genomic DNA
atataggcagtcagatcggttttgcggtgtttcatcccgttgaaaagaaaggccctgagacgatctctcaaaagagaagtgcatctacgagggggccgcacgaaggcagcaggaagtcagcacgatgttccctgcaagcatactgccgtgtgtgcgcttttctgtagtgctttagtgccacacgcaaagtgcgtggtgtcattttatcactcataatggcgctttcaagtggcattgaataggacgttaaacggttttttctcgcgaacacgagcatctgtgacggaaacgtgtggaagcagcgcttgcttgacgccacaggaattttgtgaagaattagcaattcaggggatggttgccaaaacaggagttgcttttttttaagcagctgactcaggctgtgggtcaaggagatctcactaattttttgcgtcaactgcgccatcaaagaggtctgcgaggcaacgttcggtagatgattagttctcgcacgtcaaatgcagcaagaggaggcgaacgctgcagacatccgagaaccacggaacaatctgaaaatctggttttctgaagaagccattcgagcaccttagctcttacgagtgaaaacgtcgtggtcggcgaaccagtcatggtggaagttcgtgtcatgatggcgtcgcgaaatcgaatggcgtatttctgaggaagcggttctgtcagtgtacggttattgagtcaacattgttcgtgacgtttcggtgtacagttctggaacagacggtggctggggtgttagaacaaatgtgtacgattatttcatgggcgcttttagcaactttatgttgtcccgaatttcaatgccaatgcacgacggtcgcaacacgaggccggcgcccgatgcaggcctgcaactgaatgtgctggtaaaaatgcgaagaaaatccaaaacgggctcttgcatattcctgcagcgctctgtgacgatttttgagtccttggtcgtgcaagctccactgaacaatcttcagcctcctgtgaccgcacggtggttgctcgccatggtgcaggagaaccgcattcatcacggagcccttgagaaacgggcgacccaggaagctccttgtcctcttttatcgagttgtatgttcatctgctaaagatggatggcgggcctcagcgtgtcgctgagaagcaagccatcttcatgtcgccgtttcggttggtgtcaaagcacctctgcagctttcccacgagctctgtcactggactatgtagagagtcgcagtgctacagagcaaggccaactgaacagagtggaggctatttccacttcaacacttcaactagcgagcctgtagtgctcgctccagacgaaacacttgccatgtctacaggtggtcagccactcaagagtaacaggagtcgcgtcagtgctgaaaaaaaacggtctgggcaaacgcccttaccacgatgtaatatcaccagaggtcttcatctgtgatgttttctcttgacgcagtttgcttcagtagaatgatgcatatctcgcatactgttaacccgatatcacagtcgaatatagttttcccacagcgccagcacagggatgcgtactagtggaagggacaagttctaggggggctgcgttggttgtgcttacagagtttttatcggctggctaccgacaaattccctacatgcgcttagcagctatttccgcttagatacaaacacgatcggacacgatcgcttcgtctgagagggtggcagcattagaggccctagaagaccggtgtggaaacgtgatgctgttctgaaactcggtgtcatgccaccgtaatctgccccgaacacgttcgtatatataggaaagtgtagagtctgataaggaggcgctgttcgatgcctccaaggtcactacaggatgtagcactaaagtggatcctgaaaacagacacattactgctgatgcggcccgcagaagcgtgcgcaagcgcaacctcttgcgtgttacatgaagccgtggagattggcatggtctcgtccccttgtttcttgaagaagggcaagagggcgtttttctcttgtgtggtaacgtagacagagtgtgccagtgtgtgtcggttgattcacgtgctggctttgatttgaagcttttttctctccgtttcttctccctaccattggcgactgatgtcaagaaaggctgctcgccgacagccagcgctttggaaacacaatcggcctggcgggcaggacaacttcttgcgacttttcgcataccagagatcggaacgtgaaccgtgtatacagccttcttgtctgaccagtgttctgtctaccaagttcccattttctcttgtcgtctgggcctccggcaacgtcgtgctttttgtattcttctttcgtccttgtgtagcgagtctcgctcgcctcccacttgattggctgcacctgtttctgtcgtccaactcccgtctccgctctgctgggccttggcgttgctcggcaggtcacttgtcagcattgttgttcactagcgtggcttcagttttcaaaataacatacgacctttccttgttacaatagttcacacccccggcttctgcctcgggttccgttctttccgtggtggcgggaggtcgattattgcgggtggcctcctgtaccctgttgcggcgggtcgacctttgccgtgcacacgaaaaccatgtaacccagaactcgtgcatgtgttcgttcattttgtatcaagtctttcacattccacattcgccccgcaagtacacatcccttctgtatatttcggggttcttcatagcgcctccgcacaccgtcttgtctccgagacgtccagctccgctcctggcgggtgccgataaaatgcgtggagaaacggttctggcgatttcgcctcgatagacgagcaagaacatccgggacatcaggacgctcaggaggtgagcgtgcaggtgaaacgattcaactgtgcagacaccaggaaccagccaaccgtcgttgcatctagtgtgcgcccgccacattagcgcagaacaatcctcgaaattcggagcaccacgaaatttgggactgaaactcccatcagaaatggagtaacgtttatggaagtcctctttcgcgtttctgcgtgttgtttgaaggaaactcggttcggccgtgaggttcatttccgtttgttctgtctcattcccggttctcgcagagactttgtttcttcctccacca

SEQ ID NO: 712 - DNA, 2054 bp, Toxoplasma gondii
  source 1..2054: mol_type = genomic DNA
attctggagatatcagcacaaagcctgtcccaactgtaccctcgagatagccataactgcatgctatgcagactcacaaatatttacatacatgtatgtatatataaacatatatatatatatatatatatgcaggtgtatctgtagatacgactatgtgcaggcatctccaggttgaccatgtgtcccacggagaattgagtgaagttacttgtgtgaatatgttgaagctttgcttgttggtcacgcaaaagctcgaggcggggaccggattttatggtgtttttctaggcatgtctccggtgagacgatgcgcagtgggggtctgactgccacaggtaaacgcgttagatttcgttttctcactgcagttatttccactttcctgcgtcgagaagcagtagacgaggtactgctttcgctccctttcttgcgtcctgagaggagagctcccgtaagcaagtgatccacgagaaactgcaatcttggatcacatcctacggtagagttgtgagatacggaactcgcctcattttgcgtattcagactctgtttctaaatcgacgtcaaccttcctttcgctttcctgaagcgtccttgcactcacgcacaaccttttacgtcccagtggaaacagtcgcacagaacacaagacgcctgcaaaaagcaaaagtttacaaatgcatccttttcgcgtcctttcccgtgtccagtccaccggcctcgttcgttcactttacagacaactggcgatttcgttcgtggttttcgctccctctgcgatggatctccactgtacctacacctgctgcgagagccgcgtagcaggagggaggcctgcaggccccttttttgggcttggctgcatgcagcgaagatcagcgaagaaactcggggaaagccaggaaacggacacagtgttcaggagagataacgcagcagacaagagaggcaatgcccgccagaagaggagaagaagacaattgttttcttcggtgtcctgtcgcgtcctccagacaaggagatttctccttcggacgcagtctctggccgctgtcactcaaccgagacgaactgcatgcgcgcatatgcttctctcgaaccggctagcggcgttcagccgaaagatccacaagaggggagaaagaaaaaagcctgtattcttctctgactcggtcaaggttctcttttcgcttgccgcgtccctgccttcgtcgaggctgcatctgccttcgccgccttcgcgctgcatgcgccaagcccagcgctcatacgcgggagacaactctatcgagaagttgagccttgtcgacttccagattcgcaggagaagacggaaaatgagaagcgaagaaaagaagaagccgcgagagagccgatgcgggaaacggaggcgcgatactggcaatggggccaagcgtaaatgagtgcgaacctgtgttttgactccggccgcctctcgcgggtgtcttcaagtgagcagtcacccggtaaacttgctttcgccgaaagcagaagcaccacgcgtcatgatttctctcttgtgtttgcgcgccgacatcagcttcttcttcctcgaagaggccgacgccaccggtcccagctgacaacgcttttctctaaagtgggtggtgccttgtcggagaacgacgcagttgcggctcctcactcagctgtacgtacacctgaacgcccagtgtcgcggcatcctctgtctcggtcgcgcctggggtgtctgtacacccggagagttcgagtggcttttttatgcggggacgcacgaaagggttttcagaaagcgggaaagcgcagctgcgcgtcctgcgagacttgctaacacgggcatttttcctgtgaagcttgcatgcgtttcttctcttctttccacgaatccggtctttccagtcgatgtgaaaagcagcagcggcctcaaggtgacgcgtggctcttgtttcgtttgatcggcaggtcccccctcgtggagaaaccaaagtttccttgaccttctccgtctccttttcttccactttctccgttttccgcggcccccacca

SEQ ID NO: 713 - DNA, 4339 bp, Toxoplasma gondii
  source 1..4339: mol_type = genomic DNA
gagacgaagagcgaggtgtgaagttaaagattgtacctgcctccatcagttctgccttggcctggaatgtttagcgcgggattcccctcgcctctagttcctcctccgtcgctgtttgcttctggaaaagaaggcgccatcgacccccgagcatgcagaccctgcagcgcgttggggtgcaaggttgtcggaggacgaagaggacaaagaatcaactcttgaccaggttttcaggcaagaaagacggacctgtggagccgctctcagagggcagagagagaggccttctccaacatgcctacaaagtaggaatatgtctgtatcattatttacatgtgaaaatatacataaatatgtgggcgcatgtgtcgaaggatgcaagagaatgtatgccgggggatgccggttgcgtaagaccggaaagagggagtttatcagacagcgtgagcagaggcagacgaagcaaatgcagggggcgaggaggggaatgagaagagactgaaaataaagagcaaagtcgcgaacaagaaagcagatcaggtgtcgtacgagaagagatgcagaaaagaaaagatgaaaaacgaaagggacggcgtctcatgccagtgtgaggagtgtggagcagaggcgacgacttcgagtgaaagttcgtattgaaactcggaaagcagagaggcggggactccaagcgcgtaaagaaaacgaatcaagagacgaagtctggacgcaaaactgggtcggtttccgcgaagagtcgctccacagtgggagctcgaacatcacagaaagggaagggaaggcgagagaaagactgaacttgtgagggaagcaaacggacaaagagcgaagaggagagacgcgtgaaaagacagaaaaaagtctctgcaagcagacatccacacgtccgaggcgcgcgtccatacctcttgtgcaaatttgctggcaaaaatccaaaggcaaaagtggcggctgtggcgatgaacgaggacgtgcagacacacagacagaccggtttttcgatcgagaaattccggaaattcattcgtcgttgtttccagcgagctgctgtgtgtgtgtggctgagacgcggtgagtctccaggccggcaaaaagtccgcgaaaaagtgaaagagcggggaaagatccgagcaggaagaaaggaaacgtccttttttgagacatttcaaacgaggtgaaggacgaggatgcaaagcaaacgttgctagcttgcatgcaagctttcggccccgagagtcacgagcgcgatcgtatactgcctgtcggttactccctcaaaacactgtcagaaaaagaagatcgccttcataacgctttaacgcgctttagcgcgctttagcacagcttctattatgagcaacttcacaagcactgcgcaggtggcggacatctacatttacttcccttcctcagtggcacgatcttggcggctggagtgtttcgcacttaacaccaccactgagtttgttttgctattggcactccgattttccttcgagaaatcagtgagcagaactgcgtaaagtgtagagagagcattcacgtgtttgtcagaaaaagagacaggcacaaatctcctcaaatggtcgcccccctccaagaagacgtcgctggctactccccttctttacacaacagttccagttcgcctgtctgtactttcctcgtttcgcctgtcagacggcgcaccgcatagccatgaaaacttaggtctccactggtgagaacattctgaacggacgtgtttactgaggtcgaaacgcaccgaactttggtgtctattaagctggaaaagcgaaaggttgcgaaaatgcctgtgccgcgcaaggtgcaagtcacaactgggaaacagaatcatcagtagacgtgggcatcgaacaccttcgtctcgtggtttaagttccctctgttttcaaatcgtgacatgtgcatgttactcccatcagttccaagcacaaacgcgccgagatgctggcgggtcataaagtgagtcgggtcataaagtgagtctgtctgttcggacagactagaaaatgggctgagcttttcacaacctagtcagtacctgtggccctccggttcgctgctgccgttttttacgcgaagcaccaagaactcactcgagtctctgcggtttaaaactttcaagaagtacatctgcaacggtgaacgacaaagggaacctgcaaaactgagtgagaaactgtcgctcctgtctcacgtgcagattgcaccttctaataaagtctgcttccacgcgtgggaaaaggagcgacgcagtgccactgttcgcggcaacagacaacaccaccgactcggaaacttttacgctgggcgcgactgcaaacgcagttgcacctacaaacagtgacatctgactcggtgacacgaaagagagagcaagaaacacagcgttgaaatgtgccctttcgctactccacagcagtcaggatatcgatgtcctcaggaaacatcacatcgagcaacacccatgcgcagtggcactgctgcttctttcatagccactggatcaagaaaaggcaacttggaagttcttgtcatctgctctcggacagtttgtgccccaaagtaggcaagaaaagcggacaatctgaagcagaagttttcattctgaataagagacttacaatgggcaattgcgcaaccgtagaaacaaccgctgcttgttgtgtaacacttgggacggttcctgacggaaaactacgcataactctctctccgcccagcaagaatgggcgatatgcaactaacaagctgtatggggtggtgtgaaactactgagtgacagtagacagttgagaagaagagcaaaggcagtgattccaagattattcctgccaacacggccgccgtcggcaccggtgtgacaagtgcaacagagaagacaccgagcgaaaagaattttccgctgactgtcgctttgcttgtttctcgagtgtgtaaacgtcactattcctggcaatggcgcgggtctgagcacacactgcgaaagcttcgttatgttttctcgtgtctagtcacttgagatgcacttcgcattccgatcggagtttgtcagcgccacagccaaatggaacctggaaaagtgaagcaagtgcgatagatgaaatctgccaggtagagagccgaacaagaaaagcgtcaagagcaccggggccgcgccaccgtcgaaattcattcgcaaaatgaaggaaagccaaccgtatccagtaacctagccaggacgaggtccagcaaactgcaaaaaggaaagaaatgcttccaataacggctgttgaaagaaagccgctctgagatcgcgttacttaaaggctcttcctaagcaggaaatacttcgcttgtttttcaggagtaactttaaaatcttaacgccagagtggtaatgcttgccactacttacacagagtgcagaggccatgcaactgagaggtcaaagtcaaaagatgaagtgagattcaaagcacactgacaaagtgttttgagatatcactgctgacccgtattgcgaatgccattttcttctgcaggctgcatgccccggacacggcagccattcgctattctgacgccgcagattttttttcaggccctgaattttagcgcgtcgaatgacgttgtttttcatggcctttccccaagctttccggccacagcagagtctccctagagtaccgggtgtggagaacggtcaaagcagcaacgcgattgccgttgagctcgctggcaaaagctcctcaagaaggcagagagccgcgctggcatcctgaagaccgggcggtcacttcgtagtgtctcttggactatcgaggggactgaagaaggttgggcggcccccgagaaaattaggttttgctgaattcatgtgcccgtcgagttctggagggcccgaaaaaacgcagcggcgatgtggagcaactaagcagctgcgccgcggttcgttgcatgcccggagatctagttttcaagacacggtacttttgcgtcagcgtggtaaagcttgtaactagcacgggaccgcgaggtcgatgagcgtgcagtggcaggtcgattcgaattgaacggagtccttgctgcggttttgacattggttttcctttctccgtgaaaagggcaggttctcaaaaattccctccgcaaccgcgaagaggctttcctgaacgcccgtccctgcagtgtctgggcgcaacagccatgagaccgctggcgccagaaaacatccggcggaactcttgttgacttttgctcgacgtggagagtcgaggacgatctttctttttcgaaaatgcccagtgagttgtca

SEQ ID NO: 714 - DNA, 2659 bp, Toxoplasma gondii
  source 1..2659: mol_type = genomic DNA
ttcgggagaaagcatcaacaccggaatcagttgtctttctcgttctctgtgtcctcgtcgcactctcttcatctctctcggcgcccctcttttgaagcgcacaatggaggttccggtgaagctccacgtccgtcatacctcaaaaacgcccttctgcacctcgcggcgactcggaaaagcgatgcagccatcgcgcagatgcatggtgatacgcgcactgcaaggaacgtaatccgtatgtctatttatatctatcaatagatttcggcagacacaaactatcatatatatatatatatatatcttcttatatatatatatatatatatatatcttggttcctgtgcatgataagggagcgagagacaggtgttctcacactgtttgacgtgattcacaggcgtcatattccacgctgaacttttttagtatctcatttttcgctctccaggtagactcgttcttgatggcactgggcggacagcgttcttgccttttggcctgtctacggttgtcgattaccacttaccgaggaaacacctttcttcaaaacagatgcgaaagacagcctgtattctcgatttgcaggaaacatcaatgtgtgcgaccataaaggacccaagcatcttaattgaaatggtacagcagcagatgcactgatagtcccttttcgtcttctgctgtgtgaaccgacactgttgcttctctctcctcctctcagttgcctttaaggcactcttcgtgaactgtcttctcaatgttcgactgcaagcgttcgaattttttttggcatgacgacacacgtctttcaactttgtcactgaaggcgcaaactgtcggctgcatgtgaggaaaagcagagcggcttttcgcttttcgcgatttctgattcttaggctatcttcaatgctttagttccatcacccgatttgtaggatcacaattatagaaaggcactcgcagtgttaggtgggaagcctcaagtttgtgtgttttgaggtagcgttctactaccaaaagaccgagactcgagataccggaaatactgtctgcgcacgcggtacagatgagtccttgtcggaaaaacgaaagagaagggaataggagaaagaaaagaacaagttaaggcagaaagtaaacaatagaggggctctctgcagatctttatcggtcatttgctggagccctgtatgtgagcaagccgaggccggcggcgccattccaatcgttgcgatttccagaagctgtcctgccctccctgcctttgaagactctcaagcgaactcgagaaaaggaactgtcacccgcaaaaaagacgattccttacacagtaaaaagggtaccttcccttgtgacccgtcttttctgcgtatcaaagaccgggagagtccaagtcgcgtttgattcggcgaccaatgctagactctttgaaaggtgtcgaggaaagcaaatagaccccgaaggggtattttccgctaaacgaaatctgcgctcttcagttagacattaatggtaaagttcctcctgccacagaaaggccaaaacctgttttgcacggagtggggttcgaacccacgcggtcgttagaccaggggatcttaagtccacccccttaaccactcgggcatccgtgctcgccgtccgctctttttctcagctctctttttccttttcaccgtccgagctccaaaggagtgacgcgaggagaaaaaagaccagcaccggcgaattgaagcccattaaagaagagccacgcattttctgtttgttatttgcgtgtcgcgtagaaattggcacaggcaagccagtcactgacgcttgtgtccggggacatcatggagtcactggatttcgaatccggccggacagtttgcgatccgacgcggttgagtttgctaacttcagtttgagttatttcgcgacttctctcatgaggtctgaaggcagaagagaaactttctggaccggtgttttcccctcaacgaaacggatgttttatgtgttttcagaaaaactagggcaaatgcaacggtggcgctcgacaagcgtaccaacatgtacgctttctccaagtggctgccccatgtagcccgaagagagatgtgagagaatgtcccatcgatacgaaacagagggcagcgcgtatttctcgaatgctgcattttatattgcttgctcggcgtgaggccagagaacagcatcgttcattcgagtctcaagtttgatgcctccggaggcgctgagagctgcacacagcggttcgttcactgagattgtagcttcatcgaaggtatgtagcacgtgcttgaatcgaaggtattatgctcccgtgcacgctatgggtatgtagcgcatacatgtgcaggcacttcccccccgaacctttctcgatttcaaagtgttcccgactgttcagttgacggccacaattcagtcctcaacagcggcgggtcttgtatgagtttacgcactctcacctcacgacgatgctttccggcaggttgtcctcaggggcaaaagaaagtcacatagcggatgacaaatcgatgccgcggttttgtgcagcgttttgtgcagctttttttgctctgtttgacggtgtaagtcgtccccactgcggcgcaagctccattgcctcttcttccggttcacaagaaaa

SEQ ID NO: 715 - DNA, 2976 bp, Toxoplasma gondii
  source 1..2976: mol_type = genomic DNA
ttcaccagaatatcgatgtgaggatactgctggagtaactcttcgcagagagcggcgacggccggtccgtcgcctacatcgactgcatggccgctcgctgagaagccgcgcctccgcagatccgccgccgcctcgtcgcaggctgcctgacgcgcaaacagagaagccccgcgcaaggagtggatgagcaagcggaacgaggctgctgtagcgcgcagcattcgaagttcgtaccctgctgcaactccgctcacgagccgtggaacgcttccgcgagccctaggcgaggaacagaaacgaagaggggaggtgaagagagaagctacggagacagcatgcgcgacaccgacgcagagccaaagagagagagaccaagagagagaaagagaagaagagagaacaggtcaaagaagaaggcgagtaagcgagacaaagaaggctagagatgttcagccacctatgtgtgtacatctcgtaagagagagagaggcgtttccctgaggaccgcgtagcaccggtcgacagcgccctcccggtggtgccgcgcttcggcttggcgctcttgaaaggggagtgaactgtctggagttcacgacagacgaaaaggcctggctccgcctcagactcacttgttgtctggcgacgcagatgagatgggatactccgccttctgcgagagcgtctgcaatcgccttgccgatgccgcgacttgcaccggtgactagagccacccgcccgtccttctctcccgtttcaggtcccccgaaagtgagtttgtacgccgagcagctcgtcgtcgagagcggccgcgcatcagaggcctggcctcgaaggaaagaagaaggagaagaagaaggaagggcgttcgcggagtgggcggagccgtcaccgtgagcttggatgggccgggaggaggctccgcggagaggcgccgccgcggagaagccgagagggacgggtgagaggaagcctgaagcgccagagaaagaagacgcaggcgctgtagacgcaaccaagcgcgcggagacagttggtgcgaagaagagcgacagggcgagggtgagcaggttcagggagcgggaggaagagggccttcgggccgtctggacggagacaggtgtctccattgcggcttgggagtttggacgagttcagggaagcgagaaggtctcgcgaggcagagtgtgcaggaaaaacaacgcgcagacgaagaaggggaagacaccggagagccctgcgccgcacggcagagaggcaggcgcggcgacttttgctgtgtgcagagaaatctggcccgacgggtggctctttgtctccggggcgcgacagcagacttgcgtttcgaaaaagcggaaaaaacaacggggagtcggattggtttcgcatgaacaaactgaagacaccgccgtgaggaaagaggaaaggaggtcgggaggcgaaggactgtgtctctgtctctggctgacgcgctggggaggctgcgcacacatgcgcggcccgcgagtcttctcgagacaggagacagaacgggagacaatttttcgggcactctgtcgcggaggaacggagactcttccgcgcttttcgcgttcctcgctgcgacaggttttcctttcaggatatggcaaccgtaccctgacgttttccgaaacgtttcaaggggactctgcgatagaatccccggcctgcaggccggacgcgttcgcgtctcgactaccccccgggcgccaggagacaagacgcccggaaaagagcagccgagagagcaaagagcgcgagcagaggaagctagcgtgaaggggaaggagataaacgcgagaaaacgccttctcgtcagagagagagaggcagatccgatcggacgtcggcttcgctcatggaaaggggggaaaagctacgcaacaacgcaacgagaaacaggagagaaaaccgccaaaggaaatgcgtcaatgtgctgaggtttcccagctccctaaaaatgtgtgaaaagcgtctagacgcggtccctgcagtctgcagaagcgtggaactcccgcgcggatcgtttgcttgtcgcttgcgccttattttttgaggaaggaaagggaggttttcctcctgttttctctgctctccgcgaatggagcactccctgcgttccacccacccaaaccggcattttctccagtttcctcgccgagttctgagagactcgcgcgaggcgcctctcgaggcctctgtgcgatggagacgaactcgactgagaaggcaaacaagccacccagccaggggagaaagcgggggacggtttgaaggagaaccggagaggcatcaggtggagccgaacgcgagaggagagaggagctgcgacggataaatcgacaaggagaaatgctcgggaaaccgcgacacagaaaatccaaaagggagacgaagaagcgacacacaaccggaagtcgtcgagaagtcgaagtcgctttttctgctgaaacggctcctccacgcgggggtggtttcgtcacaggcttcgctgctggaaaaaggaggactctcgatacgcatatgtgtacgaaagaaagaagtcgagagccgagacttcctctcagaggaggaaagctgcgttgtcgaccagtcgtcgtttcgccccctttatccgctgttcctgccaactcctcgtcggtttttctttgctcttccctttcttctagcgcagttccctttcgtgacactgcgttctctcactcgcgcggtctctccttcaccctcttccttgtcctcaaatcttcgactctgtgctcctggcttctgcgctttcctctccaaggccccgcgagcgacctaccgtcgcgccgcttttttctgtgtgttcttcgcctctcgcttcttcttgccttgcaggcaaaacgaggtcttgtttttttttctgcgtcctcttcttcctgagcctctccagctgccgtgtcgtccctcgtcctcgatggccttctctccccacaa

SEQ ID NO: 716 - DNA, 2561 bp, Toxoplasma gondii
  source 1..2561: mol_type = genomic DNA
tgttttggcaaggagctcgtgagttgaccctcaaagctatgcgtgcccgcttttagttcctgcgtcggtgggtggcagcttcgtagtatataagatgcatgcgtgtatagactatacccttgcaacactaaatgttttgaaaagggtaccctctaccgcgcaccgctccagaacagtccgcggcgcggtgctctggttgagaatgcgtgttgggcagcgttacatcaaaggtgcatacttatctatgaatccttgcattctgcagtgtagatatcacaactgggactatgtgctgaagcgatccgcaggcgccgagcatcgatgtgatatctggcgacacgcatcgtaagcggtgcgcatctttctgcgttgtcacttatttacaccaggcagtagctgcctttgcacgtagtcagcatgttgcatctcgtggcagagaacttgctgcattcctcggtgccaaccttgtccaaacactgataatgacctgagctactgagtgaattgggaaatccagctgaacagcggagcaaacgtccgatggactttgtggcaacatgggcactagcatccgttagacgagtaccaacaaacgacacaggaggtttatggtaaaaggcgtaacttcgtacatgcagccttgatccatctgggaactcatcgagtgcagtatcgcgaagtggcggtctgatgcagaagcgaactccatcaacagacacaacgtcgctatagcaaacaagaccccaaaatcggcgtcacgtgatttgcaaggaacccggaaattgtagtcctgcgatatttccagaacacgggtcgaacagagggtcgctatgccacccgtttcaaggcacgaggcaattccgccgtcgctgggggatcgctcgcattgcatgctcgtgtatttccgctgcgcctcgcagagcaggtatgtgggagcttttttgttatgtacgaggtagacgtatgctccgatagttgtagggtcttcaccattttttgcggagatgcagggaaataattgcactacgtgatacgcatttcagtgtaattccattgtgaaagtgacgcgagaagttttgttcattgaagcatcaggaatcagaaaaccttgaatttacattgcgattggggcgcgacatgacgagcaaacggctagtgaacaccagagtcgtcgtagcatttttttccagtttggaggtggggggcccaaaacagcgcgtagtttaaggtggagtgaacttatatgtctgcttcgatttgtcctgtgaagcctattcataaaaccgaaaccgcagctggcaagagctatttttcacgaggtgctcgcgaagtccactggggccctcgtcccacgccaaacaagcgacgagctcgttccgtaaagttgcttttggtgtgttttaccctcgaggcacaaagtgtttcctgaactgcttttgccgtgacattgttcaaaaggacggacaaacacccagtcaacgcgcacttgaacgaaaatgtgtcatcttcctagaaaacatagggacgacaagatcggcttcataccgagggaagaccttgaaactacaaggacccaggatccaagcgagcaaagacccgcgtgaatgagttgattaagattcatagagaccacgcaaaccacattctaccgttggcttctctcttgaccctcgtgcaacatttccctggtgtgttcaggggatatcaggtgacattcagacacgaatgcgggtctttacttggaaatgaaacgtattcgtgaaccaatgtttgcgggttcagatgatataaggcaacggtgtagtgatattggctccaaggacgggtgtgggttgttttctgtctctggaatgcaaatgcatgcttaaatgctatagaacgttgaggccggtcgcttcctcagcaccctcgaatgatgactgaagagaaacgcaacaaagccatctactgctagaacggggaaaagtcaatcctgaaatccaggttgcgtgtgtggttatgtgcaaactgtgttcagtatacgtctcggtgtctgattccatacgtacacagaacgcagtgatcaccaatctgttctctttacgatggacatacttagaagcctttttctgtcatttggaagataaacagttacgctctctgcgtcgttcgaggcagctctcacacggtttgtgtgacggaacaaaagtgtagtccttcttttgttcgcccgtgaaacaaagcgactttcccgctcttctcttcttgccatgaccgacttggcatccagttgactatcttctttgccggaggctatagaagcattttgtacaaaccatgaagtatgcttgttgccgctgtttagttacctcgcaagaccatcaccgatttgtccatgcaactcctacggagtccctgagggatgcgtaacatgccctggcctttgagggatctaccctgcagaagcacggccaaacctcatcggcagtctgtatcgccaaccctattttgcccattctggatctgcagggggtactatccgaggctgttagagaacatgtgttttccaaagagctgaaaaa

SEQ ID NO: 717 - DNA, 854 bp, Toxoplasma gondii
  source 1..854: mol_type = genomic DNA
aatgtggagttccaaaatgcagactttagagttttcggtacccggcttcaaaactgctaagacgcttcggtgtcccggtgccttcagcgtctggacatcgccctcaaacatcgcctcctttgcagctccagggggctccgactcagtctggggagcgtcttggtctttcacaactcacagtctttgtttttagagtcgagcagagtcgcctctctcaaagagacttcagggtccagatgctgttggcgccgctcgaggaacgggtgaagttcgctcatttgaacgaagtttcgcattttcgagaagggtgaaacgaatgcggcgctccgaagtcaccttcggccatgaaacgggagcaacgacggaacggagctctggctcaacgcgcgtttttgatttctgggacactgaaacttggaacaggcttttcacgaggcactgcgcgcggcctgcatttcctcaaaatgcagagccatgtttccgtacaaagagaaatctgcatcacacaagcacaaaaactacagcgatatcgtgcggtgtcacactttcaacttttacacggtttctcatctctatggaaagcgtgtgtacaccgacgaaacctgtctgcactcttcgcgtcccctcgcctccaacaacgagaagaatcttcacttgtgttcgcatggacagaggcaaggaaacctgtcaacctgatcctccgtgtctgagtcgcctctgtttctgtccggtgaaacgcaagcaggcgcacctgcgtctattgcgtttgcgttccactgtctgggtctctgctcgggaacgaactacaacggtgaaaggaggattgtggacgtggacgaactcgagctctcgga

SEQ ID NO: 718 - DNA, 3377 bp, Toxoplasma gondii
  source 1..3377: mol_type = genomic DNA
cagcttcctctgttttgtatggccgacaccggtggagcgaagaggaagcgtcggtaatcagcgagaggaaaagaaagagctatcgtagccgtatctcaggacttgtttcaaagcaggctcaccgcaccgtgccgtgtcaagagcaatgaaacatctagtttgaggcaaaagacgagttgctggagattgcgggtttcctcctcaatcctgatcggatatcctgtctcggagtgcagcgagaatatttgagactgccagcagtcgctgccgataacgcgcagatgagcgagttgcgagtaggagggatggcagtgggcggcaaaacgcggcgaaggaaactgttttccaggcaaaaacatggacagaacaaaagaagacagaaaagggggaagtgcatattcagagacatgtgtgtcagatgccgcgcagaagatgttttcagaagttccaagattgaacagacactgccgttaacaacaagaacagacaacggacacctttttcggaaatggacatttcaggccatatcgggagagtcccctacatggggaaaggtgcagtcgaagaaagaaaatgattgagcgtgggcagtagagagtcggcggatgcagatggattttcggtgaaactggatgaacgggtgatctgtgttaaaagaaatgaatcacgcgcagaaatgaaaggaatagtgaagagtgttagaattcgattggagaacggtgtttggtaaaaaggtgaaaggtgtcataaaggaaggaaacaattatgtatccgacagtgcgcaacagatcaaagataaacgagggcgaaaaaatgttgctgataatatactcattctaaatccgaacgagaatcttttcggagttctgttccagtgaatttagtgaaacatttgtgacggaagtgagtactgacagacaggcatgttatcttcgtgttcgtcacagtcccccgaagcgattctttttatggtgcttgagttacaactgctgattacaagagcaatatcggtaccgcactctctgttccatcggactgatccaaaagccggacacacaaccgctgtctgcagattcagcagagtgcgggtgaaaggttttgtgctgatcggaatttgacctcggacatctggtcttccagcagccgttcacgtgtccccttttggatcgctgtcgtcctctaagcaagaatacggagagatgccgagaactgcagctgaggcagcagaatgcaaaacctgccgcaaatattggctgaaaaactaaagtgcggaacctccagttgagaatcagtagtaccagcgagggccctcagtgtgtatgtagggcgcgaaaaatcgacacagttggcctcaagtgacataagtgtacgtggaggcacctttgagccgtcttgtttaatacatttcactcggtctgctgccgtcagatttccttcacttctggccgcttaattatttatgcgaatttacattgtcgcacattcaagcatacgtctgtgcacttgccggttacgatacagtgcccgtacccacgaggtgaaggtaaactaaggagtgctgctattgccgtgccgtgaaggctccagcgacagcagttgttgaactcctggcctctaagaacatccacgtttgctgctcgtgcgggacaggaaggaagaaattgcttatttccacactagggtcgtaaattaggttgtcttggcacgtaaagaacaagtcctggacaccagaactgccaggagcagtcgttcatatgggatatccaacagtcgagcaatgcccatctgccgtttagggtggcttcaactgaaacattgctaccatgtttagccgattatagttctatttatccatatgttagctgaagcaagagaataatagacataggttgcgtctcgagagtgcgcggcatatgggggcgcttactgtgttcagtattcagttagtagactgaacgcggaaggaattgcagcacaagccatggtgttcgccggaatgaaattcagaatgcagagcggatcatatgctgcggcagtggtattgtctgcatttggaagattcgaacttctctgcatctgggatttcgcaacggtgtgcagagtgcaatgagccaaaaaggatacggggttagggcaattgaaaaatacaccgacaaattgtgctcactggaaaccgctgcactttttgttggattgtgaaaaccagcaagggccaatgcgaaggcagttatcactgttaaaagacctgccgagtagaccaatagggccccaaagccaagtcccgcgcttgtactcttcaaaacgcccacctatgaaaattcatttcgaggacggaaccacaaacaactatatagacagtagaaggaaagacaacgatatgtagttctcccccgaaagcagtagcaaggagtgcagtcaagctaaaactagccatttgaacaagggacccggcaacgatgggtgctgcttgggggcgagtcggcagctcaactccgtttatcgggttaaacacagacaccagctgaagagtgcaaatcacagtttcggtttatgctgcggaagattccactgttttttccaaggcctgatacattggcatttccttgaatttttcggtcattctgccggagctgtcttcgttgtcttgccattttctgtgacttaccgagcggacacgggcaccgctaactagaaccagtgcatgttgcatctggtgtcttcattgtgcgactgactttttttgcagttcatctctgagtgatccgcgggagctatctttcgcctgaaaacgactttgacacgtggccaagaaaatatgtagtcactcttgagagaagaactggattttatggttgccgttcgttacactgctgcgtggcacccgggcgtacggcttgcccggcttcaagctcggagcaaatgaatctcttttttgcaaaacctctttacctcgtttccgttcgtttccgtgcttcctcaatctgattaccgaagagctcaactggtgacagcgagacagaccctcgacttctggttctccgtatgtaccggtcgcggttgagtcgatcctgcgaagtgaccgcggtccgcctcgttgattctacgcaacctcggcgtccatatatttgtgtcattcctcatagaagtctttctcacacttcgtttttagtggagctctttgcgtggcccaccttcgcgtggcgaaaaccgtataatattttccacacggtgtgttaacccgtgcctaaccccgtgctttcacatgcgccgtcggctgcgttccgcgaggagacatcggcctctgtcggcgtgaaaaagccgcgattcatggattttttttacctgggtacatgttcattctttttacgtcggtgaga

SEQ ID NO: 719 - DNA, 3015 bp, Toxoplasma gondii
  source 1..3015: mol_type = genomic DNA
acatgttcaaaatcaaatatttattcgcatggtgatgctcaaggtaggccacgaggaatccggtattcggcgcttcgggatctgggtagtcgatgatccagatgttcttcgaaaccttatacatgcctgcaccgcccacacagccacgacgaaacaaacgccaccgggcattttattggcctctctttaggtctggggaatgttctccccgacccgccctcgtgtcccccttgtcttctcggagccaaatgctggacacaaacgccattttcatgagcttcaaaccatatcttgttctgctatcccttcagagatagcggtgctgtacaatgcgacatctacaactggagtgttgaaaactttgaagcagaagtctgtccctcgcaccgccagtgtcgcaccaatctctcagaagcctatcccaaaactccgcaaggcgcctgtttccagtcactgtccttcaatttcatgtgccgccgaggggctacgcgaccgaaagaactgacaacgaatgccggacgtacctgggggtctgaagagttgctgagaggactgttcaatggattcaatgagtgactgcgccgctgccgtagcgaaattgaccaccatggacccgaacattgaggaactgcttggacctgcgtcgaagagaaccgaagaagtcgcagaagaggaagctccactgtccgcggtgtctgtcaccgacccgctgaacgcgccgcttattcgcttcacaaaactgtcgctgctggcctccctctccggcgtgcttccttccggggaaaattcccctgcagcttttggaaaagactgcttcggcagaggactttcgcgcttcgaaactccaccgcagcgaaccacgcgcgtcccggagaaagcctctcgagaggctacagaaagtcgagcggagttcttgcacgcttgaagcacggggtcggccgacatttcggagcttcctgcaccgtcttccggctgagaggcccgagacgggcgtcgttcctgtcccggcaggtacgggactaacaagggaggcgaatcatcttcgccgttcagggacgaccgttctgtgtctctctgttgccagtcctgcgacggctcagactcatggctaggctgaccagcagcctggagcagggtccgatgcgccgagctggtcagactgcgaactgcagtgaaaaaattcatgctgccgaacaggtcatggatgtaaaaacacttcagccaactaccctcctaataaggcatgcaggaaaaacgggctcggaacagcgttgccgcggatgaagagttgcgggactgaacggatgggaggctgtggcgaaggcggaggtacttgagattaacactacgacgttgataccttgggagaacggaaatggtgagttggctcagcgaactgcctccacctacttaaattgcggatgtgcaagagtttcttccaaaagaatgatacaagtggcttcaaccagatttcgtttctgtctcacgaacagggtaaaatgattcgaagggggtaagagcgtttgcagggccgctgcccgatgcttgtgacattctgtaacaccggaagactgcctcgcgggaacaatcaacacagggcgtgtatcggcatgctggaccgtgaagagtctcaggaaacaatagaaaccatcgcctggggaagaaaaagaactccggcccgcctgcctcaccatgcggacgctcgagacacaggacaccaaaccgaccgaggaggcgccacacagctccaacaaacacaaacagttacacagattgacagagttagtctagaaatatcagtttggctttcttcatcatggctatccgcatacagtcacagaagaataaggaaaagcaacaatagtgtcgttcctacttttttcgcatgtcctgcaggccagctttaacacacggcggaagtgtggaggctgggctgaccagctgcgaaactgactccggggaaacaagcaaccgggttctttatgagaaatacaaggcagcattgctgtttccttctcatgttctctgcttgtttgagaagagaattgatgcattggttgacaaggttgacaaccatttctagtcacaactcggaatacggcaagctctgcagtattgtctctcttgcttctcagcactttttcgcgacacgagaaaaggcaaacttgtcggtgcatgctcttgctgtgtgcctgaataggcgactacttgtgaagcagagacacgtgccctctcgaaagctgaaacggcggcgaattttcacttaattcgaatccggacctgcttctgtctccctcgagcatgcggtaaagaagcacccgcgtttctggctctccagtttcgcagcaaacggaatcttgtctctgtcttcgcccgtcagaaagcatctcattcccatttctctatttcttggtgtctaatggaggcgaatgacagggggctgcctgccgccgaaggagggcagaggcgtttcggtccgtccattcctctttcggggccttccagctcgggcttccaccgcatatatgtacgtgtatagcctttgcagcacgtaatatttcaagttgcgttcttctggatatccctgtttgtccacatcatatcatatacttcatccttacacgcgtatatttgtaagcatggtcatgcatgtgtatcacagaaagtgtgaggagaggaggtgcagaggtgttcttggctatcatgtcgcgctggaatgcgtgtctagatcatatgccgtaattcgtgccagaacgtgatcttcgtctcactaactcacaatctgtttttctcatcgattccgcagaaacctgaaaccctctggaggttgtatgcttggactgcggggtctgttcttgttgatcatccgtgtctcacccaaacccagagagactctttttctcgacatcggaaaagacccgcgaccagcccttcagaagaccaccatttcggtgggtcatcccttcagtttcggaacaagaagttgaaccgctctcggttcgctacttaccaaaa

SEQ ID NO: 720 - DNA, 1690 bp, Toxoplasma gondii
  source 1..1690: mol_type = genomic DNA
gagtgcgacagtggactaactgttcttgtgtgaatgtgatgtgaatgaacaggtgtgcgtgagctctcgccgagggaaggacggactctacgtgatggatttcagtggcgatgtgcccgtttgacttctcagttgttttgtatattccacggtagtgagatgccgtgcaatatgggatgcttgcctcataaaggactttggtacctgtcggcaacctgcggcctggtttccgcaaatgtccatgggcatcgagtctttcggtttaaaacagttattcctactctgaagtctacggagtagtggaactgctgctcggggcaatttctcagagcgttattgtcacacaagtcacaggggtacctctggatttgctgcttcgggtgaagctcttcgctggaaggtgatacaggtgccccggagaactcttatcattccacgtcaatgactcacaacttccacttatccactacgcatctcagtagctctacacatagaggtaactgaacgcctcatcttgagcatgcactccatatagctactcgcaccacttctatcctgccgcagtaaaacctgtgcatcggttcaactgatcactaatgcatagggcctctcgtagtgtccggtatttctgaatgaggtagagtaaaaaattaagcgtcttcgaacagaaatgaagatgcgtctatcaaggaggtaattggctacatctctcgtgcagtctcgaacagtgtgttacaggtgtcagacaacatgttcttgagaatggtactgcatactgaggagaacacgtggggtatcgttgcaaaaagctccacacacggcgtactgtagaggaacgattaatgaaagaaattggcgtggtaagaggtagatgataatcttcgagatgaagctccaacaagaattatcgatactgatcagtcacgaatattgtttctggtcggcagctgcgaagagcctggaacacctaaactacacaagcagcgcaggagtctcaaatacctggaggtgacatagtgttattacgcttactctggcgggtgtgtagtgggaacgcggcacgcggtttcctatctgaatcattgtagacatgcactactgttgtacgcctgtcgcgtcctgtgagttctcattgtggaggggcaagaagtgtggaatcttcttcaccagcatgcgtatcagttgtacaggaccatcgcgaaaccacatagaaacgagttttatgcgcagggcgctgaaaacgcgaggcggggtatgagacagatgaatgaagtaacttgctcgccaatttatccgatttgcggtccttcgggtaaagtgtgtgaccacgaattcccaaggtgactctcactctctagtcatctatccagcttcgtcacagagggggtgcagccgacattcgcatgccctgagaatttgtgtagccacgcatgcgcgcttcgccaccgtcgaaactgtagacgcctgatttccgccgcctcacacgaaaaggcgtttgtacgaacaactaaaacgttatccgtcactttagtcgatcggtctttttgtatcgtactcggaaaggttttgcgtaaacaacgcctttcttgtggtgcattttcgcgaaccggggctacggagtcgggttgcctggactggctaccaaaacaatttcggtgtttcatgacggcgacagtaaaataagtaacaa

SEQ ID NO: 721 - DNA, 2137 bp, Toxoplasma gondii
  source 1..2137: mol_type = genomic DNA
agaagaaattagatagttcaaagctttgcaggaggcgtaccgttagtgggtaccgcctgtgaggtgccggcgttttgtctcggggggctgaggaacagggaagggacaggttgggcacagtgaggttccgagaggggcgacgattttgttctttgcgtgggatatatgatgtggacaaccgaccccgcgcacgctgaacgtttttactgatccgcgtgcgcgaatgcgggaaatttggtcaactgccgtttttttcgtctttcttgtgtaaggatgtctcggccatgacaaccacggaatgagcgaagccactcagggcttgctttctcccctcctgacaaagcggcttttccggaggtaccttttacacgatgccgcccaagcagcgagagaaggacccgtgttgaatccactgttgcactctttgctggtactcgaggcacagcctctcgaagctcaagccttgtagtatttcttgaaaaactgtgtacatgaaatttcgaagtcgtgggggagggttatgttaaggaccgtaggaaatgtcacacacctcaactggtaatggattgatatactcatcgtacaagcactcagctagttattgacagtcacgcgcgaacgccacaactgtctgccatcgcctcagtgattgaaaacttgcacgctgcaagcgatcctcagtcaccagttcttttctgcactcaagaaggtgtggtagacaaggagtatctttctcgccacacgtccagctgccaggtggagacccccgtcgtcttctccatgagcccacagtagttgtgtttggaaacatgcaggttggaaccgagagggacattcagggtgcatttctgtgaggtgattctgtcgcttagcatgccgaaaaaaacgggcaggaatgctcacggagtagatgcgtactgcaaagaaaacgatatctcaactactccgcagccttccgtcctcgcggaggcagttttcagaggagagacaatactcgcttgccacgttcgatcaccaaatgaaatgcagttccctaatgcactacacaaccgttgcggcgccgtggtgtctctcgtttctgtgtcaacgcctcctttgtagtgtccacatgcggtgcggtggattgctgggggtaacgttcaccagcccgctttgtggagggcttagtgttgactgcgctgagactacgcggtcgcttttctgggagttgttggggaattctcgtttcgcgacattttgagatgagaatacaggggctgtgatcatcggaaaatgcatgatgtactcgaaacacagtgttgaggtcgactagaaaggccgggtgaccctcagtagcttgtaggaaccacgtcatacacggtgagaacccttgaatttgattgagttctagccgttgctgcgatgcacttactggtacacttctgaattgctgggtagtttgcgtgccttttcaagaggggctaccaatccgcggagtaagccactgtgttcgaggattccagtatcattgaaacctgttcttttccgttggcacccaccgcatctctaaccaattgtccaccctgtgagcgtctcacacattgtaaatgacaaataacctgctgaaatctatggaactgaagtgctccgtttgcttccctctgggacatttttctactttggggtgtggaacggaaataccaacttctttgcgtttccaaggcctcctgcaggtctcaactggaggccggagctgggtagctgcgagggagtgatgagattcgaacgcgaagaaggcacgttgtttgccaccttacccccgctcgcgcgccaactagcgggcgagcagcgcgtagtttgtttccgtgactctgtgatgcgcctttcttgcactttgttatcgttcagtcaggcgcatgctaacacaaacgaatgatttctttgcttagccgactgagaacggtacagagggagcaggaggaatactgggcaagtgaccatgttggtgtgtagctggacacgataagcatcgatggcctaagtgaggccaactggcgtccctcaagacctctacccgttcgatttgacctcgcaaacccatcccgaatatttccttagatcctctctgtcagctgtttacagccgcttccaggtggca

SEQ ID NO: 722 - DNA, 4665 bp, Toxoplasma gondii
  source 1..4665: mol_type = genomic DNA
gagcacataagcagaacaattgtggcttgagccttgcacagagctggccaaggaaacgtgtggtccccgatagccacacaggagtacttttttactgtcgcatgtcggcaaagacagaagcaccttcatcttctgccccctgacatttagagattggtgtcagtgtatgtgcacgtaaccggactcgaggtgatgtcacggagctgtaggttatacagcattctccaagtgggtggctgcagatccaaggcaaccacatcgaagacctcccgtcacaatattagggaatccagttatcgccaaaaaggccaattttttcagaaacaactgctgccgacgacaaaatggaactatgctatgtgtgccacccgtagatgactatctatttacacggaacctgctgaccaccatcatcttacgccgtgtgacgcagtgtctcccattgcaggcaaccgtgatcacatatatgaagtgagccaatcgttgtcctactggctaccaaacccacttttccagcttacacaaagcccctatataagccaggaattccttcttgtctccacaccatcttcaaggcgtgtcccgtggaagttagaagcgaacggtacactttagcgggagtacagtcggcagcctgacccaaagctgcgcctctagttggtcctcttgcctcgccgctcagtccctgctgcaactgcgccgtgcccgaagacatgattgtggaacaaggttgaatggaagaaaccgtagatgacgaacctagatattgccttgaggtcacttgcgcttggatcattgcctttgctgtgtcaattggataaaaaagacatcggccgacgaagccactgcaggcggatgcaaacatcaaggccctcatctttcgccagtcaatcgaggaatcatcagactcgccatggctgagatgttcagctgaaacagtcttccaggagcctgctccggtcgcggcgcatgtggcgtcattggtagaaggctccatcaatgtgggattcggtgcgagaccacgccagcacacatgaaatcggctggcagagatgccgatagaagtctccactcgcagatcaacgcaaaatcctggttaccttcgctgccaccactttcccagactcaagcgccaacgacacactcgaaccgtggcacacttgctaagcggcagacaacgacaggcctgcaacgagtcctagtacttgtggctgacccaaaagatttgagttgggttcgcgtgtgtcgcacgaaggcaaagttaataaaaaacagataaatggtgcgctgttgggtagaagaggatgcctggaaaaggacagcagcggacccgcaaaaaaacggtgccggcaatttgctcgttgcatgctcggcagtggaacatttcaagggaaagcgtggccgacttccacgaacggtacttgagctggcgcacgtgctgcagtatgtaagtggttgtagccgaggtaagcaactgagtcttccaaaaaacctgttgttagccgaataggagagatgaagactccgatatgtatggaaagccctaaagggccaggaaggagtgtgcgtcccgttacggtagaggaacctgggcacagtgtcgagcgtaccaactagcggtgtatcgacacgtcaggacaacattccgctgccccctgtgcagatataatccattacaggttcacgaccgaatgcaacacggtttctgattcgaggtgccccgaatttatctctaccgcaatgaagatgttgcaggtcttccttaccttcgcgcttgcaccggcacaccgagcgacttcaggtgtttgtgcggagcctgtttcgcaagacgtgtacgtccctccgggcgattctgaggaaccctccgtcataacaagcgccgatgagcaaagcaaacacgcgtgagacacattaaaggacctgcacgttggacgagtgaagtagttgaaagcgaaaatgcagcgatgccatgcagcacctcgtgtcatccataagaaaggcttatgttgacaacatccaagcagaagacaaacagatagaggaggatatcggttggttgtttctagaagccatccttcagttatgtcttacaaacacatggtaactaccagcggatgcgccagaagcctccggcgaccattctccagagactctgcaacggattggtaagggacgttggcagtcgacgttgttgaaactggtaactgtgcatctctccgccagaggaactccaaagaaaagcagcaaacgcagtaacttcgccctgattaacagatggtgtccattacatatcactagatgagacccaggaagcacgtgctgaggaccttcacgccgctgtgcgtgaagaagtgaggaggtgggacaaatacgagtgcaaataactatcaattcctagcaatgccgcagtgatatcagacatgaagagacacggccgcatcaagctctctataagaatcaacgactcaacagcattcaagcaaacgaaaagcaggttaataactcttcttcttatacctttgaatcaaagtgactaccgcgtacatcacgcatttaaccaactacgatccttggtggtgagtagcctagcaccagttttcgctgcttgggatctatgcagatagatcggaactcgcagaaagaggctgaggaagcaacgaagctattgcaggcatgctgcactagtttcatgacacttaaggcgcctttaatgtgtgagtattgcagcaatccagattccagacgcttccatccaggaagtttaccaattacatcggagtcctagatgcataagaaacgagctcgactctcggcatttgaagctatagatgcacgattgtatcatatgaatattctcagcacaaaattgcaacttaacccaattcccgtttgacgtccctgctgttgttgatacagacatgtaacgcggcgctgctgaaactcagatatttcggacatgctctactgtggcttagttgctaagataagccatgcaaggactctggcttagttcttgtcttcgacgtcctcacatcgacgggtggcgtacacagcgaggagcacgggctctatatccttttggcgtatgacagacagaagtagcgagagaaacggtttttcgcttatatattccgtttgtttctacagaacgtgttccgtgacacttcctgaagcagtgatgcttcaatctgcgcaaataccgtgacccttgaggttcaggtgtgcctccgaacagtctgctcatcacagggatgtgccgtgtggcagtagcttttccatactatcataccacaatctccacatcagatgtacttttaagagacgcgtttgcagggtggacagacgaggcaccgcgcagcagataagcagtgaacgatcgagaaaccgaacttgtcttgatgctccagctggcaggattcacaattcatccatggtgctaaactgtgcttgcacccgtcaggcccaaacagttctcttcaacagagctgcaggaagcatggagttttcagcaagaacaattccgaatatgtctcttcgttccaatacaggaaaaaaccttgaacaggcccagttaacaatgcacggaagtttgatctgcgctgcactttgcagtttacggagcattgctcttcacgcacccgcagggaattgtatttactcagtggcgatgtttttacgagtcctggcctccttggcgaaagggatggctggacaggagaagaagacatgacgccaagaatggcgtgtctgcatactgtggcagcgggaacgctagatgcgcgatgttcctggtgattcagatgcaagcggcaagcgccgctccttgctatgtgccagaaaaaagttggatcgcaccccatggcagccttacacgatactgggagagggggcgtgcaatttctgtttattctgcagtcggcacgcggtcgtaagcaatcatggcagcaactgcttttccgcttcgccgtcccgtactatgcagggcaggccagtggccctcccccgtcctttaaagtatgcatctggttgtgctaaggaggaaaggatccattatatgtcataagcatcggatgatgaacagtgtcttcaatgttgttctgcacactgataatgctatgaaggatttccggacactacagacacaaacaattgccagcagtcacgcccgttcgcatcggtacatgcctgaacagacactgcaaccgcatgcagcgttacgattcagacttgcgatccgttgtacctggactgcacacacactctcttgatgttttatccactttttagtttattgtttgttctcctatgcgtgcgagctcgcggcattcacgcaagcagacacactacggcgctcctgcttcgttaggcactggttcttgtgactgcatactcgacggaactctgacccaacacggtgtggagtgcgagcttcgttccagaaagccacgacgaagctcgcttttggcatcgcgccgatgaaaatactactctgttctctgctggcttttttcggaacggtgaccagccgttcaatgcagtcgttgagtgggggagttataatcgggagccaagtcctcgtggtggaggcaacgcagaccccgtcagcatcctaccaagattgaggccctgtcgggtgtttctttgtgcggtagaaatgcgtcacga

SEQ ID NO: 723 - DNA, 2411 bp, Toxoplasma gondii
  source 1..2411: mol_type = genomic DNA
ctcgtgcttctcgcgctctaaaagattcgatctgcgaattcagtcattggcaattcttttttatcctagtcaaatcacattatttcttatgtgcaagattcgtaaggtacgccggggatgaggccagatactcttggagtgctggctctcggattgtacaaagagttcagtaattcatcatagacgcaacggtgtttctagacacatttctggtatgaaaagctcgttgttaacaggctaactgggattcagtgtagaaggtgaaacgcaatgcggcatgtaagagtcaaacctacagaaagaaaggtggcttgcaattgataatgcagacgtgtgtctcgatagactacagtgctgcgtaatgaatcttcgcctcggtgagaaaatcaactagctcactggctcgtttttcaaacaggaaacagggatacttgtggcagctccagtgttatctggaacaaacgaagactatttgagtcaccatcacattagctgcttttcaaacgatttctctgtagaactcagccaatgtttaattctccagtcccgggctcaaatgcgagaataagtgctgagagtgtttacataattcatggacttctgaagctttgcttgctcaaagtccccaacgaacaacactgcaaagagtcccgagtagtcgggagcaatccgttccaagatgatgtccatctgtgcatctcagtggattgccggacatttgtgtgcgccgccaacttcccggcgaaacatccgttatgctgaaacagaagttcctgaagaaaatgggtagaacggggacgacactttcagctgcatggtaggctggaaacgcggggaaaagatccttcggcgtgcgtccagtcgctgcgcctcggcaagaaaagggaaaggagtgtcagcggtaaaccgtaagcccttagaagaaagaaatgcgtgacattgtcagttctggggacttcgcagtgtaaaaagcctgccactgtgaggaagaaggcaatacaagggaaagacgcgaaaacgcagaatgtgcatgttctggaaaaactccgtacgtggcgtgaacccacaaattttacaaaagtttttgcgccaaagtgaaatcatggaaactgcacagtccaaccttctccaagcagacggtatacaattacatattttgaactatatacacctttatgtatacacctatatatatacatttgtacgttcgtgtgaataaacggctcaccatctccctgtctatgtatatacatatggatctctgtatatgcatatatatagacatgtatatggaatggtgtatctacaccaaatgcggaagatcgtgttggtggtgtctgtcgattgcgaacaaagagcaccccgcggcttgttattgttgtctgttacactttctggattccacaattttggttgtcgcagaaaactagggtttacggttttaaagcgttgttccttcagaactgttgtttcgcagggacagcagcgatctgcatgaatgtagactaaaacatctgtttaggctccttagaatcgccggcccttcgttgttgtccgcctgctagtcgccgttcgtttctgtgctcgcgtgcggcatagccatgaggcctcgatcatttctctctttttaggagagaaacgtaggtttctctcgcttgcttcgaagacaagcagcgttttttctctcgtttcttgataggcgaaactgaggcagaaggaaaggtgaagcagccctgtgcgttgcgcgttcttcgattgcttctctggtgggtctaccgcgctcgttcggcgagttttcacttgcatgcgtttcgttgagcccgaattcttttgagtcggatccgagaaagaaggggaaagagatgaaacttgacagcatgagcgaggggagttttctcgcagcctcgtttcttttcctttttctcgaccgcgttctgtgaggcactctcctgtcgtctcttctccctttgtagcagcttgccttctcggataatgttaaccagagagtgcagacaagattgactgttgtcggttttctctgtggcattccgatccccagtgaattctcaacacactggtacctcgtcctttttttcatgtgtgtttgtctccttttcctctcttctgttgcgcgagtttctcctggttgtcgcccttttgtctcttccctcatctccactcaagctcctctcctttcatcctttcctcggtttcctctctcctctctccgtttgacgccctcctcttcttcatcattcaccgaatcctttcctctccctcaccttccccgccgtccttttttctcgccactccctccctgtctcctctgcctttctgtgtgaccctcgctctctcttcataacttctcttcgcatccttcaatctgctcttctctcgcgtcctcctcaaaa

SEQ ID NO: 724 - DNA, 2190 bp, Toxoplasma gondii
  source 1..2190: mol_type = genomic DNA
tctgtcgacgaacacgcctcgtctctcccggcaccaatttttccccctttcacacctttagcttccgcctccgctgcaggggcatctgcaccgccctcgtgttcactacctttcccttcttgcggagaggttgtctcactgttatcctctatttcgagctcctcagacttatcccacgctgccgctggagcagaatccgacgggccagcgtcatcttccctaagaaccttttggatgctctcctcactcacgacagccgccatccttgctccaggcaaggcctctccttcagtggaaacttcgctcgttgatcgtggctgggtttctgtggccaaaaccgtcgcagccatcgcgccgggtaagaaccggctgatttgagtgtgtgctctgaacagcagcacctggtaacgccactgttccttcaccgcgaagactatgctttgcgtcaatttctttccactcgtgctcgagacctcttcaagtgttcccttaggtaacgcgacgaaaaccagtatgtctttgatatgctcgaggtggtctacggaagatgtggctagcgaaaaagaagggacgctttagcctcaattcgaacgatctcatcgaaataaaatgcgggaaacttctcccaaacccaatttttcatgaattgaagtgactgtcactttatcccttcccgaagaatttctccacgtcactgagcaggggcctggtgctcagcgctgacgcggaagtccctgttccctacactagaaacaagcacgaagtggcctccgagaacgaagcaacgaataaagctagtctcgtggaagaacagaaatggtagaagatgccaaaaccggcaagcgggcaaaaattttgccttcgttccacccggtcactccgaacgggacggggttttgcgatggcctctaggagctagcggctctgctactcaggaaactgggaaaaggagcgctttctaacagttccagttcacagacgtccgttctgttataaatagttcaacagagactggcctgttgcggagactggattagttcacacagcatctcaaacggacaaaaaagagaaaaagcaaccggccgccggtcggccagtacaactctgtgaaagaaaacaggcaaggacagaagtaaagcggtggcaatgaaaatgagacacaaaaggaaaagatgaattaacacatgcaactgcgtcttttgctacttttcgtttttttcacccgccggacgaacgcgcgaagttgtggcgttcactcagtgtacagacagcttccgtaggcgaaagagcatactcgcctcttccttccctcggtctagcacgactgttctcgtcgtcctacgatgaaaaaatcaacaggagcaccctatgtgttcctaattgagtaaacattgcacagagcacgaagatatgcagatggagttacaccattggagtgtttcatccgctgacttaggatcacgcgggtcgattgcgtaagtgaggtcagtgccttgattaaccctgctgagatctcacgtcgagttctctattttgtcgcacgctacactggagctacgatgcggcggacaaccgccaaggccctctcgctcaaaagacggtcaggcgtcatcctgatttcgtcatctcgaactggggcgcgggtgtcaacgtcttcgggcttgttgcaaactaaccacccaaacctttatttgggtcgccttataaacgaggatgcacgcactagctatcacgcggcgggcggcgggcacaggggaggtggtgtcatgagcggttctgtaaaaacgtcttcgagctgcgcacaaagctgcacagcagtcccgtccgtgtccgtcgaatgacgggcagatcgcgcgggctgaggtctttagagaacgccagcggacggcgaccatatatgctgccgtgtatttcgttgcacggtgtttttccagtgtgtctcaacgtgaaagaacgtcgtgttggatctattgggaacttactgttgtgttcgcttaaacagctttgtcgttaggtcccgtccccgtttgaagtccacgggtgcaacgcgagacccccttcgtccactccgaggtcacatcacctgagagtcaactagaggtctggtgaaacagccgtcgttacgtttcgttggacatatcgtagggcgaaaatttttgtagagtgtagaagggattttttagtacaaga

SEQ ID NO: 725 - DNA, 2255 bp, Toxoplasma gondii
  source 1..2255: mol_type = genomic DNA
caattacgctattcgagctgtacgtacacgacgctgcccagttagcgagcatcaaacgcagtggcggcgctcgtgttaatcgaagacacagacaacaggtgccagtcccatttttgcgagacatcaagagctacctcaactctctctatggtttctacaacgactcctttcccccgcaacgccgtgacatgtttcggcagcgtgttgaagcaacagccagcatatgcccggtggtcttgtccacatgaaacaggtgcacacagagcctcgcatacaaccctgtcttctacttttccacgctatgtctatgcaatcgacacccaagtcagcgcattaacaacttcgttgtagtacaaacgagtgcagacagtgatgtacaacagacgctctccctgttccactacctaatcataatctactgttccagatattagcacgggacaccttctgtgtgcttgcacaatgtagaaattccactaaaaaacgccttcactcgctgacgacacagtttcccccatttccccatcgccagtcaccggacagaacagaccgtattctctggcgggtcagactgttgtggatgcggcagaacaaagaacacggcgcccagatgacctctttgaatgacaacaaagcatgcggatttttgaagcagagcagacacagaggatgcggagaaaagccaagtggaacacggttccgcgcctcttcacttctcagatccgcccccctcctcagtggcgaagatctgtaaaatgctgctgttcggcttcctcagtggggtccaagacacttgccactttgcgcatcggggcctgaattccaaaacttttccgctcatcgggcgttccttcccagcgtgtcgatcgcttccctcggggtcgggacacatctaacacatgcgggaggaaaaaaaacgagggctgtggagccgcagaatctggcaactctccctcaaagatcaagcggggcaatgtttcattcgtcttctccgcagttcactctctcgtaggtcgagaaacttacctcccgcagggatggtgatagtctcacaggcataaacagacttcatggtggcgacggagcgggagaggggagagtcggcagtcgaggggaaacgggaaccgccaaaaagacagcgaaaaaaatacaacgggctcagactccctgagacgcgtcgacaagtgtctgtggcgaagcgaggccaacccagagaacagtccgaagacgacgcgaagagaggccacttagttgccccgcaccctggaaatttaacaggggtcctagcaacctacatggccgcatgcacttgacaagcatgctctttttcgactttctttcgaccccacgcggccagaatacgcctggcaaagccttccgtatataagccgtcgggaatgtgaaaagccgggcgcgcgagcctggtcttgttggcaagccgttcgcgcagtgtcgaaaattgacagccgcgctggagcacgtggaatctacggtgcaaagtgacttttccggggttcagtccggaaggaaaacaatcgacggtgtctcgaccttgtggaaggaataccggcactcgccgaatagaaccaacattttgctggagccgtttttccttcctcactatcggccgacaagggcatcctgaggcaggcgagacacgcagcgcacatgcagtttctgcgtgaatcaggcagcatgtgacgctggaaaaacgtgagtgtgccagcacgccacaactgacgaaaaccgaattactgcggactgccttctgcatctctttaccatccggctaacaagtttttcgataaaccatttctctttgtggtgtgttagcgataacagccgcataacgtcgtaagatatgctgagagacaagctacggtccgtccgtgtgcaatggagacaaaaaatggcgtcttcgtttcgattctttttcggctaacctctccggtaactcggctcaaggtttgccaagaagggcgataatttggtcctggtcttggcacctacgaactgtgaaagagaagcagggtgtccggcggctcttcgccaggatgcagacctctttctctgtttctgcaaactcggccgctcattttcatggctgtccgccacttactgggagcgtcacttatgaatcagcctgttgacgtccattcctcttgcctatatcaatcttgtgacgccctttaagtgtttttctgccgcggcaagcgttctgacggctcttcctctgcttctacggctatctcaaa

SEQ ID NO: 726 - DNA, 2502 bp, Toxoplasma gondii
  source 1..2502: mol_type = genomic DNA
actcactcgactctacgcgcgtatacagccgtgcatgtgcgtctgtgtctcccgtgccgatctttacactgttgtgtccagtgtgtgagctacgtcgagtaataaaagtagaggtagccgtgcatgcaaataaactccgatttcttgtcggcggtggcgctgcctagtctgcgtcggagtgtatgtttttttagatggctgtcggtcacattcaagccgatttggttagagaaacagactttggaaaggccttgcacagccggagcgtgcatgcacagaactgcgatacggcctcttgccgctgctccattttcggcggtgcttcataccgctcgtatgcggtcccagttgccggagtttttcctttcagacaaaccagcagaaacaggactatccagtaggccttaccgttcttaaagttttgagggaagtaactcacgcggttgcttgtgccccgattctttcgcgcactcctcaactttgcctttagtagaagcgatgccttggcaggtagacgtcggtccacatagaaatactttttctcgaagtcactgggccattcatctcctccagaagccccttccgatcgcggagttacggcgtgctgttgagtttcgcataggcatcttcgggagagaccggggaacgtttttaataacccctcacgggggggacgcagaagccaaggatataaagagaacccaagagttttgcacgtgctctggtcagaacagtctgaaattcaaaacgtggcagactgttttttaatgccctgacacatcccctcgtatgtgggtcccccgagggggcggcggctcttcaatccttttacaatcttgctgcccattgaaaagcaccgtttagtcgactgccttcttgcgtctcttcggacagcttggcgtgcatccaggtctcacagaaacaagcatttcgacttcacgactaggtcgagtgcgggttgtccgcggtagttccaggattgcattcgtctggtacgaacgcgcatttctttctccaccgcaactagcacgctgaaacgccatgcacgagtttgttctcgtattgctattggaggccaccagactctcaaaagtctggacaactcttttttcgtctctgttggagctgtgggtggcagagagaagcgcgcaattcttgggatcgcgcgctcatggttctggctgtggggtctgaactagcgtttccttgacaggctggaggcgcagagacaccaacagactaaagcaaccgaactcctttcaacatcagtgacaatatcgaatcagacacactgccctgtgaaaaagtacgagttgccgccgactccggctcgcgttccacgacggccgcatctgtgagtgttcattgccaagtggctcggtcaagtctgtgggttcgcgagattcgacactattagctgtctcaagcatccagttgcgttttgtgtccatcagtcccgattaacttgactgttcttcgtagctggagtcagagccaggatactaggcactctggtcggtctgtttagtctgtttatccggtttgcgcggtgcagttctggatcgcggatcctacgtacaggggggcagaatctacttataatgatacacttctgcacaaggtttggttgtgccgcgcgcttttcgcgtgacaagtgatcccattttctctgtttgcatttcagaagcagagtgaaaccgtgttgaaagaccggcgatcccgacttgacggctggcagtcgctgcgttagacgagtaagccgcctgtttgcggcttgtgaactccacgaagtggagtctgcgactttagccgtgaggaacatttcttcgcagaccgccaagcctgtcagcaaacacgcgagaaagtcgcttctttgagtaagcggccagacgcagctagccagaactgagttgtgaatgctcgagctcaggtgtccaccacctgccccaaagggtcagccgcaccggtatgtccattcttttcggtttttttgtgtcgaagaagcgcgttctagacggtgggtgacgaggcaggtgtcattggattcgtgtggttcgaccacaaagtgatattcttttctggaaggacgctgttgaagattcgcgttggttggcgcggaaacagcgcgaacgacccgctctgtcccacgaacatcgggaagcaacgtcttgcctcgcgcgttactcgtgtctctggaggagcagcgagagcgcggaacgacgaggaaacgcggcacgtgtagagaaaggagaatttgtccgttctttaaccagacagtttcgaatcttggcaaaaaccgaactggcgccaacccccgggaacttccgaaaccatgtcttgcaacgcgtgtctctctggtaacaccggggagggtcacgggagagcgttgggggtcgctttttttcgcacagcgtgtcgaaagtgtttgtcaaaaaaaacgcaaagctcgggcgtcttattccgagacgggaggtcttcccccgctcctcgtttccgcaggaa

SEQ ID NO: 727 - DNA, 3241 bp, Toxoplasma gondii
  source 1..3241: mol_type = genomic DNA
gctcttcacctgccagttgcgagaggtctgtgcctacagacgaagacgagctgagggactcgccttcccctgcaaggctggccgctggggagagcgcgagtgtgcctctgttttgctcacagaagtccgggcagctctcgacgcgagtcccgcatttggagatggtgcgacggagtggcttttggaagaaactgcggcgagaaaaagaccctgaagatccctttcgctccggtttggagtcggagtgggacgcgggggcggcacagccctccgcacttcggtgtgaaggcagcggactgggcaggccggagagccccgagagcgaaggcgacgcgtgcagcggcctcagtgatccggagccaggagttggagaagaggtgtctttgtcatcgtcgtccaagaagtcgccccagaacgcgccttcccgcgcgacgcccacacctgcgtcagactcgcggcatttcttcctcaagagcgaagtcggcttcgcgtggaaaaagttcggaactgagaccgaggtcctcaaactgctcaagggtttctgcgagcgactcagccgcgacgcctgctccaagctcccagaaaccgacggcgaacctgtactctcgccctgggaaaagccggagctgacggagtcacggcgctgaaaggaacccgcgctgctgttgtgttggctctcgacagggctcagggaaagaaacgcctccgcacagaagggacggggccccgcgttgccagccgccgaggaaaaaatcggcgtgatcgacgggccagcagcagggtagccaggcgtcccgtacccgagcgcggctgtcgactcaggtgtctggacgaccgcccagccctgggggtcgggacgcttcgcgcggtcctccatcgagctgagacgaggcggccggtaaggacttccgtgcatggcgaaacggagcgaatgcggtgagttgctatctgccttcccagaagagggcgccggggtagggacggacacgcaagaactgcggaagaaaagccttcacggggtggagccgggtccccgcagacgcaggcctgagccgaagcgaaacacggtcgtcgatacacgaggagagaacactgaaaaaaactcagcagcgagaagatggaaccatgtggcgatcacatggtggactacggatgcggaagtagaccgcggccagcgaggcttctcacgcgtgtctgtgccaaagcaggctggcaaggaaactcgagacaaggaagacacgcaacatgtctgactacctctccctacgacaggaggacacaccctcctgcctttaccacgcaaaagacgacactttccgaggggacatcgaccccgggcacccgttcgcacttgaacgaaaaaaagcgcaatacacaaaggtcaagtacgctacacagttgctccgccgccaagaatgaaacgcagaaggaacatttcatgaatgtcacgaacaatcagatgtccacaagcgaaaccgccgcagcgccagccgtctgcaacccataaaaagtcgtcgtccgcggcaccaccacccctcaaaaatgtcaaggggtagctacgcaaaaagttgagttgttcaagaaaacactagcttctcgctggcagaccaactcttgaattcgtttcatttgccctgtctcggccaccgggaatagcgacagagacgacgcgagttgcatgcatcaccgctacaggcatgcctgctgtttttctgttggtggccgattccaacctgttcacgcagtgcttggcattggctggagctccagcatgcttcgcgccaactcgcgaatgcaccgatagtatcgcattttcaagatatcatgttgccacaacgaaaaacaggcatgtgtgggaatatcaatgtgaggaagggttgattctagggattcccgtagatcaagtgtcatctagtagttcctttctttgcaggcgccgggcacaccctctctcaccagccagcatggcaaagtctcaacaaccacagccaccagtcttgtcagccgctgatcgttttctaaagaaacagcgcatcgtttggtcgtccactaatatgttgctacccggcagcaaacgttgtcacgatatgtgccttcacgacgagttgagctgcgccattccgaacagtatcaaaggaaaaactcaaacggtggttccggagcacctgaacatgccgctgcagcacctagcagatggcacaggcctggatcaacagcgttgctatcccggtaggctcgaggatgcctgtggttttctcgagttatgaacctattgaactgagcgaacctctgcgttaaagaagggaaacttgaacaccgttcgccaaaccaacaattcgtaatgccatcgcgagagcatgtacatggcaatgtcttgctaatgaagctgcacagtttttcttctgcacacgttcatggtaactagtatgccacagaagggtcgagcggagtagcacatgacctcaaaacggccgtaccacagtaactctaaatttggctgccatcataactgccttttgtaggaatgagcgcgacaaaagcgacgccaactttctcacggcgccgcagaaaaatgcaactagttcattctgcttgcgttcggatgacgttcagcttcgtcaatctagggaggggttgacacaaatacctttattttcgtttcacgcccggaatgcacttgctgtccactgattatttttgcgtcccgcaagatgtatccacctaatgtcgtgtcacacccaaaaccgcgccgtaaaatgcgccaaaaaagccggtgttcgtcaccacattgtcgtgaactctgacaagttctcttgttttgcctaaaaactcaggtgaaaccccgaactccgcaaagagactaccgcagcctccacccaggaacggctacaaaggcgtaagtaacggatccttcctcacaactgaacagagcagcctggcgatggaggcgaaggtgtcatcacagagcggcatttctcctgccgatcttcatacatacagggttcaactacttgcggtgtagctactgccggttttcggacctgaacaacagcggcagctatcagagaattgaaattacacctggcggatgtctatggaagacgatagtcatcgacaagggtggctgccctaatgtatagcggccaagattaaaaaaagtgttcacgcccactccgccacgtttgtgtggacgtacttgccagcaacggcttcttcctgggtccatctgcaggagaaaaaa

SEQ ID NO: 728 - DNA, 3896 bp, Toxoplasma gondii
  source 1..3896: mol_type = genomic DNA
acgaagaaggcgagggcctcttcccaagcaactgtttctagccagtcgagcggagcctctgccgccagcaggcgctcgagaacgaaggcgaaggcgaagcctcggagacagcgctgactctgccatctttcttccgccacagtcgacagaggcgacactaccctctgttcgagaggggaggcacttgagcaaccggaacaggaagaacgggaagactgcgcgagggcgagcagccgcgcccgggctgcgagagccttgcagcggtcgacctcgtagacttcttggtcgactgcagacaacgggccgacgccgccccaggaggtgtacatacactccagcagaggcgtcgctgaggagaggacggcagacgccggagagccggcaggacaggaggcagaacgcgagagcgaagacgagcggaagccaggcggtagcaggtccgccgtctctgccgccacgcagtcgcccggccgccagccggtgtgcgtctccagcatgtcccctgctgctcaaaaaaaagttcggagaaaagcggctcttcttcgccaccagacacgcctgcgatgccttcttcagacgagggaaaaaaagaccggaggggaaggtctctctgcaagtgccgaccgagggtgcagtcggacgctcgcttccggtgggttctgcgttcggaagactttcacggaaacaacgacacctgtgaagagacgcagaggcagacgctgcttcgactctcgatcgaagaggttggaaccttggacggaggacaattttggaatggaaacacgttgggcagagagggaggtaaaccgaggaaagcgacgagccggggccagtaggagtcttctccggtcttctggggtgtatgtacaatcggctacgcgccagaacacgcggcggagagaaccaccacagaaagcgaagccttcaagaagttgcatccgccgtttcacgcgatctttgcgggacgcacggctttccggaagctccacacagcagacacgggagggattaggaagcaaagagagtccgccgccgcgtcgtcgggtgtcctggattttggggactcgggttcacagaaagaaccgggcttcgcttcgggtgaacgggatgatgaagcggttcccttgcaacttgccgctggcaaatctcttcgggtacagcagaccgacttcactgtgccgttcttttttcggaaaaaaaagcgcacgtttcagagtggactggattccgcccagatacacttcggccgtgttccagctgttcaaacaggaacctcatggttgtcttgcatcttgcaggaaaaagtggaagacaaccggtgctccgcgacgcagcataaaacgtaggtcgggaaaagctagcgaaaagattgcttgacggtcggtggtggtggggggggggggagggaggcctcgtggtgacaatgagacattgcgaggggcggggaagtctgagtagtcgaaagagaaacaggaaggaagaagaaaggggagaatattctagggttggataagagaaaaaccccgaagaaaaaggagattgatgcacagtcacaagttgccgaagaaggctccatctctatctgtcttgtagcttgtttcacgcctactcgagggagcgaccctcatatgagacaccggggaagaaaccgaacgcgaggcactttcctctcggttttttcttttcttggtgtgccgcaatgctcctccctcgatgccttttgcggccatctgttcacgaaaatctctaggtcgcctagcaagtctctcagctgggagttgaaggaattctgcatttcttccttttcattctagtcccacctgtcttctatgtctttcctcctcgtactttacagttcacgcctgttttctcgaggctcttttccttgtacttctaccgtctccattctttgccttctcgccgagagtggcgctgccacgatcgctctcctccacgtgttccaacgggcaatatgcatgcgttaaagccacatctcagatatggggaacctaggcatcgaaggcaagtaaaaatccactcataactaaggtaattcagattgttgtctgctctagctgcctcctttctttctcttctcctcgtctagtgtgcagtgaagctggaaggagttcgctcacgccttctgtcagtgcgacttttttaatgcgctcgttgcgcaaacttagagaaaatgagatttctctccaccaatatacattcccaaggaacgtgttcgatgcacaagggaggcgaccacaagtgttaacacattttcatctcataagtcttcaatcacttgcaggagtgccgccggatgtctgggcttctgattcagctgcgttttgttccgtcaaagaaatcatctgaaagaaaaacaggaaccgactcaacaaggaggcggctttcattttccgttcattctgccagttcagcctcaaactcaactgcgtgcatcttaatagaagttccactgttcagctcttaaagtgactacctagcaacatggacgcgtgcgaatggggcgagacaagcaacgctagactcatattgagagaagacatcacgattttacatgggctctacacagaatggaaacgtcaatgctaatattccacttaactgggataaacaatgccagactaatctgtgcgagtctcagtagatacaagcaacgcgagactcatattgacagaaaacatcacgatctcacaaggggggtacacagaatggaaacgtcaatgctaatattccactcaactgggataaacaatgccagactaatctgtgccaatctcagtagacacaaggagcttgacaagcaacgcgagacttgtattgagagaaaaaatcacgatcttaccaggggcggtacacagaatgaaagcaacgaacctgttcctaaactggcaaattaaatcgggtttagttctgtgaggatcacgggatttcagagtggtctcgcagaggcaaaacagagaggaaggaaaagtgtgtcacggccagtctccacgttttctcagttctctgagcatacgttgcatttacgagcacaggcgtttctttcctgaagtaaaacgaattagaggaagacctccacggatgtcaagtggtgactggagaatctcatcctgagtatctttgtcgtaaacagtacgtggcgttagttacaggttcactatgcgctgcagagtgtatgagattactgaagaagacgaaaaacacgcagaagacctgcatgcctctccagagtgaaagcgatgaaagaaagcaatccacagctatccatcttcagagatgaaacataagaacagacagtaaaatgctctctggagtgtgtgctcaagtccaccgtcgaacgtgctgcacatcgcaaagacgaccttctcgctgtgacagaagacacaacacgcggagcatgagccgaacaagaaaggtcgaaagtcctttattttctctttttctatatctgttttatgtgtcttttctttttgggaagatctccgtttttctcgcgggcgccttcacagcctctgagagctgcccccccctcttcatcgttgagtcggacaactttccgaactgttttttctcgctgttttgcgccggtttgctcttttcttgcatttccttccttcttctttctcttgtcttccgttccctgcctcagtccatcgatatttacaaacatgtatacccattttttctcatctccttctgctctccctcctgctagctgtctccggtgtgccgcttcctctttcacttcttccgagatattctatacaccttcgtctcccgactcatttctccttccctcttctctttccttttttatttcctcctagttccgtccctctctccacctccgtttccttctcttttgactcgagtcaaca

SEQ ID NO: 729 - DNA, 2061 bp, Toxoplasma gondii
  source 1..2061: mol_type = genomic DNA
aaaagagacagatttgcgtgtcgaagcgctcaggtagacagatctgcatcgagatccgtaagaaacgggatgagtcctaagtatctccgcgcggtgtacactcagatacctacacgcgcgtttttatctctcttaacagttgtttctctggagagaggagcaaggaacggaaggaatgatcgcggaacgtctttttcaggttgtctgtctgtctcgcgctcagctttgcgcagatctcaacagtgttcaggccgcggaattcaaacgagaacattttcttactggcgcaccgccgctttccctgaacagaatgctttcttcgctaacgggtacactcgcgcgacaagatggagaaagcgtcttcgcatttgactcctctccgattttacgactcagggggaactgcgccctcgttctgttccgttgtcgcgaaaactgcgttggcttctctggcctcggttttctttggcttctctggcctcggttttcttctctcgaagaagggagagaactgcagcgtgtgggtgtaccgtggaatctcttggaactgtgcaaagaggaaagaggaaagagaactgcggcaggtgcgaacgcgccgagccatgctgttccgtggcgctgctgcgggggcgttgcggggcgagagagagaacaagagagaggaagagaaacggagaagaggaagagaagaagaccgagagaagaagacgaagaagaagtgagagagagagaggagaaaaagaagagagaaacggagaagaggaagagaaggaaaagcagatagaggaagaagagagaacaggagaagaaagagagacggagaaggagaaagagaagaaagcttacgtttagattcgtctttccgggaaatggtggtaaggaacaaaggtggaaactgaccagagatcgaacagttgcagatgacaagaaaaaagactcggtgcgcagcttgcgcgcggcgagctgtcctatacaagggacgcgcgaaagtcgcatgtccctctcttctccagatttcctcaaatgaccgcatcacagagaaaccgctgtagaaagaaagatgcctcgttgttcctcactgggtggaacgagaaacgcaaactgcgtagccaggctccctttttccgaggtcttcaaggcgcttcttcgcgatgttactcacctgccctgctgtgtctcagcgctccgctccctctccgatttttaggtctcgttgtctctctttcgtcttcagagttgaagagttcgcgcgaacaaggagaaaggaaaggctaggaagcaaacagggggatgcgaaaacaggggagagacaaagggaggcctggcggagaggcgccggcaggccatgaccctcaagtccggggagagacggacatgcacgcaggatttttttcacatgcaaaggatttttttcttttttcctgcatgctcttgctcaattgaaacgcgtcttcaaggtgtcgtctgtcctctctttcgagttgaatcccgacggttctccgttttttctcattttccaacagagagagcgcaggagaaaaaggaaaggctctcgctgcttcaccgtctgcgagcgaaaaagacggactgggagaggagacacagaagcgcgtttcaggccgcgggcggcgtccttcacagaggcggggaacttgaatttcttcgaagtctttcgcgttgctcgaaagcctttgccttgcagtggtttctggagacgctgtcgacttcgtctctcccgctgcttcttgcatcgtggcttccctcccatctcgagcttttcctcttggtttttcgcgttgcctttccccggctcgttctctcttcgtcttcgctcttcctcctatacctctgttgtcgtctcttcctctctgccttctcttctctcgtcgctgactccgccgttcctccactctttcctctcccttctctccttctctcctcctctctccctcctcgtcgcctgcgagcctcgttgcctgcgagcctcgttgcctgcgagcctcgttgcatcgtcgtttcgttcttcctcgttcctcagctctgcgagcggacgcggactca

SEQ ID NO: 730 - DNA, 3664 bp, Toxoplasma gondii
  source 1..3664: mol_type = genomic DNA
ttgatgagtgccctagcgctatggactatgtggacggatgaacgggcactgagcttgcggttgcaatctcgagtaaaccacccgtttctcaagtgtgctcatattattgtgagcatgctggacatgaactgcgaaacgacgaatccgtctgactgcagatcgtcgacagtacaggaagaagtatattgtgccatgcatggccttatgatgcaacacgtcgtcccccgcgattatcttctcaaaacagagcatcaggttttattgtataccgttgacctactgctcattcgtgatgtacggggaggctcgggagaagtaccaggacaagacgaacgttcgacagggtgctcctcgacgattatctctctctcagaaacaacgctacagagagcaaacgacagctacacaaaaagggtgaacgctacctaagaatcatctatttccgctgtgaaaagacaactctctagtcaccggcctgtgggggcctaacttttgaaatggacggcggcaaatgcatgccgattttctgttgccgctattgccggacatggtttccgttgttcacccttctttctgtgtattcacgaaagaggcacattgcagctgacggagttcaggcggtgtgactaaccgcaagagtcgcctcagctcatcaggcgagaggcttagaagcagcacattcccgcactggtggaaacacctcaggaaaagatcttagttaactagtgaacaaacctgggaaaacggacaactgatgctgttattccgtataccaccgccgttgctcatgtttcgcctgtgaatcgagtgtggcttatttgcttacccactataaccatcctcaaaccccgtaacaccaatgaaatcgcgtactctgagacttgacagaagaataattacggtatgtacgaagttcgaaaaccgctgatgtagcagaagctgtggactgtcacgccgttgtcagcttctcgtattttcgcagtttaagcgtggagccatacgcggcttctacaaaagctgaaagcaacggcaataccgctgcagttgcctgcagaagccgtatggtgtcgaatatacgcatggcacaatacaactgccatggaagtacaatccatgtcaccttcagtatgttatgagagttatacctattttctactgttttccgacggctctcttcaggctgttcacttcaccagagtggtcctagcaccatacttcccggtaacgcatcttccgtcaacactcggaaagtgcactataagggacaacaggctgttagcttttgtatacaaataacctcttgttgatgagcagcacaactccaatacgtcggccgcactcaggcggccaccattcacataactaagctacttgacacacggtcagcagacgcggcaagtgaactggtgaccgacgcagcagaaaaacgatgtcgctttggaaacacggcgctaaacgaccagcctcaaactacggatggatctgttactgcgtattctctcgttcctccagaaaactaaattgttttgtgggtcagggtcatggagggaggagttaatgggcaagcatacagaggaacggcaattccgcgatacaagaactgctagtagccacttaggtgagtgtaatcaacctgaattgcaagcatccatggagctgcgtctactccgcaacgtatgagtgttttcccttactggattttatcagtctgctggtgaagatcacactctctcagcgggagtgttttcccaaccgatattctgtgttaaaagtactcaaatgtgcgcacagtacccgagattcactggtgtcttacgcacgtcacacatttttaggtgacgttcacattgtttaacgacaaataccagcaaacccgctgcgtgcagtcggtcgacatgacaatcgctatcgatggtagtctggccgtgtcttcttgcattctttttaccagaacagtggttcgcgaatagcggggttggctgcgtgctgctggcaggcctagcaacgattccgcgctctcgcttgctgtgtgaccgttgccgtggcttgtaggttgagaccccctggactgtttcctcggtttctccgtattcgtgagggatgaatccgccacacaagtgatgggaacctttaccgcgctgcacagatctacaatggatgcgctacgggagaagtgaacttttccagttccattggtaataacatccaccgttgtcaaccgcctttccaggagtgcgtgcacgtgtcttggccacggaaatgagtccctcggaccttgcggcgtgttaattcaccaccggtccgtcttccgggagagttcctactgtgggagcggctgttggcacgacgacgaacggtttcccctggctttcccgttatttcgccttatttacacccaacactccggagctgaacatcgtggtggccagcctcgtgtagcaactgcggcgaaaagacatgacaggcaaagctgctgctttgctcaagtaagtctgctagacacatcccgtcgcctcacactactagccgtctggtctccgtgcgcgttctggttcaggggtgaaaatcaaaagaaacgatgcatccagagggcttctctggttgtcagaggagcatctaacaacagaaccgccgttttgctccccttgggaactgacctgaacgccgctagctcggtgagatctacgtcgcacgcggggctggcggcacgtcgcagtcccggctcgtggtgtgagcgatcggtctacacactgaacgttagcccatctttccacgagtgggttgaacgagccggcaatgagtttaggcatctcagatatgacaagaaaggcacaatttgttacgggagtgttcgtttttggccgggttttatctacaagcctttgagcatgggccagctggtcgtggacggtgaatcacttcctcgagctgcgtgtctactttgcttggctcacttcttcctctcctaatgctacaggtataaatccgtcaacttcgtttgatacccttcttagaccgtgtgtttgctccattaacgcaaacgccaacgtgctttagttgccacaaacacttcgcgtcgcgggtttattggctctccatgggcgtcgccattgagtcccggctcgtcgcgaccgccacctctatcaaagaaaagtgtgctttgtacaccttcctttccttttcagatccaaacactctttttgcatcggagcttgtgccgcggcatcaagttagtctcttcagatgactttgtcgccgcgttggtttcgacttgactagcaaagctttcccatccgtcaagggaacgggtaaggtaaactgtgtcccgcgttgccatcgtggatgcctacacagagtttttcacagcttcccatcccgctgtgcttcatcggttagtaacctcgtggacgtggctatgtttttttctgtcgaaaactggctcggctgtagccagcattcacacgccatggacagggattcgcgcccatgagcacctgcacatatggcaaccttcaccacgcattgatccaaactcatccgtcgaattcttcccgcttcccttgtgcttgtttctgcaggcgactccgagacaggcgacgcggccctcaggcttccgtcgcgcacattctcgaccggagttttcaaatcaagccgttctcttcga

SEQ ID NO: 731 - DNA, 1252 bp, Toxoplasma gondii
  source 1..1252: mol_type = genomic DNA
attttctcgtgaacgagactcgacctgcagaacttggcaaaaggcgcctctgagaggcgccgcctacacttttgtaaaagagaaagggcgtgtacacttcactgtgaaaaggctacctcccaccttctttgagtctgtctgttgtttcccggtaaagacgaaactcagaggaaaagagagagactgctgattggatgtagacaagagtcacgagacaacgcggcgctcctggaagcagccagtgctgtgtacatacggagcgtcccgtggaagaagacagagagtacgcatgcagttcacaaaaatgctttaccgagtgttctgagtcgtcggaactgggtttctggcggttttttctggaggcggcacctctcgacaccggcgcattccagcctctctcctagaagcttctgacggcatcatctgggacaggtttcctgtcaaacgcgaacttctttcaccatctgttcccttccaccacgtagaatgtcgaatcggtccgcagccttctctgcggtccatccaaacgggcatttgcatgaagatcgagacctgcacatatgtgtaaattcgcatctaaaattcaacttttcaatcgacgtagacactacataattatccgtggatatatgtcggtttgcttcttcatgtgcaaatatatattcgtagatgtatggatatatatatatatatatatatgtattggtgcagctctatatatatatatatatttcggcggatctaaagtgggacttgcttacaaagcagttgcagtaaggaagcttttttcttgccaacaactgtttgggttggcaagcggcggggcaccttcttcagctcttttttggacatttgcataatgggtgcatctctttctaaacaccataaatgtatatatatatatatatatatatatatgcgtctatgaagagttggtctacagaaagagtttcttcggtgtgcagtgttttcctttttaggcacttttttagtgttgttcagagagcagaaaactctttcccggtacaactcgcttgttgccttggacgcaacgcggtgtctctgtcttgcttcgccagaaatgtcttcggtcctccggatgtcgcaacatagagacaaggaagagcttccctcttgacagatcctctgcagaagaagagcgagaattttccttgagacacgcaggtgtggaggcctgttttcatcggttttttcgcagcctcttcactctgttcgctttttcttgtgtgca

SEQ ID NO: 732 - DNA, 1110 bp, Toxoplasma gondii
  source 1..1110: mol_type = genomic DNA
gagacaacgacctctctcctgttaccgtctatattactagcgtctagcaagtgtcatgttggaccgactcgttgcgaaagaacagagcaagatgcttgcaagtccttccttctcgacgtcatcaggagggcaactgtcggcagcgcccaacagcaggccttaaatggtcatgcgccaagcctgtgtgtaactagcattttcgtctaacaccgatgtactctcagactctttccattcgctcggagcttcaggccgaaagatacatatatatatatatatatgcacatgtataggtacatatggatgcatgagttagatctagtggcgtcgctgtcgcttgctcaggagttgtggaccaattttcaaggaatgcaaagttcttgtttgacgttcctaagaaattcgtctcttgctttcgtggatacaagccacataatcagagagtgagacgtcttcactgctggaccggcgagtggtgcggcgaccttttagaaagtgttttgaaaaaaacaaatggacacgaagatccttcttcgcgtctggtgcttattgtggacgcatctccgtcgatttacgcgtccgatttttcgcgtctgtcctcatagacacccagcgagacgcaaggcgcctcgtaagagatctccaccaatgaggggtgcggtcttcgactagacacatggacgtcgacaaaagtacgttttgacgcatcaatcgtgtggggtgcatgtgccgcatttgctgatgtctgcagagaaacaagccaagaagagttgtggcttcaacttctttgcactcccttgtcctaccaagtgtttgtcagcacctgcttctgcgattctgtgtgtacaagtgagagctactcaactgctgattttcctctttgcgtcggactcggcggtcgacgggaaccgtcgttgcgtgagtttgacctggtgaacataaaggaagactcgcatgccctttggtcgcgagaggcccatccccttttgaagcgacaaaggtgtctctggtcctgtaattggtcatgatctcgtcgggatggctttcttcaacgccttctttcttcatttcacacccgctgttctcttttcctcctttctgggggtccta

SEQ ID NO: 733 - DNA, 2550 bp, Toxoplasma gondii
  source 1..2550: mol_type = genomic DNA
acgtcctctcgcttcctccgcttccctttctgggtgaagagaaaccctcgggaaggtgacgggggcgcaactgggtgtgggagtgtcctcgcgttctccgcgtcctcttccttcactgtcgagtggaaagcgacactttggtctctgatcctgtctccagagagacattcctgctttaccttcccggcctctgtcgcagctgcaaacgactcgactttccgcgccccttcgctcgccgcgccgggcgtcgccgcagacccgccagccacgtcttcgggtgtatagacaccgcgtccgcgtcgctgcggcgcttcacggcccggtgtatgtacacttgggcctggtgtgcgggcggtcgagagcccgggtttctcgggtttttcaggatgtcgaaatctgtcaaagtccacggctgtggcggggacagcagtcttgatttccgatctttttagcggaatcgaatcaacacaaatgcctgcttctgtatttccataggattcactccgcagtctcgaagaccgccgcggcggggctccgcccccagtgcatcgtccggcttctcgctttccttgtttcgttgtcggacgtcccgcagagaagtcctcattggtgctgctcccttccgcaggccttccctttctcgccctccctgcccccgacaaagaagaagaggaggaagaagaggtagaacgggcaggcagtctttgtgcatctttcatcttgtgttctggagaaggcgcatcctgagcagtctggggcctcgcttcccctatttttcgcgcttccaaaaagagcgagaaagaaaaaaaggttcggtcgcggtgcagactgttctgtggcttctccaacatgtaggcccccgcactccaggcacaagtggcgcgtttgcaagaaaaggaggaaaagccgctgtagagcggtcgaaaaaaggagaggaaagaaaagcgagaaagagaacgggacacagactgagacggagagcagtcactgaagggagagtctgttgaactgggagaagaggcgagaaaaataaggaaggcacagagtcgaggccgaatgttcagaggaggacgagtgttcagaggagacccaccgcgagggaagaaggcagcgtggcggggagacacgggactcggcggaagagaagccgtttgcatgcacgcagaaagtaatacggcaacccaggaaagaaagataaagtgaacaaatccattgaataagagatccatttaaaacgagaagcggcgccggagagtcatgggagccgacacccctgtctcctcgcgcttgctgctctgctttggtcccttctgcacctccggtctttctgcctcctttctccgcagatgtacgccgtccagagaaacaattatgtgccaacacgagctccctcaaacaagttgaaagttgcctttcaaaaaaaagccgcgcttcacaaagtcgccgcaccccggaccggcgcagagacccacgcggtgcttgagatactgttgagtgtagagaccaggaaagccgcgatctgtgctggcttttcgtgtgcaacgacggccgcatccaagaaaaggagtactctgttgtgtttgtgagaacgtttccctatggcatgttaattaaatcttttccgggatggaaaccgaaggcaaaggcgcgagcttcgagtcgtctcgtgcgctgtggcaactgatcgcatgcagccggatgagtgtgtcaggaccgctaaacacaactccgtgacttcggtgtgtttgtaacctgcagatgtgctaaattctaaatcattgttgagtttcctgtgctgggaaaggagcggtttccggtttccagggcgacttgcagtcaaaagttcgccaactgcttgtctaggccgacgcgagtttcacggctttctaaacagccagcctgcatgcacgtgtctgtccgtgcactagaaacgagaaacacaaacgcatgtgtacacgtatatttacgtacgcgtgtgtttatctctgtaaaagctcacttgtgctatatatgagcatgtttctgcggacatctgatcacttgtggctgcgtgtctccgacaagactcaagcgctgctgagacttaacctcgacgtcttaaaagctttatacaagagaagagagtgtccagatgtggagatatcgccatgtgcggagctcctttctcttctcttttgtttcgcatctgctcctcctcgtgtcgtgtgtttcctacgccttctgcactcgccttttcttgagccgatgcaaatacacctcaccaggtcttacggtccgcagtcttcttcgctttacctctcctggaccgcgcagacgacaacttctcccatggattctctgcggtctcatttcttcaagtctggcgtcgaaagcttacgccgcgcgcctacgaccaagtgtacatacacctggaccagcgagctcgggtgtctcttgacccgcttcacgcccttcttacgaactctgccgtcccgtcgcgtctcttcccccgaagtctgttagcctcttttttatatttttctgaagcaattttctccttttctctgacga

SEQ ID NO: 734 - DNA, 1591 bp, Toxoplasma gondii
  source 1..1591: mol_type = genomic DNA
ctctcttttgcacactagcgaagacgagccctgcataactttctcctcgctgttcctcacactggccagccgcccgccagaggcgaacagcagaggcttattaggcttaccattgttccgaatacgcgatagactgagttgcaaggatgacgaagctggggttgcgtccgctatccccacacatccgatttcctggcatatctgtaggtgacgcaggctccctggtcgcctaagatgtgcgacagtgtgggacaatgacatcaggaagagaaactcaagcacacatgtatgacgaagcgtacgcttatacaagcgtgcatgacatgcagtctatgttgatcgattacgtatctctacatagatgcatgcacttagacattcacggatgtatcatgtgagcaagccatgacagaaaggagccgctagataaaaggacaaacgacgaatacaactgttagccgctcccatatagaccgtgacaacaagacaccccggagacagctgcgtaaagtcccggacagcattgagggggagggggagttgactgaaaacagggaccgcctgaaacagtgattacgacgtgatgggtcccgtaccgcccagagcgttgctccgcaagtgacgacctatcggcgagtgttgtttgacgcctatgggccagtgagacatacgatcgtcgatcaagccaagtgacacatgctgaaaacacagatacccgctagagtgcgttgagttgtaagcactgggcagtgggtacgcacacacaacagaaactgactcacatccttcccaacacctgagtaggtgagcagttgcagaagagtcaaggatcaaaggcaaacaaaacaccagaccgattgtggatgttcctagaaatttccatctcgaacatgggttgttcagttcttgccatccagttgaattgttctcgaagctaaggatcaacacggcgcagcaagcttggaggtatttctcatttactccacaaataatcactcgttagaggtgtcaccactctacagtttctgcgcctcgcacagaatttgctttgtcaaaaccgcccaaactatcaaatttatgctccttagacagatgttgccttcgaatcgtgcatgcaccgctgtcgacgcgcatgcatgttcccctggtcgcccttcacagcccgttccctctagaaaatcaaagtaatatccaaaacgtccaccaagccgctatagaaagaaatacgtgaatattatcgaagtcagagcttgacgtgtgaagtccctttgtgccggtcgtgcgtcatcgttcaaatgtattgtcgatgaccccacttgagcaaagcggctgaatcttgagcagctgctgatcggttcgtgtcgttcttttctttccctcagcagcaaccccttatctgctgcatgtaaggggtaactcttgagtcaaatcctgacagacaaactcaccctgacagaatcctgctctggcatgctggcagtctcttgcggttcagagtaacaagtccgccgcggtcagcgtcaagagtcaagcataccagcagcattgcaacaagaagattacatcatatgcggagtttcatggagcacaa

SEQ ID NO: 735 - DNA, 3053 bp, Toxoplasma gondii
  source 1..3053: mol_type = genomic DNA
attcttcgtatcatgttggctttttagttgcagctcccttttgtcctccaaatagctagacgcatcagactagcgtttagctacacttcagaagcagcaattgctagcgtcttttcagaatttggcaagaagtgcacgtggttctcttcaacggtacacagaaaatcgaccgctagaggacgtggagagatttgaacgcaggagtcactggcacagaaaggcgagagagaccgggaaactaaggcatgtgaaattgcagagcgagacaaggcaagatgcacatgtcaggaggatttatattttctccgtttgcatgcactgtcatggagaagttatgcaacgccgtctgaacaagggaggcgagccttcctgattctctgtagatgcacagatgttcaagaacactgctaccattattgtaaagcagtcagctaattgccaggacacgagctcaaaaaggttacgtttttgtctcagtaatctgcgacagaaccaaaacacaatgacatctgcacatttcctccgctgtgtgtactgtatatgcattgaggggttgcgacagcgggacagaatggaaggggacgggaacgctgctttgtggagttctctcgagtttctccgcagttttgtcctcgctgtcggaaacgtttggagtgtctgtgcgtgggaaagtacacatagatttgcctgccttgttcgtcgccgaaggaccgtcaacgcatcttgtccttgtttgttttaccccgattgccacactcaaaaattcgagcattcaccgcagcctctcccgacctttctggcctccagctcatgctgcttcctcacaaaagagcgtgacgcttgtagagtacctctgtccttgttgttagatgcacgattcgcaaggaggcagccctcaggacagcttaccactcactgctgttcggtctgcagcttgtgtgacacttagatggagtgaaagcagaagcacttcttttgtctctgtctagcgtacacacatggatggcagaaggcgagtctggctgtccattttcagtttactgatctcaggtgagcactccgtttcacaaaatgaccagaacgcatctggtctatgctcaccagatgacgaccctggaaaactcaatgcattctgtttgacagaaatcgttctcgcggaaagattaagcgtcgtcacaaatgacagtaagcgcgtgaagaatcgctctcggtcgtctgctgttgtgaattttagatgcagagctgttgatactaactagctattaagaggcgtcacgagctaaacaccatgacagcgtagtccccattgatacaaaacttaaaagaaaaccggaaagcctttgtttgtcattgcgttttgggtcgcatggaagctctaggaggtgaggatcgctgcaatgccctacacaagtgtttttaggactccgagcgtgggctttcctgcagatgtctgcgattcgattatactactgttttctgtgatctctaacaatataaacgatccaagcgagaccatttcaagctgctgtcacctagatgcagataagagggtatggtagcatcaggaactctcaaggtatcttaaacgccctttcagtcgacttcgtttcctgtgaacgtttgtggtaaaccactatcacacttgatgagatgcgccgtttttacacggctgaagaacaatatctggaaggggaagttacttgtctccttttagctcactgtgtgcgtaggatcgagcgaagagagttcacaagttgtccttggaaatataggagatcgcgtccgttgctgggaaaatgacttccaaacagacactcgctgtttggggagaagatctgcacagacaggccacggaaaaaacaaggactctacttgctgttgttggcttttcagagctcacggaaatccagtttgaggcagagggtcgaggtagtacagtctagcttcattttccaagtaaatttcacggaaacctgaaatgcgcatggttgacatttagccgctaatatgcattctgatatgtatttatccattacaagttcggcatcatgtcccgttttttctccgcgtttttccttgctgatgttgtgtcggtcgccactccagttggtcgtgagccacatgacccgaacggcactccgaaacgatgaagagatttagaagcagatttttgcgccggatgcagagagggacacaacgggtcatttgacgaaggcaacagcgacttctttgacgattaggtcccaatgtatactccccaggaatcgctatcgagcattacagcaattctttgtttttttccctctcaacgtgccttttcttggtcacagctaaatgcgttggatttcagtatcctactacggagaggttattccacatccggtgcgttctcggtgcaacatatgaactactgtagtcacgcttattaacagcgacagaaacctttatctcgctgtcgtgtcaaagagggtgccctttctccttcgcactgggacagacacgtcactttccctcgggcaaaaggctgcgtggcattctctaagcacagcgaaagatagtcgttttgtcttttgaagataagcagcttcctgttttttcgaagaaaaacctaccctagagttctctttcggcagagtaccacacatgcactttcttagcctcgccacgacgagcgcgaggccctgcgatcggccgcgggcacacaacagcgatggtttgtcctccaagagatcgcaaagatccactatttctgttttcttcttcaccaacacactttctctcagtttcccgactcacccggttgcacaaagtcgtccgtggacttccattcgcttttccgagtaagaacgccctttctttcgccactccggtttctcgcattgcgagacaagaaaaagagacacgtgtgtgcttggcctttcctgcacgctgaacagagctaacaaacgcgaccttctctattagcggttttccccccgttgttgggatctgagtcagatttcatttttctttttctcttctcctaagcctgctttcgaagtcaagtcttacca

SEQ ID NO: 736 - DNA, 2465 bp, Toxoplasma gondii
  source 1..2465: mol_type = genomic DNA
ggcttggtgatgcacagtacagaatctctttcttcacgtcattcgtcttcatgctcccttcctcgaaatgctcaactgcacgtaacacgcctaggagaatctggtccacgctaaccagtgaggcaggattcatgcacagccaacaagaaaagggaaggggtgatctgtctgaaaacccagttgaatcgccactcacagcagaagtgtggtcacctctttcccccgttttcctctgttccgtgcggtcacgtgaagttcgcactgaaatgccgacatcgctcgtcaccccttccgttgctcccggcgatctccggatgctttcttcaaacacttctgcaccgtttgtgacgccgacacaaagcccgatcgtgacgtgaatatcgggacgcaacgggtcgagacaatatgtgaccagaggagcctcttctgcaggagtaccctcactccgttcctgatcctgcatgtgtgcagatggatagaaatctgatcgacatcctgagcagctttccattttcttttttcctcgattttctgcgtttccggacagagacgctttgtatacacaggcatcgcccgcgacagcgtaccctcttacgaaggcgcaaaactgttccttcaaccgcctgcaggcatatttcacctggtgctttccgttttacaatgtagatactttctaccccgattagagaagtcaccttggaggtagctcagtcaaagacccacgtgcagtgatgaaaatggcgagtacaagacagcacccactctgtcacatcccaacctccttgttgagagacatcacgagacacaatggcggtaccagaaaaaagacatacaaaaagcggtggttgttcgttttcaagcattcacgacaaagggtgcggcaaccgacttgcgctgcacacgttgaccgcctctctcttctgcaagcggcgtcactgacgactctgtgtcccccaatgtctctcaaccaccaagggaaaagtgcgccatttcgtctgtttgcatccttttcagataattccccctttgcgttgttgagcgtcaataggaacacagaattcaaatgcatgcaactctgctgcaactgttgagccagttttgctggcatgccagccacaagcacagagccgagaaacgtgctaaacggagaaaagcaaggaagaacagacccggtgccgagaaagaggcaactaaagtaagcatggtagcaaagcggcgaccaggcaagacgtgcggcaatctccaaagcaagcatgcaaagcggctgtcgaagtgctttcgtactcgagcctggcacagagcagtcagttctgccacccagccagactctccgaatatagggcgatattggtattttcgacagaaccaataagcggagacggaagtgataccaccgaagacacaaaatggcttgcctgcgcacacaaagtaccgctctcgcggacagctggttaccgctctagtctacgaacgtgccacggcgccgatgtaaggtagcgccttgcctgtcggagtttcgcgaaaaaccacgactgcaagcctctttctctctccatggatttgttccacgcttcggtgtgccacatagcttctccaaaattgtgctctttctctctcttttcggggtgttacgaggagtataacgtggcatttcggttgcgagttccgcgaacggtatgggcgcccgaggaccgagcagaaaaagagtgtacgttgtccgtaggcatttcttcgtctgaacgcacgaacaccgcatcattttggacgtgaagtgcgcttctcttctgttgtcgcggtcgcctccgtccccttccattgcatcggtttcccaaacgccgtgtgggtgcatttttcgctcctcattcccagagattcagtgccggcttgtcctcttcctgtggcgaacaacgaggaacgttgttgctgcggagtaatgctcaggaatagcaaggagagcagaggcgtgttgcctgttctactaatagtttcgcgctttcagagttttcgcgtccattttggtcgactggtttgctggtcttcctcttgtgaagttcccgcctttccgcggccctcgcgcttagcctcctaccccgttgtccgcagttgctaaactctttttctaccatccgtgacaactccaaggtccgttttcttgacgacctcattcctctgcggtgtccttgttctttttcgaaggaaccgccgcgcaggtcgtgtctgcggtctcagaagccgaagcacccctggtcaaacttcgggaaagggactgtaccgtcggcaggtcgggaagtctccagcctcttttcttttggcttgcattcgctgctaccccacctacttctcccagacgccgccatgtcttctttgacactggcccactcgttctccactaatacgtagtcggttcgttttctgcgcggaggtcggctctctcgttttcgcgtgtctcttccccttgccattca

SEQ ID NO: 737 - DNA, 3042 bp, Toxoplasma gondii
  source 1..3042: mol_type = genomic DNA
cggctaatgaatctggttcgggtggatctagactgcaaaagtcagagttttctagtgctgtttgagagggagattggcgagcctcaagtgtagacttcattgcgtacaagacctggtacagtgttaaaagtgtcggacttaacagtgacgcatgcagaacgcggtgactcgtgaaagcacctgtgaacacggcactgcggtatttgttttccccgtggccatctgactccagcggcacaagtggcgggagttttcaaagacaggagattggtcacttatttccggttccaatcgccgtggcagctgcatcctttgctttcccggacttcatcacaccggactggaatattccgtgtctttcagcaccgctttgagaacgatgaggacgccccagacgagagcccagatccatccaacgataggcaggagaagttggaggactccaatcatcatgttggagacgtcgttctcaatgaaaccgagaatgatgacgccgaggccgaagacgaagcaatttagcaatccgaggaaaccgtacgcgaccctgtctttcgaacttggaggctccggcaccctcaggtgcagtgcacgctgcccgacctcgctcaaagacattttgataaagcaaaaattcacacaaacccgcgaggtgaaactccgaaacgttcacggactgcaacagatcaacttgccaagtgtggagagacaaacagagagaaagacagagatgacaagctgctctgacgcgggcagtggcttcggggttgtcaggcgaactgagactcgcacaccgctcaaaggggagaccgtgaaaacacggacacgaaggtgtgtctgttcttgctaacatgcttccgagacacggcagctttggcctgtctgcggccaatgcttgcttctcggttcgggcgttcatgcggatgtcagtgagctgcgcttgttacgttcggaacatgaacatgtgtacaacgactcttgcctggcaatcaccgatacggtgacggtttgctgtcggtccaacagaaatgcttctgtctgtttgtcggaaacgggaaaagagcgaacagagatttcgttcaagacttttcacgaaacaacgggggaacaacccccacgtacccgtgtgtgtggcacagagaaacacgctgcctttcgagggaacgcggagggagtgaataacgcgaagctttggattcaagcagggaaaaaaacctccacgcagttgactggcagagcgacacacgttttatctggaaatgcgatttttgtgattcattcggagtcaaggaagcctagacatcgcggccttgcgtgagtggagtgcactcgagaggcttgcacagaaggtctcttgctcgcttcacgtagaatcgagatttcgtagcaaaacagaaaaggtagaaaaccccctagacgattctatgacgaggcaaaaggcactaagggttgtgtcgaatgcgcaagaagcactctcttcgcctttatagcccgttaaacgccacaacgatgactcaagaagagcgaagacgactctaggtttacctctaatgtcgcagcttgtcttccacgttttctgtctgctatggaaacatcgagttccaaagtggagaatccctcttcccccgtgctttcctcttgtcaggtgtgtacgactcctggcgctcggacgacactcttttccgttttgtgttccatcacacgaatggaaatgcatgcgtctacacggatttctgtggcctccggcacgcctgtgccattttcctgcagtcatcctattcgctgtcctcagcatctgtccagctgttgtgccggaggcaaaaactctgtcttagatttttggcccattatctttacagctctcatggtagcatttatgttacccgttctgccaggaggattcttaaggttctattggatttacatgccaatacagaatcctgtgactctatttactcgtgattgtgtattataatccaagtacagtttgcatctacctgacgcctcagtttacgcagagctgcagtttaccaggacgcaagtcggcataatcaaaagcttggtggccactgggtcaccgcaaactgccttcattcgacttcgtaccgagtctcagcgcgcatggacaccctaaaaaagtctcccttctctgaaaaacggactctcggtgtatgcacacccatgccgccggcgtcagccttccgggactgggacgtctaaaatagttgaagctcccccgatggatccaacgctatccctcgaactgtgtcttttcattgctgacaattgacgcacgtgcattcggagctcgactctcaaggtggttcgaggccaaagagggatgcggtgaagcgcgcgtagagaggtacacacatcccctgactggagaatctgaagacaaccagacaacagtgagagtgaaatgtacaccaagaagtatacacatactctaaaaaaattcggttgccgttgctataactcgaaaggccgaaattcataaagacaagacaaattccaaatgcggagtactttccagctttggcggaagcccgattcttcggtcgcgctggtcaaccctgtctcgcctcctcgcttcctgtcttcgatttcagagacatgtcgggcgttgcatggaagaaaaaaacctcacttttcgacgcaaagatcgtttgcgcaaatgcatcacgtggtgtgtgtggaccgcaaagccaagagggcttcgtttccctgaaaccgattgcactgcatggccgcatgcacactgtgcaactgtctcgtcgcctcctctccgcccagaccccccttttctcgcaggcactgaggcggaggtcgcgttttttttcgagacccctttttaagttgttttcgttgaccgcgacacattagcagggcttttcaatttttttcctcgtcttctactcgaagctcgtcgtttcgcctcacctcgctccggtgtcttgacacctgtgccgccgggtctgtgtgagttgaactcacaccggcctgctgtgtctcttgtctcccgcgtttcaccctcgacgcaaa

SEQ ID NO: 738 - DNA, 1609 bp, Toxoplasma gondii
  source 1..1609: mol_type = genomic DNA
ctacggcagaagttgttcatggtaatgcagacctgcacgctgcattccacgatacacactctctgggtgcgcatttcccttttgtattgagagaggacacgcaggctacagacagcttaacacccgaaagtggaacaatctggattttatcctcgactctctcgtttactttggaatctgagaagaatatcatggtgctatcagcaaacaacgctgttccttcacttcgtcgctgtcgggtgcacatagattagcctctggtttgtataaaactcaagagctatataatgtgccctggttaaggaatcccaagaggcagcaccgataataacagtgcagcttgcgcggaatgcggaaatggtattctgtctgtttctccctcagagattgccgccagagcagtcggcggaagctgtggagaggccagcaacgctgattttggactgaagaaggaacctactctgtggaactctctgtcttatcggtaactcacaaaaagggaacatctgccgttatttccgttcgaaaactcgagactcctcagtgcatccgaatatcacaatgactacctcctaacaaactgtaccgtttacgcggcgtcacatttcacagccacagtcaaggcaacgtgcaccacgtgagtgccgattcattcgcacagatagaaacaaattcttggtcaaactcgcggtctctgtggatcctgcaacgtttcccctaaaccgtgaacccaacaaagcagcacccaagcttcactacctagagacaacgagaggtgcaactggcgctgtctcccaactttttcaacagaacatgtcagatgtttgttcgtatctcagtccacttcgcgctctaaccacccagtgaacaagcttacagatgcatgtgtgtctgtcggtttacatgcaagtgtgcacaaccgatgtgtacagatgcgtgcgactgaatgtatgtatggcatacgaaacagagagggagccaggggggaatagtaagggccttctgtgcgtcactgccggagagtaaaactggtttcgctccaggacaactcggacagcgcccaagaaaaaagtcgtcagtatcgtatcgtcgattctttgcatgtacttctcgcatgcagtcgcgcgcatgttgacaagactcggcgcgctgtgaaagcaggtggacgttgtccggatgcccgcagaaacgcacttaccttctttcaaactggataaatttcccagttctttcgcgaaaaatttcgtacccacttttccgcgggaggaaaagcatctcgctcggccgccgttcgccacccctgccttcgagtgtctggacgcctcaagacaaggttggccctcgagttggcgggttgtcgaccgccgcaactttcattgtccgcgattttttctcatcttggtttttatctatctctcctccacactttgtttgcgtttctcagcggtttgctcgcgtcctcagcttctgtctccaatttgccgcgcgcgagtctcccgccggggctgcggtgttttcccggccagcagccggaaacgctgcgccatggccgtccttcttctgcgagttttctagagcgtttcgtccctttttaaaacgcacttgaaga

SEQ ID NO: 739 - DNA, 4748 bp, Toxoplasma gondii
  source 1..4748: mol_type = genomic DNA
tactctttcaaggctaaactgcgcaaccgcaagtgaaagcggatgtttgcgggaggtcgtggacgcgccgatacggcgcagcgccgagtagagaagacaaagtcgctgaagagaggagtgaaagggcaagaagcgaatcgccgtaaaagacgccaactggacgtgtatgcacacacggacgcttgaggcaacgacgcttgacatgtacgcagaggttcacttgggggggggggtgcggccaccttcacatacgaaggctcggaggagtttcctgaagggagacatcgacgcagaggcgcgtgtgcgtttgagtcgatctagaaagagcttttcttcaggcagaaaatgagtcgaggggcggtagtctagagttgtcggtcttcgacccaggacgcgcccgtggttcccgacgccgggaaaaaacaggttgatcacaaagtctgggggtggcggggacgagctagctacgtgacatgtcagtcaaaagcgggtgatctagatgaggggagagaactcaccgaatgaactttgctcgcaacgtgcaccgatcttagctcgatttccacaacaggtcggtttgcgtgaggatcccacttattttttgagtttttgcagaagcgagaacccaaaatatccaaaaaatcgcgtagctggatgcgacgatgtcctttgttgtgacgggataaggtacgatcgcagacagcagccccacctatttttctgatagtgtgtgtggacacccgaaaacgtgtgtgcgaagtctagacttgtaggtgcatctgtgtgttcgtgcacagtgcacagcgatctttgcggagaaacccgtgaataaagacgcgaaataagtggagtaacgtgggatgaggaccagcggctgtggtatatatggggtacaggaaagacgggggacagtcatggtgtcgtccgtatttctgcatggcaaggcgcctgcatgagcgcatgtgcgtacagactcgcttgcgagtggcattttgcggtcttctggaattagaaccactagtcggcaaagcgggaagcgaacgtggggtatcagcgagtagaaaaagcggggaaagcaaagcgcgaatttcgcgagacacgaggcgacgggtccgcaactgagtggtctcggattttttaaagttgagaaatgcattccgcacactcttttttggtcctggatcgcatttggaaggcgacgcatacgtgttgcacaaaacagagacgcgcatgcacgtcgtgccgcgaccaacggggttgaacagacaatccagtcgacacggcgaaaaaacgaacaacaaacacaacggatgtaaattctcgtcactgatgcgaaagcaaagcgacagaaaaaaaagcaaatcgcggatcgccggtgatcctggcagctctccatttaacctcgtgattccgcttcggaggcatgccttcttacctagtctgccacaagatagtggacagcccaaagagaacacacttgttgaacagagcgcgtgcgcagcccacggttgagacactcgtgcagacagaacaaacagaaactatgcttaccaacttactaaaatacaggtatatacatatacacgcgtcgcgacggaccacgtgtgagcgcggggatatatatatatatatatatatatactgatgcatggaattatggaagagtgttgaatcatacacatcatggttgtagatcgccgttttttttgaatctgtgtgtgttctgctttgtggggtgggcaagctatatatttcctcagaagttccgcgtgttaccacgggactgtcttgaggtgacgctttatcatagacgtccttgtgacgacagaattcagaaaagaacaactaacggcccagcaagtctggcgggctgtgtgccaagagcagcaggggatcagttagcagcataatgctttcagaaattaaaaagaaaggttcggtttttggccaactccctgacgacactcctcgtcacagatgcacccacatacacatgtgtgaactgacgcacttgcatattgacatccttccataggttacatggttctgtacagcccgcatttcacgcaggcacagatagatctcgagggtaaacattagtcgtcgagttgcatggaggtctatgtcgcctgtatttacaaacgaaatccacacgtatacacacacacatatgaaaacagtaaccactgggtgcacggaaagaattctggagttatgcagagtgttctggatattttccgtggtcaagtcacacattctgttctgaggcttctacggcagcgttagagcagcgctggatccacgatggttttgagagttttcgggcgcatggagaaattgccgatttcgattttttgccagggtaggaaaggcgagacggcgacgaagactcggccttcgttcactcttactgaagacgggagaaagcgtccaggctccactggcgcgacaaagacaagaataaactcgggatcgtctgcggggaagggaacttcgatttccacggagagcgcagcgaacggctgtctcttcagctgccagacagcaggcgggaacgggtggcgttggttcgccagcggatcggcgccgcggccgattgccaagaagccctctctgttgacatttagtgtcagagagaggtccttacgggcagccatttcgagaagggcgcggaaaaacggatgtctctgccaatccttccgttgccccttttgcccgatcgacaaccagcggcggaagaagccagctccaccttgagtgcccccgtctccggggtgtccatacacctggctggcgagctccgagaccgctagctggaggttcacctcgacattccactcgcctcccaggctcatttccgtcacaacctcggaactcgaagaagcaatgaagcccgcaagccgcaaggcaggaaacaaagtgccaggcgggcggagcgaaccgctccgctttttattggcctgtctcgtctctgtcgtctgatcctctggagaccgaaggagacgcagaagcgactgttcacaagagcggcgcagagcagccgtgcttgccgcgaccttgcattctcgagaacgcgaaagtcgcgtttgggagagcagagaaagtcgggcaccaagtcgagagacaggagaagacataccaggcgaggcgagactggtggaagctcgcgctgaggacggtctccccacggctactgccaaagagagaggggcacacacgcaggagaaaagacacagacacacgacgaaacatggcaaagcagcaaaaaaagagaaccagccgcgacacagacgcccggacacagagaacagacacggaaaactcgaaagccgctgcatcgtgatggaaaaatcctaccaattcagtcgcgtacagcagcgtacaccacttgtaaatccacacagaaagcagatttgctacacagtacaaggacgtggatcttgtgcatgtctggtgtgatacgaataggtaaatgctcatacacacatcgaatgatatatgggagatacaattatggacaagcttgttcgcttgttctgatatgcgcgggcgtcgatccggctagtgtagacgaagtcaacatggcactgttccgcagttgtgtcgtcctggaagttacgggagtatgcttttgctttccaaagtcgctctcgactggagaggcctcatcaacgagaaaagaaccaggagacagacagacgtaggcgtcttaacctcctcagagtccgtcaaaagtttagaggcattcactgcatttgctgaggcagacgaggggtagacgaaccggtgaagaggcgttagtgtagtggcacgtgaagctcctgtctccatgcacagatttgaccagtttgtctctcctttttttgtgaatttccctcggagttctcagaccattgaagggagacggagacagaggagacaagcagacacgaattcacggtaaacccccgacgagtgccgccaggccgacagacagccggtcgttttccatgtcgtttctgttccccgccttatctttatccagtcaaacgaagagacgaaaggaaaagcgaacagaaaaactagacacaggtctgttctcgacagatgcgcagcgtcaagcccctgcatgcgcccgtatgcggcagggcgctgcgagtcgcgcatgcgcgcgccgttttgtgcgagagcactgtcgttattcagtccttctgtgctcgtttttcttggttcctcgcgtctttcgacgtctcgattgtctcttccacttttgcggctcatcggttcctccatgttcagcgaacacagggtttgagtatcgagttggggggctcgggactgcatgctccctgagcctaccgcttccgcagcatttctctgcgatgaaaacgcacgtggatgagatagtctcttcgcaactgtcgcccttgccctcattctctgtccacttctcccattttctgtgcatttcctctccttccacagtcacccctacggatgctgtagttccccattctgcgcgccgtccgtttaacagacgcatgtcgttcgctgtgagcctttgtgagttgctgcgccgctacaacccgtaagcgtttcgcttttttgtgcatgcgctgccttctggggactgcagcctcgtcaccgtccgtgaaactccgcgtttcgttctcttttccacgagggattcgccacactcgtcccggagcgcttcctttcggcgcgaaagactcacctttcttcccttgacccccagcctgcatgcacga

SEQ ID NO: 740 - DNA, 2022 bp, Toxoplasma gondii
  source 1..2022: mol_type = genomic DNA
gaaattgacagcgtgttctgcgcatcaaaggaccagctaagaaaccataaaaacgagtgcgcctacacgcaaatcccttattttcaagaataagaatatcggaaacctacctcttcttcggccgaggaggtggtagggcggtcggctgtgagaaacacaaacgcggacggagacacagaaaaaagttcagttcaacaaaaccttatggaatgagtccaccaagaaaccgcggtcaggaaggacgacgttgtaccacagaaacgaaagtcttccaagactccatcgcaaaggtccttcagccgtgataccagacagctcactccttgtgaagtctggtcgagctacttgtggccaaaaacgccacacttgctgagtgtatcaatctacgaaaatccagtagtacattcgactcgcagcgacggaaataagggggttgatgtcagaaaatcaatgggcacatgtcagcacgtcgcgttacaaagacagtgtaacgatttacagctcagttgctcacggtcactgccacctctcaatctggtagccactcattcgggaaaacgacagctggagcctgtggcgtaaagattacagtccttgggtaggccgcggcgtgagggaacaaacttctgggagtgatgcgtcacactctgccaccgtacctgcgtttgttggctgcgaagccgccgcgacagttccgttcagccgagtcggagttgccagaaagagaagggtggcgccacttctagaaacgaagttcgtgcctaggttacgagctgccaagttccccagaaaccgccgggtaagcaggggcgagtaccctcccaccggcgcgccggtaacaatgcagggtggctgcggtcgtatttgtcccaaaagtggatttgcgggggaacgacggttcgaagagtggagtgccttccttccgagagacagcctcctctgttgccccgaattccagttactcagccccgacaccgacttcggtaaaccggcacagcgagtgcgcgctaccgtcagtggagggccgacgacatcccaagcgatgctcgaaagttgacagttcatcgctgtgcagttctttcggagatacaaaccgagcacagattttgcgaaagaggagggaaaagacatgcgcgaaccagcttgcttgagtcactttttcctgctggccagtcccgaatattcacccgaagaaacgaaatgttaagggttgcgagacgggcggaaagcgcgagactcaatcaaatatggagacgattttctagagttcgaaaaggcgaatgtgaccagagttgcagacagacgagaaaacaacagctaggaggccaaagcagaaacaacgcagcggcagagacgagaagaggcaatttgacgttttatccatccgcaacacaaaacactgcaaaaccccatgtttttagcgcgcgatgatatgtggtgatctgcagagacgaaacccgacgtgcgttttcaaagaaattgatgcctggcgattcctcgtccgatttccgtttttcgcgctgtcggcgggcgtgcatgcaaatctcttggtgagagttttcaaaaaggcttgcagtgcatctattcgacaaagcagctagaggagttgctttttcgcagctgtggccacttttgttaaccatggccgaaggccaacgatcaacagagaacttcgcagtgcaacaaaagaaaattctggcggttcttccactacggtgccagtagttcctttccgtcgatctgcggtcgctgtttgttcgtatgtatgcttttctacaggcgtatgtaaacctgtggactttcgagtcggcctatttgtatacgcttgtgtataaacatgcgttgtgtcagaagttgcccttgcggctgatgaggggctatggttttctccagtagtcgaagttactcccgtctgtcccgtctcgcatggtaaactctaaagcatctcttttgtcgctcatccaaacatttttccacggtaacgcgtctccgtcaaaaagagttcgtatcctggtctcgaga

SEQ ID NO: 741 - DNA, 2006 bp, Toxoplasma gondii
  source 1..2006: mol_type = genomic DNA
gtgagcgacgcagcttaagcaaaaacagtgtcggtaaccttaaagataaacgacaaaaatggtaagcaacaccgacaaaaacactgactgcacgtcacacgcctgcattcacgtgcaccgtagcaggggaaagagaacaaccgcgggttctgtaaaaacacggaaaatttggaaaaaggtagctggctagggtgtagtatgtagaaaactgtggatggcattaactactttttcacagcttcgaattaggcccaatatcaattaaccgctgtctgttccacgcccccatgacactcgcaaagcatcactttttgactctctcacaccatgccctgcgccagtttcgggtgttcaggcgattgtcgagaggaagctttcaaactgccgttatcgcgagcccttcccatgtcactgcttcatgtacttggcttttgccagggtctatccgattatatgtttctaataatttgcaagagacgtgcccccaaaagtccttactttagcagcgtgaacgatttcatgagacccacatcgtcaggcacttcacttttagtttgtgaaatgatctactctatcatgacagccactgaacacaaggaacgaacactgacgcagttggtacattggagctatctggggaccccgcattaaagatcctgatgtgactaccccatgcacgctagtttgggttccgcatcgtctgcgcttcattctctgtgaggcgcatgtatggccatctcgaggtgactcctaaggcctcggtcacgagatagggacgggtttcacaacgagcttgaggggtacaacgcacgtgagcagcatacagtgaacacggctgattcccctagtctcgagacgcaatcctgcaaagacgggagatataacattttcttctctacgacgtgtttcacggcctgtagctatacacactgctctagtggctttcctccagtcccatgaagcaactagaggtatccaaagaccgtcaaaaattccgtaggacctgatatgttggcgggaaaaaacacgtcacactgttacaatatgtctgacgatccggcagcacatgcctcttttttagggacaaaaatattctgactcctcaatgcttccaggggcaacgacggaaacaagacaccaacggagtttttgtaaggtgatgctgtaacacaaacgggtaaagccttgacccgttgacgcacctgcaacagcggtctctcgaccatccatgcacatttaaagcttcattagtgttttattacaaaggggtggcaggcccaagcagtacagcaggcaaatcctggcacatatgtggaattgtgatgcttttcgagattcttcggggacattaacgacatgacaaccccaaaaatattgagatgtccgcggcgaatagaaatctttcaggctcgtgaggtggtgcattccgggaagatgtgcagtttgtatcaagctggcgcatagaaaagcagaaagcctttcgtttttcacatgccgagattatcatgaagtgccggcggtacatgcgtggcagtgacctatataggtctgttcttcttccgttgagctgagaccagcccttgaccttggagggagatagtgacagtatgactcattatgactggcttttattgcttttagttaattcacgtctcaggcagacaattgtcttcaatagtacaaaaatctcgacaaaacaaccactaattggcgtctggcttccgacgccccgtttggactcgcatcctgttacaggttctctagcacacgcgaagtagcaaggacgctagctgcatgcgtctatacgcggcgcgcgtgttgagactgccctcattgctggccgacaacagtaattcctaatcgcaagagcgtgccacgaaaagtggttgtatccttcttctgtttcgatcactgacgcgtcagaattaatgtggctctgaattttggttgagacctgaccgtttgccactgttccccgagcgtgcggagggtgagcacggtaatca

SEQ ID NO: 742 - DNA, 1053 bp, Toxoplasma gondii
  source 1..1053: mol_type = genomic DNA
ggtctgtacctgactttcatgtaaatacagaaatccctgaatctactctggtaacagtgtcaacaccgacggttttacgagactgtggctcgtggaaagctcagccctcccattccttgttttaaaaaactgctttgtgtagaggacacaacggagagaatgcctttcccctctcgttctgggatctaaatttcctttcgtagaacgatagacgttacgtttcccagaacgcaaactacgggtctttcttgccagtgaggtgtttccccgaatattagccgaatttcgcgatcccgtgtgcgagacttcttccacgtgtcataacgaaaaaccacccgggcagttcttcttgtctttagttggcgatgttctctgtcaaatttgtttcccctttgtggttgtaaagttaccgggtgtttgtgtcgcttttctgcaatcaagagagtccagctgctggagactgctctcacgtgcagtgctgaaacacagagcccggatccggactgaggcgagtttagagctgcgattctcgcgttgtttgcgaacatccggtagctttccttattccccttttgctcgctctccgtgtgattggttcctcattcctcccgtgtgtttcgcagaatctgtttcggcttcctccgtgagtgagaaacttgtactcgtgtgtctcccgctggacttccgtcctttcgctgcgcgttttcgcagcttttgcggaaaaggcgcaagttagctgccgtctgagagcttcgtttcacatttccccttttccgtggaagataatcgcgcaagaaccaccatttgtctccacagtcttttctgctgttttccgtcgcggtttgctgtccccgtcgctactttttctcagcggtggagtggggctcactgccgtcctcttcgattttcctcttcattttcttcgaaaccgcggggggaaacaactttctcggcatctcagtcacggcctgactcggaaaaggactgctttctggtcagcgcaatcggtttttctggaaaaaccatcctctgtctgtctaagagtcgccaaca

SEQ ID NO: 743 - DNA, 3479 bp, Toxoplasma gondii
  source 1..3479: mol_type = genomic DNA
tcagtcatctcgaaacccttccaaagggccatttctgccgtccattggctgtggcttagttgtgtctgcttcctccctaggacgaggaagcggcctcggcgtctatgccacgagagcgtacagtgcccggtcacgaattggcgagtatgcaggcttgtgtgttgacaggaaagtggcaatgatgctccgtggtatgggcacttccactcatgtgatgcgagtagggatgcagtatcagtatttagttggctacagactcccttttgtcttcggcggtgccggcgcgtttgtgaatgacggccgctggtttgcagatggacggaaggggcctggggtcaccgccagatttcatgtcgcttatgacaaaaaacgagccaaagatcgcgtgtatgtagtcgcaacacgggacattgcggagggcgaggaagtcttcaccagctacgacaatcagtactgggctctcctacactgaaacgaatttgatgcacagtcagacttttttcagttcggctgcaccaacggccgtgtccactcgtggatgtacaacagacacctgcggcttttcttgaatggtcctccttagttttttttgtgtttgagaagccgtcgaccccgacgcctcttgagtggatgcgcttgtaaggaaggccgcaaagcgacagtagagggaaaacagacggcgggttgaggagacgtcaggggtaacagccaggtgaaaaaagtcgtgttcgtctgtcatgttcacggaacttgcatcaaaagccaaggccgtcgagaaggcgaatcgaaatttttgactggtatgcgggcggttaaataccactgacaagacaggcaagtgccacgatttcattcaccggctacgacttggctgctacggagcaatcgcagcactttagtccgttgacgtaaatatgcattctctcctgaataccaatcaggtgtcagcagagttctgtgaggccggcaaacgcagaggagtgctagcgggagacgtcaacggattattcaagttcaagagcaagtttcaccaatgccaaacacgtcacacctcattgcggatgcaatgttaacccagcgcatttgcggatacaatttctcgaattttctgccgagagtatgtttcgctgtgacacactgctcagtttttcaacgtcactcacatgtagcatgattgcagcactcctcgttacctcttgagactgtgtacaatgctggaacgacctggggggcaccatcgtagacaaacacagaagacttcgattctcttaggctgatgataccaggcatattgtgtttcctttgtggtgggagtgatgctgccagcagcagagttacctactccggctggcctcaaaagaggttgggagaaacacaacatcggtagcaaaaaaatcgttgggttactgtggctgtgacttgaataggaggattcacaggtgtttcacggcagctgattcactgctagtactcacaaaccggtgtgcgtgtattaggagtcgtcttgcactcgtattgcaacgcactgaccgccagcggacggatgtatcgttcgcgttccaagagcgtttatgccgggaaaaacatccaaaagaaaactacattattggagcaatgtgcgcaacagctctgcgaatgcgttgccactttttaatctacagttaaagccagtgatgatgcaaacgcgaaatcctgcaactggaacgtctgctgcaaagtgcctcttgggtgacggtcgtaataaagcccgggaggaaacgcatctaccagtagcatttttcgagaaaccgtgcgtcttttctcttcgtccacctccagagaacgcgcctgtttatgaatgtgaatgaagggaattaagcagaaagaaagatttggctgagcgttccctcgatctgttaagactcaccgtagacaggatggggttgagatgttggcacttaccctcagaccgtcgtcttcgtccctgctcagctttcgcgcagggtacacatttgaccgccttgcctcagccaagttccaagttcaagggtcacagaagtgcaacgagagactctatgtgtactacatcattttacttttcttcaagtgttgtgcaggcatgtagaggttcgctgcggtcttgagctcaaaccgccgcgaggtgacctgcatgtgtctacgagctgagtgagaggacacaaaggtcaccctgtgaaaaacttgcctggaccacgtttgtgcgaaatcccacactcttgacaaaacgcgtatgtttcgttttctcttcctaaacacttttttttattcttcaagagacacagtacgacggaaggcgtgggtcctatacggtgagagaactgcaccgcctctagcaaaaaggcgagaaaaacgtggctgcgagaggcgccgcttcctgtgtcttgcggaattcttcctcatggcagccgtgctcaaggcgtgaacgtcaagaatagttccagtacttgaaaacttgcgtacttttcccttcatttgtacatttccatttcatgcgcgtaaacgatttaccgcatcgcttcgtaatgggtggcgggccgccgtgccactttgtcaatgagtactagcgaaggctggccgtcttgcctgcttttcacagaaaaacgagcatttctgcaaggatttcccgcatcattctatctcatttcgttctttgatcacccagcatgttccggacagaggaatagtaatatgcggagagtggccgttcggaggacacgctacgtacgagaaaagattgcaacctttctggttttacaaccagtttaattcttcttctggccgctcgaataacctaatgttcgagctttcacacgttcttgtgcttcatcttgtttaagccttggtgggttttttcccaggacggcgtgcccgtatcgcggctgtcttccgcggtggatctcgctgcggacgtagcgccttttagcgcatttctactgtcgatagccaccctattcccctccgtaaagaggtaaattcatcatctatgcacacttcagcaataaggtttctctgcagtttctcgcgttctgctccaccgcgtcatcaggttccttgaaatgtgcccaagttgaccttgaaaccgccgatgcgtccctgtgtcgaccagcgatagctaccacagatgtctatgtaatgctgtttcccacttggtcgtcctcaaccgagcgcgaccactctctcttatcaaagcgagctgtcaccagtaaacctttctcaacgcacgctttaagtaacttttcgactggagacatggaatgcgtttccgtctgattcccagcgaaccccgggagactgcacacccgcatttgtcgcctgctcctcgcataacaaatcccctcgcttaacccggcgcttttcgattcctgtttctccacgttgccttctttctgcaggcacatacccgcagcacctggtgacctgcgaactcccagcgcaggaaacagttgcttcttggacgacaa

SEQ ID NO: 744 - DNA, 1728 bp, Toxoplasma gondii
  source 1..1728: mol_type = genomic DNA
tgccgtctttccgaggccagatacacagtagttcagtcagttttatcacgagacccgggcacctcgcttcagcgtcgtctctgtagaaacagtcggcccccgcgcaaggagagtcggcgggagaaaagttgcgcatcgttcagtctgggattactctctcagatttgggttgaaaaactccacctgttgattcgtcagaagttcatgactcgaaatgtcgtcagcaggtcggggattagttgagttcacgcgcagaacgtatccgacgtcgaattccctcaatgacggaggctcctgaaatcgcagccccgtagggtggtggcctacgacatccttttcctgttcgtaccgcatttgctgcaagaaagttcaggagcctctgtcgtcctctccggattgcgctcctggagcgcatgagttacctttgcaccagtgtgctgcaccccaacatctgggtcgtgtgggctaggtgaactgatcagagcttcacagactctatacctgtgaaaacgctgcagatttccgtggactgctggacagagagtcgccgttcaaacggtggatttccactgtgcatgtagacgaagttaagttgaggacagaacactggtgaaggcacgcgcgatgcacgcacggagcgcttgcagacgacaaacaacgaaaagcaacctcttttctgtcgtggaaagggtgcgacattcgtatcgatggagcccgcttaaaaaccacttaacctggatctccaaaaaccaagtgaatctgcctctgtaggaaagttgagcttgaaccgaaaaatcagggtcacttctccgaggtgcccgtctgcaggggaaggtgaagagcagtttcgtttgtgggaggcaagagtctcaaggactgtctctgctggtggttttgagtgaagaagttccatgctcgagtccccagaatccatgggactggggattcgaggtccctgacgggaatgctaaagtggagagatatttagacaccggacaccagactttctttgatggattcgtgtgcagatacgatatgcacaaatatacatgtgggctatttgtacctctatgcacatataaatatatatatatatatatatgtatatatatacattggatatagcgtatcatttgcctactggttttagtatatctccgtttttgctgtcttggggaaaacggcgatcaggctaactcatcttgtgcgtactttcgagagggaccacgatttctcttttccaagaggtaggaaacactcggaaaacatttgcgagcattttctcgaaagagacacttgagcgcagaggtcacctgttcttcgcctcgcacgcatcgcgagggccccgtctcgtcttctttcttgcatgtgctcctggcgggaatcgaattgtgcatgcatgcgcggtgtgcccttccttcaagcaagattttgaactccacggcaagagagaaacagaaatttccttctttccacttgtcgttaaacagctcacaaacctgcgggggactcctggggtgtcattctcccccgcctcgtaacggcaagtcggaaaactgctgcccagagcgcatgcagaggaacagcccagacccgctcttcttctgccttgtttctctttttttcattctcctcgtcttcttgtaagttgtcaagcttcctagatgacggccagcacttgaggcgcgtcacttctgagtagtgatccatcttgccttcaaattgtca

SEQ ID NO: 745 - DNA, 2692 bp, Toxoplasma gondii
  source 1..2692: mol_type = genomic DNA
gaactccaaaaggacccgacggacatcgagccttcagaaagaaacgagaggaagaggaagcacacgaggaaggacggagggaagaaggagaggacgaagagagggaagaaggagaggacgaagcagcgagagaaggagaaggggaagagagggaagaaggagcggatgaggaaggagaggaagaagcggatgaggaaggagaggaagaagcagggagggaagaagacgagaaagaatggggactcagcgtggtgacgcgaaatgagcacagaatgcaaaggggagagagcgcttgaagactcgcccctggattaaaactgagggaacgagacgtcggagaggcactcgcatgggaaggttctggcaggggagagatgcgcagtttgtgccggtggtcctctgccgtcttggggggtgggagatctgcaggccgcgaagcgttttctcccctggaagcacgcagcatgcgcgcgaaagattgcgggtttcccgcagacaaggcaaaagggtcaaacggagggatggatgcggaaaagcgatggatgcatgcgtctgtagaaggctccattgtgagtccagaggtcgacggcggggggcggagtcttcgggtgtacgtacacagggtcgactgtggctagccaggcgcaagctcagacagaagcgaaaccggccttggagaggtgcacgcgacgaggccgtcgccgcttccgtcgactccgcgcgagtcagcgagacgcgtatgttccgggcaacggagacgagtgatcttcttcgagaagaactgcgaccagcagacacgtgagagtcacgcagcggggacccttgaggcaagttctacaaggagggcacgatggagcgtccacgccaatgcagaagccgaggaagcagacaaggaagtcgtgtgttccacaggtcagtcagacttgacgaagaaagctccattccactctcgggcgcgcgttcgccggtctctgctgtctcccgggtcccgttgtttttgtggttgctctctgcatgtccgttgacactgttgtttcctgtatttgccattgaaagtcgagcggaaatgcccagacattaaaccagtctcttggccgacgtgagcgtgagaatgactcctctttcttcaaagcaaagcacacactgaaacgcgcatctgtcaaggaacgcagaagggcttcgggactcggcacagaccagcgtcaaccccgacactctgcggatgggagcggcaaggtggactcgcgagaccctcgcgatccattcagtgttttcgcgcagaacaagttttgtctttgccggcacagagaccaaatgctcaacagaggggcaccttttcgtccgagaaaagagctttctccgtgtcagggcacgacctcgcgcacatgcaggcccagcagccacaccgcggtgtgcggccgacggagaagaccggaacgcggggaaaaatccacgacagaccctgtgtgtgtggcgtgtccctgccacagaggaaagagcacctctcaaacaacttggccggtctgtcttgcatctgactcggtttttccattcccagcaaggggagaggacgcgagcagcgcgctacgcgcccgacggcgcgactggtgaacttgactactagtgtacatggacacagagttctctaattcgtaaagggaactgcgcatgcaagccatctcgcggcctatttggattggttgatttgcattaaagatgaactttgcctgtagcgtccagttgagcgcacacacgttcgaactaatgtaacaatatagaagcaagggtgactcgagcgtctaagcgcgcatgcacactggcttgttgtgagtgagtttgaatttcttgccaggcagcacagcagagccggtctgtgcgtgttccgcgcgtctcgtttaaagtggcacttctttttgtgacagtgtcttcctcctcagtgtctctgctcttgtcgcgaagtggaaaaaactgaaaatctgtacagggggggggaagagacgtcgaagaaaactcgtggtgcactctgtttccctgtcgggacgcgggcgacacacaatgcttgtctctcacgtgacgatgttgtgcttcgctgaatttcgggagcaaaatccctctcttttttactgactcgagttttctggacaaataaacacaaagaagggggcggagaagagatcaggccgttcaacctcgccgcctctgtgtcgtcactgtggttaacggggttcgatgagcatgcggctgtgtaacgccccctgcttcattttcccaaggcgaatcccgtttcctcactttagaaactgaggtctgcaagtgaattcctccgggaagtaactcttttgttttgcatgcatgtggttgcttctgtgtgtcgtgcctgtgtgaacagacttgctccccaggttagcgtgtcaaacagagcacctttctgtcttctctctctgcacctccccctcttttccttgacctcacttgagagttgttggcaccatccgcgtgtctgcgttgtcttcgttttccggggactgtcgccacgccgccttgcactcctggattcgctctcgaagacggcagtttctgctgaacgcagttctaaacaaccagaaagtttgcgctcagtcgagggactgaaacgacgacgcatgttgcttaagcctaacgcttgaagcctgtgtttcaacagtcttcaaaa

SEQ ID NO: 746 - DNA, 4706 bp, Toxoplasma gondii
  source 1..4706: mol_type = genomic DNA
ctgactagtggtgtggcttcctccgtctaagcgaaaacgcatagagagtctcgtcctggtttaccagtcagaagtatgaagggaattagagctcaagaaacgcatggcactaaggtacagacgacatccattggtgcgtcgtacacatattttcgtggccatgcatttgctttttaaggcatagttgtctaaatatgtgtgaagctctgtttttgcagagagaggtttcattgtgcatgcctgccgtgacacgataggactcagaaactgtgtctgaacagatatgtaaaagacacctggccttgcctgtctgtgggtgtatctacccgtatacgttgagcaatctttcacgcacctttctggatatccagttacacgttcactcacaaagatcttcgtatgcatgcgcgtatatgagttcgtatatatgtagaagcgttgtcgtcgaggagtggtgtggggtctcgtagatatcttaaatttgcctgttcgactggattcaggaatcctgttcccatatatctacactgattctagctctccgttaggctctggtcgcatgggcacttacaccggtttaggcgattttaggtgtcagacttcaattttcgtttcaaactgtccgtggaacgaaataggcgacagacgctgacgagactgctaatggcttcgaagacacctgtttagctacctcctcatgtctataatcacatttcaaatgaacaagcgtatggagctgcttttctacttgtttccacacgtcccggttttcgccgaccggaggcacgctatctctctacagacatgtctgtctcagtcccatcctgtgcaacgcaacagaactcgcgagaattccttttctgcctcaaattccttctctgcatgccagcaaatcgttaacttctcagtgtagagagtttgttttggccgctagcggagaggagaagagcggagaagacacaagatccgtttctttcctttctaacagatcgcagatagatgcgttggtccacttttggagggcctgacgtcgagagcacctcgttgagaacggaacaaagactggctgagctcttcgacgagcccactgtcaaaaggctaggtcaattaggaatgaatgagaggcgtcttcatatttgatggcatcagagagagtcttgcaccaccgcaaatctctgtagcaacgttcgtcgaaatttggacggcaaaaacaacgagacaagaaacctcgaaagacgtacggttctcgtagcctatttccatgcactttgtcgtatcgaccttcccagcggatgttcggtacacgtggcatctttggtgggacacagacgaaaggcggacagactggaaggcgggagaaagcgttagtggtgctgcgcagcagcgtacgcaatgtcgtacgacgagcctattggtgactcggtttccacgtcggtattcgaaagcaggaatataacaacggaccaaatgatctgaagaagaaagacactcagagccaaagcggtaaaaaggatatccacagtaagaacgagggggagtcctgcgaagctgtaaacgtgggccgcgagagagaacggcgacagtgtccagaaccagaagatgagacttgccgagccagacttgtttcctgcggaccctgcggcgagcctagttcggttcacgtagaagaaagatatgtaaaagacaatgtcggcaggaagtaggtggagagcgagttcacaggcatagtacttgtagaacagtaggaacgcatatagaacgggacctagccagttgacgagcaggcgatctatgagaaacaaaagctccagaaagacagagctgctgaacacatagtacgatggagacatgctgcctacatttaggtttcgggtctcagatttcgtcagagcactacataaaacggatgggtcgcttttcacacgttttcgcgacccaaaggaacagttctacggaagcgtagacaaggacggagcttcagtatggcaaagatacccaaagtcgacgaacccggtaagaagagcggaaagatcgtagaaaccaattcctcgagatcagcgacgtgttatatggcatgctgtcaaaaacattcgcaaatgccgcacgtgtcgttgtgatacggcagcgggtagagggtgtagtacaccatggaacactttaaagcagtcgctatggcgcaggaattccagcgagcacatacacgaagaactatgggaaattatagtgaaaggaaaaacggcacattcctgttgctggtggcaaagcatcgatgtcttcttcgtgatttcaccatggacgaacagaaaccgctttgtgcctggccgagtttggacagttgaatgtcccgagcatatcatcatccaagcaccgccgttacagaaataactataggcagtcgatgcagtcaagaaggagagagggaaccagacggttcaagcgtgaatctgtcgtggtagccgaacgcgccaaaccagcaaaatttgtctcattctccgaccacagcgtctgtcaacggtccgctacagtgaggtggacgctgttgaagaaaaacgtgaagggctagaatcaaagaagaaatcaaaagcgaagcactggaacgactcaagtcaaagacgctgagtcaacgcagcagagcttttcttcgttcgttccctgcgtgaaaccttcttgctaacgctctaacagctgtttccaagccgaacacgctgccggatgtgggtccccgcaaagtacgttcggcagcactagcgtgcttcgttgttgtccttacgttctagcaaaaaccacaaacgtttttaaatgcatccacatgtcactcagaggccacacacgctgttcatttctatggaggagaaaaaaaaagtattgaccacaccgacaagaacgaagcatagtgaacaaaaaccagcaaacgtttctgtttagctatatccttgcagagggaacgaccctcaaaaccgtttcttatcttcggtctcagctgaagttgaaagcaaaaataactaacctcctacaggtggaaagaatgcatgctcggaggagttagagagcatttgttccattaggcgaccgtaaacgatagcacacaaaacgtttaccactgtcagtcattcacgcatcgaggaactgcagtactgaccgaagcggaaagtcatcagatagtccgttcgccttcagttctgctgcaaaagggaggtccagtgtttgcctcggggaacatctcacgcagctaaatcactgtaaattacctcctcgcaaaaagaaacaacccgttttagtgcctgttggattccgccagtctggaattggccgttctgtaatcagcatcttggtagtgaatacgtttacaagcgcactgacccgagggaagaatgcttacactcacgcccgtaaatagcacgggcatcttcgatgagcaacggaaacttctctgacagcatactttctatcgaacgcttctagtggtaggctcgcttcagaaaccaccaagcctacatccgtgtggtgtcggatgctgggaacacgacgcactgctcagtcaatagacttcgttgtgtaaaaaacgcgactgactcggaatacttcctgaaaaccgaaaaagtattgtctcaaatgctatgatcgctccagacgtcgagatgtttcattgatcaagtaaagaatatcactaacggcgttttgaggtatgccagacgtcggaagttctgtgtggcttgttagatccagcccattctggtgcaggaagcagacctgcgcagcaagatctcttctagtactagcaacaccacctctagaatgctgtcatgtcatgccaaggaacatcggtgattgccgtgagcgctgtgagtctccacccccggtgaccgccaaccttgcgtcaccctgtcagaccgctaccgagcacacttcagcagtccacaagagccgcatattcctttggaaaacaacatttggggagggagcattaagtgaagagctctaagttcgaactttaatatgggttgccaccacattttttccgctcttgccttgtcgtatggcggctagctagtccctcggtcgatgagaactgcaaatgggcagacttcagtcgtttgatttgtttcaggcagagaacaaactgtttttgtttcgtacaaaagctcgccaaaccatatcattatgcacatgcaaatttttatatccaataactcgatgggttggcgtctcattccagcgggcgcgcatgtccggttctcccaaggattaggataccgcgtttgctccagtgttgtacacatccgaaacctctgcaattcgtcattgtacgtctgttagtatgctgtacaaatggcgtattcagacagaagaattgtccttccagctctcgccattgataccatgacccccgtttagaatgagttgagggacacagaatataggaagttgggaggattaataaagcttgacagaacgttccctgtgtgtgcacgccatgtatcttctggtcgcaaccatttcacccagaaatgctgttacagttatccatttcctctttttcccgcctcccgacagggtcatcttctccgctgcattgtgcagttcaacacaacgcaaccgcttcaggattgtgtcgtaacacctacggttcaagtgtgtcgtgtcaacaagatgcaatgcgagatacgatgcataacgacaattgctgttttctgccttagtaaaga

SEQ ID NO: 747 - DNA, 3237 bp, Toxoplasma gondii
  source 1..3237: mol_type = genomic DNA
catgcttggacggacaatgcaagctaccgtattttctagaaacagggcgcatggggactgtgtatgagaaggtctgccacttagcgcccaacaaaatctcgtcatcaaatgtgcactgatgagagtgccagcaaaatcgttcctatgctagcaaagccggtcgtggaacggctcgcggtgttgacccccaatatgaaggttgcccacttgtgcgtgcgcttgtcttgcactcggaaacagaaataagggcttgttcctggctcaatgtagttcttagcagggaactggaagaagtacatcgggccaacggcattccagaggccaaatgtgtaagggaggacggggaacagttcatgccacgttaccgttcggctagcatcgcagtctgacatttcctcattcggcaggtaggcgtcggaaaataacgtactggggtctaagatgtgggcctcactctgggtcttaatcaagagcacagaagacggcgtcatggtgaagttgtacagcaggtacgtggacatggtgtcaggcaaaaccacttctcggttatacttgggcataccctcgccgcttaattgacggaaatgcataccctcccttattcgcaggaagtccatctcagtgttcagctccaaggcatgttctgcacttgtggaagcgaagccgaggctgtcagtgaattgccatgcttgctcactcgggaagacaagcatactcaaaatagatgctgtgctgcataaagttgcaaaacccgggctcctcctgtcaaaacgagaagcgatcctccttcccgacattattgcattcgtctctctcgttggtcatgcaaaaattcaacggtgaaactctcgccttgctggacgccccttcgcgcagcctctcactctcggttgtgagtccgtgccagtgaatcaagagtatggaaagggcaacagatgagggacttctccgaactcccactctacgggcagggaaatcaccgaagaacaaagtcacttggcattttccggacgctcagtcgaaaagctacaacaacgggggcacctcgggcatgcgtgggcacaatcgttaggccggcgcctgaggccattaattattgagagaaaattggcgaatcggaaaaaatcgaggacaacatcgacgcggtgtcctacacagaggcgagacgaaggtgttgcccttgtttaaatctgcactgaacagacaaaccgtcgcagaagtgggctcaagaagggaactttacctctcaagagacctccaacgacagcacacttcgagctaactgatgcccccctcctgtcgttcacgcggtgattaagagacacggctagttgttcttggaagccaccggatgatgctacgggtgccggagaaaccgtccacgcagtgggggttctgagaagagtgtcctccgcagcgatgtgccgatcccgtcgacttaacagtgtactcctcttcctcgcagaatagatgctagtactttcgtgctgttggccctggagccttcactctggaaaggtcgctaaattgagacacatgctagaagggatgcgtgtgcacaggcgtacaagtctgcacgaggggttgggccgtctcgtcgttaaaacccaccaaggcaccgcgcttctgcagaaacttaaaaagttaatgatggacacagatgttggctcactagcaaacaagccgtactctctcatccagccgttcaccggagacacggagaggcgcgtatggattttgccggccgaaacttgccacatatgtctgtcgacaccatccccactccaaggactaaaatattggtctcagtggagaccagtgatcacaaaagccaatgatgttattctgtttctattggtttggtgcaatccctcgcgttcactggcggcactatctcatttgtgcggcactctatacaatcaacctcgtcagattgtccgttgcagctcgtctctagtcactgatcgacacgaaaatatcttaatggcttcatcgttcaatatcgcctgttcctgtaaaacacaggatatccagggtcacccgctgccagaccccgggaagataaattttcgagtggtcgttcctctaccgaaatgatctagacgaaggccgtacaaattcccgcgggccctgtctcgacaatgacaggcaacactcgggaaacccaacacggcggatgatcgaccacggtcgcgtcgatgagagacgttacgcaaagatagtgtgtctcggaagtttaggatctgaaagatcccgagagatttaaagcacaccgatacgagacaaggtgtgcccaaaatagactcatagatgtattaggtgttctcacggtgtgtttagccgttttgattcgaacgtcgtctcccctaatctcttggaagctgttgttctcgtgtagatgttcttgttaatgttcttgttaactagccactcgaaacaaaaatgtcgcagtggcgtgtccctttcaacacacgtgaagtgtgaggctcttctcggtgaaacaagaaaacatctacatagcgaatgggtagatgagaattagttaccatttttaacggttctcaccgacctttccaaatttcatgcgaatttcctcgaacagaagttggtggcagcagattcttaatgaatggctcttgctgtcactcggttaaccaagtatccttcgtgtgaactgtttggtcgaggaatgaggaataccatcttcattcacgcctgcttcctgaccctcgaacgtgcgctggcgctgttctatccgatagtaatcatcaacgccatggatataagtctacaaattttaacgaacccgtgaactatacagttgtcactgtgtcaaagccctatggttcactcaggttctcttggaatatgaggggattcgaccgccatcacctgagagtctagttcgatgaggtgaataaaagtggaagaaagaacgtagcgggatccgtgtttaaggcagacacacagaacatcagtactttgcaatcggttttcttgtagcatgtacaggccacagctatcaccgtaccgagactgagtcaccgctttgagtcttatagaaggatgcaggttttaccgtgccattcggtaaccgccacccactcaagtcgcgctgggggcaacgcgcttccagctttggaagcttcttgcgcatctcatttatcgttcgtagtttaatcaacgccgctagttacagttgaccgtccgtcttaactgtgtcacactgccggaaaa

SEQ ID NO: 748 - DNA, 2145 bp, Toxoplasma gondii
  source 1..2145: mol_type = genomic DNA
cactgccatgtcatctttccgctaaaggaactgctaaagaagcaaaataattaccgttttccggcttgccgaggcaaaatcggctggtggggatacgtggggatatgcatcccattaccacatatttagtggaattgtttcttgattcgaattgggaaatatctctgtacgacgtcggagcagggagacggcggagtgttcagaagggtggaacgctccgcacggcatcgttttagtgtgtctgcgtaagagggaaatgtagaggatccatatcctatgagtattttgaaggtctctattaattcatgatagctgtgagatgaatggagaaaagcgttttgggtagggtaagtgtctgagagttgtgcgggggaacaggccatgcgggaaagcaagctcttgctggattctgcaggatttctgagatgacttcccttttttcttagcgactatatttgttttctagcgttgtttgccgggctctcctagtgactgcctctgaagccgtcacggatgagagcatttgaaaaggcaaacctggtagtcatccggtagcaaggatccctgtatatttttttcgaagtcagagacattgccagattaaagcagctttcctgtcctgtttgcagtctttgaagtgcaggattttgggttgttgcaagagaggcatagattctgtcgacgtaggcagttggtctctcgtgtttgtccattccatggtgtctgtctaaaggcgtaagtgtgcttgttcccctgggagactacagcttaaacttgtcacgtatgtcgaacaacagttggaaggatgtgctgtgttgatgggggcttgataaagtcgagttcgaagaaactttacccttttcaatattgtcgagttgattaacaatcctatacaggtaagatatgtggatctgtcgcccgtcttagtagatcccttggtttttcgggacaccatacaaactaaggaattatacattttgaacagtaacaccattccatgtttctccaagcaatgcagttgtgactctggtgtacattggtctggatgggcaagctgacccgagattagcctcccacgggaatccacacattgggcttcgattagtgaggtatggggggcatccgattaaatagccgtttgccaagatttacagtcataggttatgaatcaaccgtgtgtccactagctcacttagggggttctgccaaaacaaatgtcatctcttaccacagtgctaataagcagctttgggggatggatagaagtggtaacacaaaaaacgatgttcaatattacatcagaggcgtagtttcctctaagcggccagggtgaaaaagtgtggtattggtcaggcgacttgcaagcagcatcgcgtctttttgttcgaaacgcatcgctgcgacgactaccactctgcaggaaaatgcttttgtatcatcagctgattttggcctctacctgcgccacctcaaggctcccacgggttcttgctgaaacatgggttcgtagctgtggtgacgagatgtgtgcatacacgtctgcgttcacttcagtgacgatacatacggtcccacctggagaaaaaaatcagacggaagggaaccactctttttagggagcactgcaaaaaaaaacacatctgtgcagacgtgttccatggatcccgtatgtatgtgacggaccatttgaatgactgaaatcaactggccgctgctggtttccatacttgtgtgagtagaacggccacataatttttctagctgctgactcgcagccgatgaaacattatgcactacaagcaaaaaatagtcgccacctgaagacaggcgatgcttgtgcacccattcacgttgctgctgacgttgaagatctaagctgttgaacaagattcgagccttgcgaaatccccaggtccgtggttcaagggctaggcgagtccttccacttctggcaaccgtatctacacgattgaatcatctggaactgcatggtcaccaaaattgccgaacggtagcgttacctttacatttctgttgatatgcgtttttgtgcacgttcaattgtctattgcctccatctttcaactagtaagtaaacgcttgaatgagcgaaattgtgtgcagcaggctacgcttgcatgtcag

SEQ ID NO: 749 - DNA, 2683 bp, Toxoplasma gondii
  source 1..2683: mol_type = genomic DNA
agagcgaagacacaaagtaacagaaaagcgaaaagggaagctcaaaaagtggactttcccctaccgagatacacgaaaaccaaaatcctaactccaggacattgaatcatatatatatatatatatatatatatatatatttgtgtgtgtgtatgtgtgcgtagagcgagagtttgacatggatttgaggcgcatgcttcgtcgaagaggaagtcagaggagagacgtagaacattttcagtcggtcttcctcccagcttgtccgtgagacgcgccgcgacgtctgcgcgtctgcgggcatccagtgcagcgacgcgtttctctgtgagcaggaggccctgacagaaacgcgacgtaccaaaccaggcttctacttgagacgccagaatctgcagaatgaagagatatcttcgaggcgcgttgagtctgaacggcgccagcgcatcgcaggatcgagcgcggctccagtgcagtcattcaggataattggtctggaagttcagtctctctctgtcgcccatgacacaaaaactttatttatgtccattgacgtcggctgtggctccagctgctcggggacgagacaaacggcaagacgagaagctctacaggaaggcgacgcttcgcccccctcgggtgcgccacgaaagacgaagcttctgtctctcgttcgacggagttggagagacaggagacgcgagactccagggaggagagcgaagagaagaactggggaacagacagatggctgaaggaaaggacgcacaggcggcccggcgatggagtaaatctggatcgactcggcagagcgtcgccaggagaaaccgaatgagtctcgcactgctcaacaggagtgcctcgcggtgctgccgccagcagcttaccggcgaggcggtgagagagtctcgtgtctctttcctgtcccctgacaagcacagaggcggcaaggtggagacgcagcttcgtcgcagagagtcgtctttgcgaggaagcgacagcagaagaacttgccttcaaagaaatgcaagagggaagagaagtgaagaaagctaagattcgcagaggagtgctctccgggtggaggtacacctgcaggaagacgccgcctgaggggaagcggcagacagacgtctactggagctcctttcgaaagaaacgacgaaacctggaaactctatcgtttgtttgggaccgcctcgcgtctggagaagtgacctcgccaaagcccaccttcgaggacagcgctccgtcgccaaccccccgaagaagcgcgtccggcttgcagcgaaagtcatgcacattttttgcggagacttgcagaaactgctccctgcttcttcggtggcgccctctcctcagactgaggaaaagcgaagaagaaatgacggcggtcaattcgcacgaacttcctgaacaaggcgctctccggcacacacaacctgcacaccgccttcggggaaaatcgcgacgagagacccccgagcgaagcgagtccgagtgtacatacaccccagaagtcgcgctgaaaagctgaaagtgatttcgcgttttttctggagcgtctccagacagatgcagctgcctttgtctgccggtttcatctctggcgtgcagccagccactgggttgtgacttcgcgccgacttgggcaagagcttcgcgctggccttgcttgtcttcgggaggaaagaaaaaaaagccgcttcttcgccaaggtctcgccagttcgaggctctctcccgttcgattggcgttgaatgcttctcgcttctctccccgttctgtacgagaaaaggccgctgccgcgccgactctcgagcctcatccgcgtgtcatgggcgacttgcacaaacatgactttctgccgagacgaatcgtgaaagcaaaatgtctccgcggctcctgcgtcgagtctgtgaagacagccggctggtaaattgaacagaagcgaaggaagtgccgcgtgtctcgtcgccagctacttgccgagcctctcgcgctcacgcggttcttgttcgagctgaggcaagtccactttgttgggagaggttcgtcaaagggtcctcgtttctctcacaggcgccgccttgttgccaggggcaatgtgtaacggagacgccgtactgatttctgtcttgctccgcccatggcttcctctctcggtgctgtcgttaccagaaagcagcagagcaggcgcgcgacaagaacgatctcggacaggtcgattggcccaaccgatggcctcattgccgtttacctagtttttcagtgaactccacttcggctgcatgcagtcccaaaaaagcgtggaaagctttggaggttttggggatttcgacgtcgctcgctgtcttgttcaaaggaggtgaatctctcgagaaaaggagcctctatggagaaaggagtcctttgattgtggctctcgaggccatgcggattcgtcccctcgtctcgccccagtgaccccacgaccgcgttgggctccacaggcgcgctcgcaagcggagtcacctgcgccgggccggcgagagagagagagagacaggagacgaacgcggtcgcagacggcggtgtgctttctgcggtctttggcgtcgcacaaagtcgagggagcagacgcttttggggtccttgtccagatgtgagctctctgccgcggctcctcctcatcccacgaacacaa

SEQ ID NO: 750 - DNA, 2100 bp, Toxoplasma gondii
  source 1..2100: mol_type = genomic DNA
gcgtctattgcctcagcttcagagattgaacgtcttttgaccagaaaacgcgtcctaagtgcgaatcctctggtgtaacctgtggctctctcgagcgtgtgcgtttttcatcttttccagagtcttcgcctttgtatcgaagtcgcgaactctagccaaaaacacaagttcctgtaaaagctgttgtgcgtgcatatatatatatatatatttgaaagtatatgtgtatcgtcgcgcttgtagtagaagtatggtaaaagagaatagcttcaaaatagacggacttgcctatgctttgcgacgctacttgcaccaaaatcataattcaactcgccatgcatgcagcacaaacgggaaaacaactagacctaggctccatgtacacattgtatataaaacgggatttttaggttcacttgaactacctttttctgagacaacaattgcattgcgacgccctttacacattccaaagtggtatatctacgtgccagagcgcatacgggaagcgacgctgtgcacgaatagcaggcgtgtgttgctgcttttttgcctcaatgcaaaggaccacagccttccttccacgtgttcgacttttgtgaagaccgaggccctctgaagtcaagccaagcagcaactgaggagagtttcgctgcagaacgacggggtggcagcaggcaggtcgcactctccgtcaacacaacagcttgcgtttcggcgacgacctgaagcgacagacgggagcgattttccttgctttctttgcagaccagacgggagcgattttccttgctttctttgcagaccagacgggagagaagcgagaaggaagtgccattcggggagagcgcagcgattgagtccagagattcgtggagtctcgattcctccttgtgaggggaaacggaaacgattcattcgcgtgtcgctctgcacacctgtcgggtgtacatccactcgagactggagactcgcagtcaccagtgtgcagaaagctgccaagtcgagtggagtgtccgtcaattttttctgcgatacacagttcgatctcgcggcgaaacaatgggggaggaacggagactgtcccgtttatgccgaaaacctttcgggctgcttctcgcgtttcgtggacctctgtgttttcgcctcgaaactcacgcggcagcggcaacgcatgtacgcatgcgcagcggacttcggagcggaaagacgccgcttcgcagccgtctctggactggattttcgactttcttcgcaagaattgttcagttccggcgtctgccgtattttttccgtgtggcatgtgttgagttgtgtggagcaaccgccaggtttctcggcgagctcctgccatgctcggccttcactttttaaatcaagtcgaccctccttctgcatctactatatctcgttcctccattttcacgactttacgttttcttttcgctgcgacattctgaggcctgaattcgaagaaagacttgtcgcgttctgagtcgtcttttcgtctacaacgctttgtggcctccgcattcgtcgcatgcagtatcgcgtccagcaaagacctgcgacgtcgttcattcttgaagttgcttctttctacgccgacccttctttgctgtctccccatattattttcgagctttcgcctgtgtgtcttttctgcttttctttcgcgagagttttacctctcggttttctcctccgctgtctcgtttgtcgaacctctgggaatcggcagaatggagaggccctcctctccgcttcgcgccgggtttcgattccctttgactttctcttgtttctcttctgcctctgcgtgacctccctgctccccatgtctgtctgctaggcgcagcgagaggcgtcgccttcccctttcttctctgtcactctctcttctccatgctccctctgctccttcttcactttttttcgctgtctgctggccttgcgtgcgtcacaagctctctccacgacgcttctcgtctcggttacggctgctgctctgcctcctcatctaccgcgagtgtgtctctctgactgtttgcgctgctgtatctggagtccgaattagcgtctgctctcgtcgtctcacga

SEQ ID NO: 751 - DNA, 1625 bp, Toxoplasma gondii
  source 1..1625: mol_type = genomic DNA
catcgctcctcttattctttgttgtttgtcctcgttctttgtctgcatttttcgtctatcgaaggctgtctctcctggccattctttgcgttcgttgcacttgtattttgcgtctatcttgccccagaaaagacaaacttttcaagtgtttccggtcttggcagcgattcgcgcggcggtaggggcctgtaacccgtgtcgggcatactacaacggaaagtcagaatcatatcgttacgagacgacctccccagtttgtcaaaagagcctgtctgctttcgcatggcccttgccatttcgggtgcacaaaacacgggtatactccgaaaaatggtgtcgcacactatcacgagagaagccgttccggggctgtccgttgccttagaactcgaagacaccgccaactagcaatttgcggtgtctcagattttgctgctgaaatctctggtttacatttttggaaacacaacagttcttctacgcaataaccgagagcccacatgctgtcgcgacagcccagcctgaaaaggctttatccagaattcattatcttcgttcactgtgaactgaggatgtgttcgtctgtttggtgaccgacatatctggaagataaagcaaggcagcaaacgccgcgtctactgaatgaaacatggggaaaactcaagtttctcttcctaggttagggtaaaaatggaccacgagtgcagcgtatatgagagaaaaaggcagtctgtgccctaccccatcggtacaattgcttcctcctccggaaagaaagaaagaaggcaaacaggaggcagacactctgtgtgcgatgatcatgttgcagtcacggatacgcggtacagcgtttaatcgttttctgttgcgatttcgcagcaaaacaccttccggtcttcatatggcttgcgacgtgcacgacaaagtcaacagttacattgatgggctacgcgaaacataggagcatgaccttcgtgaatttctctcactgtcccctctgttgccagtatacacatctaacaagagaaatggatgtccgccactccaacgcaggaatgagaaacgtgaatactcaataaatccacaatcattccaacggtgtcctcctttgacgctgacctccacctgtcattggagagtctcttgctaaagaagatgggatatgtcatagacgcaattttcaccaacttctagatgggtcgtctacgactctatctacccgaggcagcagtagttggcggttaccttcggttaagctctctgcgtgatggctttactgtcgttgacacttctgtacgctggtacatggacgccctctcagttattgaatttgccagtgaacagctgtgtttccctgtctcgtcgctatgcgatagtggcgtactccgggcacctaaacaaccagtggctcaatgcctgtgaaaaaacaatgccgctgaacgcttttattggaaactaagacacgaatatctccacacgtagcggacgtgtgcaactatcgtgtgtctcgccgtgtcgcagtagatctgggcgtaaaggtagatcatctcgcagtagcttagttcttcatttcctggttacagggccgcccccaatggacagctaggataattgaaagcaatcca

SEQ ID NO: 752 - DNA, 2806 bp, Toxoplasma gondii
  source 1..2806: mol_type = genomic DNA
tgttatggtagctcattctcgggaaaagccgagcggtcggtagaaaaaactgaggaaacggcttctgaattaagtgagaggatttccctcggtatcggcatcttcctttggactgcctttcacccggcactgtaccaatctgtggtgcggaagtcattttcctcaagaactaacgtctggaggccgtcgcgagctttgtcaatagttttttagctcgaagtagagaatatttttcttcagtggagggcacttcggtgccttacaaaggaactagtcgtttgacggggttagttgaggcagaactgtcctccctatcaaatgcaagattcggaatataatggatcggatatgcagtaggtgattgcagcaggacgttatctttcttttcaaggaatgacggcgctgtccctattagctgcctcaagaaaaatatgcatagtgttacggttgccaacagaacatagggcatgcgttctaatttgtaaaacaagaaagcttcagtgtcggtcatggcactggtggaaggtcgatgcacctgtactctgttcatctttttctacctgtcatactcgttttccgacgctgcaacgttcgtttatcggccgttctcgggcgaaacaggcaaattctgcgggattgctacgtgggcggtggcggattacccattttcctcggattcctcgcccgctgaagaacgcgttttgggttctgggtatcctctctaatcttcaattcacgaaaactcttcgttgtatatttcggtaaacctgaaacggtggtttgtctacgaggtacggtgtgtcagttcatgtgtatccagtgtcttatcccagagaaacgagttcatcggccgtcctgacgcgcgacgaaaggacgccaactgtgctgcctttgtgccggcaggcggtgcatagtatctgatgaagacccctgttgaaacttgcctaagggaaagcggcctaacatccctgtggcaactcaccaggcgatttcaggcctccacggagcaagcagtatcgcccaacgccacatgaaatcgtacgagagacaattcgttttataaaggatcctcgcgtgcagggaaaaaagagcaccctttcaggccaactggaatccctgtttccacgagttcatctagattcccccaacgtattgactgttaacgaaaacaggacagccgagagggggaaccaatttttatttcatcaagtcagagagagcaatatcttgtgggtatgcatttcagtctcgatctgttgttctgctgaggaaaaagtgaagggcacgactgaccgcacacgtctcgtatccttacggagacagctacaagcggcgtttctgtgtcttctgggcaaattctcatgcgttttatctgagtacgagaacccacttgcatgatcccagttcgagtattcctattccttcattttctacgggtatcctagtgaagagctccactgtagagaaagcattgccccgggctgaagaaaccgacgccgaggaacaagcgggcatgtccaggagaaagtggtggacctacggatgtcttctgttggttgtctacacactagaagataagcaccggatctctcttcccataccacgaattccacaactgtttttctaacggcgtcctctccaaaacaatccaaaacaagcacgctgtcgcgggcctctaagaaaggttgctttcgtctgtgtcgccgtccgtgcgctaccgcgccgcgcgtagaaccgggccggcttctctgcggctgttctccagcgtggaagaacggaacggcgctgaatgtgcgtgaataattttattttcgtatccctgcttgatagaagatagcatttctcctagttctgctgcatgctttccgttttgcatcgcgttttcgtgaataataaacgacggcgtcctcccgttctgctgatggaagacggggaaagctgtccttttcggaaagtaggtcacgcagctgggcagtgacagcgctctctggtgtgtgtcttcacgacagtatgactaaaagggcgatcccggcaatttcttgatgcgcattttctcggagatccatgtattcttcgtgggtcggcgacaaggagaaaggcagaagacgatccatacccaaaagcgcccggaagaggcggcaatgagggaggcgggcgattttgccctgaataggagatgaggcgaagaagaagtggcggactcaaatccgaaccttgcctctcatctttgtttccgtgtttctgggtccggaagcggcgtttttctctgaaacacctccaaatgctcagtccgtagcttaccccctgacgaccttgcagctgtaaaaggcgactagtcgtgcatctgtgaccaatggcaagccacgttttccttcatatgatgtgattttaacgtcttttctcaatttgacccagtagtttagggctcgacacgccaggttgatgttcattttgcggtcgaaggcacaagtgacttggccgtcggattccgtggaatcacggctgacaggaagaacgcgttcccgcgcgcttgcttggaaacaggcttcacagttttgctgcatcccaaacgtaccatatttcctgtttctgtcagtttccccagccttacgctctaattgagcgtctcttctcttcctgattcgttttttcctggcattttccccttcactcgccaccgcacacatgggtctgtgaccctgcaaacccggtctgcagctgcgcttcccggtcgcatgaattcggaaaatcgtcatgctttagccatttctttgcgtgcggtttccgttttcctctccattcacca

SEQ ID NO: 753 - DNA, 2336 bp, Toxoplasma gondii
  source 1..2336: mol_type = genomic DNA
cgatgagaatcccagaggccaggacttttgctctttctggatgagagggtggcattgccgatggacggcaaaatggtgcaagaagatttgttgcctcatttgagtgcagtttgtttacaggcagggaaatacatatttgcacatgtgcgtgtgcatttgttactggattcttcatttaaaggagctacgggaagagtccctgttcggactgcgcgtggcgacagagcgccttctcgatttgttctcttcactaaagaatcgaacgcctaacggacgtggaattaacttttttcccgagaaacctgcttttggtctcccgaagttactgatggtctttttcaagttttttgtcttcctcgggactggaatttgtctctcgacttcaccttctctcgacacagccgtcttcacccactggtggatttcctggtggtcgaaccagaaaagactgcgcgggagcaaatcacaaaaggcgaacacagtggaactcagccataccaacggaaaggaaaaagagggaattcataatgtgcctacagactgcagctgtaaatatatctagaaacagcttaaatgagtcttatctgttgtcactagcatgcatctcctggacggcagaggtccacattatggttctgaagacacgtactgcatactgcctgctacctggctctattggcatctttccaaagtctttttcaccgcaggtgtgctgccattagagcctaggcacctcaagtcctgatagattggtgcaactcacaacgtcgacaagcagtctgtctatccggaggtttgtgttcgtggcggaacccgaaactcggaaatattccactgaaaagccccacgagaaagaacgcacaaatctttacccctgtactgcgagcgtgcatgcaatcgttcttctggttcatgcggagccgtttaactacatttgtatcgttccacgtatcagccgaacggggtaaaaaactcgcttttgtccagcgtccaacagcgctggcgcagagaacttttctgtttacgagactagctgttgcgtctcccgcgccagaaacttcacctgttttccataaaaatcagaccggtgagcagcttctggccgggcaaacatttccagaaaaccctgccattccagcaagggcggctgtgtatgtacaccccatctagctggtatggttaacctgcagcttgctggtgtgttcccctttgttgtcgaaaaatgaggacatgtctcgcctgaacttctagtgagagttctgccccgttttcttgcgtgtgaacgctgattttttccggcgtagaactgccctttcctccctcagacgaacgccctcctctatcacctcgttccatctgacgtacgtagcctgtcctggatgagtgaaaagcgtcgttacctccagggcaactgccttttctcctctagctttgacagaaagaggatagcgggaaagcgttgctctctctcgacagaaatatcttcgcattttaggaaagagaagacctgcgtccagtttttcgtccgggcaatgactgaattccttgttcgattgggtcgcgaacttgcatgcggctgtccgtgcagaggagcagctgagatcgggttcgctactcatcgagagccgatgagacctcgagaaagagacacgcgccagcaagcacccgttgggatccgtttgcaatcgatttctctaatcggtgtttcccacgtccgcttctgcgtggcaatcgaaagcgtcgcggtctccggctctccgccggcagttgcacccggttagcttttctctgcttcacttctctcgcgttatttctctccccggcagagccacagttcgctggtattctgctatctctagaagttcatttcccccccctcctttttctcggtgcgtttttgacacagctctccaccagacttcggtttttcctgccagaagcgagatgccctcaagtgtgtcgccttctcatgtcggttttacgcgtgctccctcaaccatcgctctctctttttcgtcgcgcttcgatagtaaagttgctttaaagattcggtccccctctttgctgcgtaccttttccgggttttgtgacatttcgagggaaaaacagagtcgcaagaatttcgtcacggccctcttgcttccgtaaacggccagtcgttcaattctctcttcgtcgcacacctgtgaaagtctccacatctcggtatgaggcgcttgctaggcaaaaatttcttatgtggacgcatccttctgtatagctcgttcttcgtcgttgcttctctcgttctctcttaaaacaggtccccagtcctccgcgttttcggttttcctgca

SEQ ID NO: 754 - DNA, 1770 bp, Toxoplasma gondii
  source 1..1770: mol_type = genomic DNA
tcattcggaagtgggtatgtttgtgtacgagttcaagattgctctcttctattcatgcagtgcttatgagagaagcagtaattcatcagccaagcccacgtcgttcggggcggacggtgctctaggaaataactctcggttttcggcgaatgcatgaagcaaatgccgagaaatgtcggacggtgtcagggaaagaccggagttttggaatggttttgtttcttttcgtgtgcatatcgcgcactgtagagtatttcccagttttttctgcagtagacaggcagacctcggtgatgaacaatgaagttttcccaccgccacattgactaagttttccaaagaattgccaacgaggaaaatcacagccaacactcggtcactcacaccgtggacgagacagactaccgaatatgttgtcaggattggttttgtttttattttttatttgctgtagcgtcaccgtgaggtgaggttgctttggagatgaagagacttgcagtcaaggaagattgttgaccctggcgtacgcgctgctacggcaggaagcgggtcacgagaagccggatgaacagagatgtaggacgcactgactactgtgacagataagtatcgttggtttcatatatttaatgagtttgctgtaggtgacagaacccgtcaacagagcagtgtctgtaccagcacggttgtccgcgccacatgaaaaacagtccctatgaaaacgcggtcatctgcgccattagcatgaggtcgcttgcagcaagcactcaggagaatcctgcggctaaggagtcttcactggtgaagtcaaattctgggctagatctctacagctcttttgcatgaggcagattttgtgcgcctccgtttgtacacctgcacgactaccgcaccttccagtaagggaggtaatgtaacttccctcacacttgtacatagtggaccacgttggctgatagcttggtgtagtgacccctcctgtctccaacttggcaccagtttgtttgtttaaagtctttccattcgattcaccgtccaacagtccccggcacccttgccaaccagactgcatgcgcatcgacggtaacagcagcgctcgcgagccacatggccacgccacgatgcacgttacgttttgagaaaaaatctcaagtcggaggcttaaaataggggtgtcctttcctatgagcaccagacgtgtcgaaaaggatgtctttgtctcattaaagtttgtgaatgtgagggtgagccccccccccccgacgcaaagttgcaccgcaccacatctactcatgagaccccgcggcaaaatagattgcccgaaagcttccaacgagcttttttccgcttcatctttgctgttacatgtcatgcttgtcggaccacacgcgtttgtctgtcggagctgacctgctttggttgtttacagatcgtgtaacacagccttgaatgacagcatgtctagcaatgaaccgttgccatcgtccgttcagccaattcacgattggcgttttcccttggggatcgagttagttagaccgtgatttctgcttgaaagactcaacctcgtatatatgttcgtccatgtttgtaagttgcttgctgtactcgatttctggttgggggcagtaaaccccccgtggaagtggcgcactgcttcatgtgtcactccaaggcgataatagcggatctgctcccctgtctcaggagtgtcacaccgcagagaggcggcccacacgtcttgttctggctttccctcccgcgaaacga

SEQ ID NO: 755 - DNA, 1938 bp, Toxoplasma gondii
  source 1..1938: mol_type = genomic DNA
tttctctgtgcctacttccatctacgacgtctttgctgtaaagtgcgttttccgtgtgtttctgaaagcgttgcttttctagcaatgcatctggttcacgcgtttcatccgtagacgtgtcaactgtcagctgccgtaaggaaaagttttttatcaagagggaacgggacggtgtcgcgatgacgcgagccgccgaaaggcagcacaggtggggcgtttgcccgaccttattttgccgcaacaatcagttttagttgacttgtgtttaagtgctttccttcgaaattggggtttgtcgctgtcactaccgcactaccgcactgagttgcgggaatggcgctgtggcagaaagtggaaattcgcttgagcatcttcagcaaagaccttcgctgagacgaggaatagggatgtttctggagcactcatattccagccttggccgcgaggacatttaaaagtccccgccgtcgtctttcctttcagaaaaactcaacagcatttgcatttctcaacggctttcgtgtttagaggggctcaagcgtgtgtcctttccgcgttcacgagcgaaagaatcacagaaggacgtgtatgatgtaacaggaagaccatcctttgtagtgcacttcatctagcctgtttttgtagattgcatgatcgtagcttgacgtgccttctcgttacatgcaaaagcttctaccgaccctgcagggatagataccgcacttgaagtcgagtgcgccatccaagttcacgttttgtctcttctgccttttaccttatgccttggacggcaactcagttcaaaacagcttaaagccacttcccgatccttgcgatccagaagaagttgcacgatgcacgcaattacgaaaagtatcctgttaaaagtggacgcggatatctgtccacagtccaagtcattccgaccttcttccccagtgccgatgagcctagacgtcatagtgaagttcgcgggcatgctatataggcttcaacgacagcaggaacttaacgaagagaactggaacaacgcccatttaacaacgaaggagctgtgtgtggaagaagcgagcactaaaacgtatccagtgtaaagtttggtcgtcataccgcttaactccgctgtgccgttttttaacctatccatcagtccttgtggcatgccacccggtcttttccagactcgctcctagcggcactgtcgtgaatcaaggtggaagaacccctcttcccaacctagagttcctgacacgaactactgatgagacagcccagtacgaatcataggagacacatccacaggtcgaagagaaacgctttgttattgctatcctccaaacaccttctaacaggttatgttttcacaacgacgaaaatccaacaggttagtttgtctcgttccttagaacgtgctttccatgtagcgcggtttagggacttctgcggcctaggtcgctaccacgctcctcctttcgcttttcactggccttagctaacattgcagtgcagatgtactgtagtgagaacgtactggatagaaggcggtaatccagaaatttgtgtcggaagtcgcgcgagagtttcacccgcgatcggttcctcctgttcttgctactggcactctgtggagatgggtcagaaggccccgacgggaactgaggtaattcgttcttgaattgacaggtttggagatgcggaaagtggcggaataaaaagaggaaagcgaagctgaagacaactcccttacgatattgcagctcgagggtgcacagcttgggagaccgcgaggcttcccccgaatacacgccgaggagcggtagtgagacaccacagcggtgaaaccagtatttgccgttggcaaggaatttccgttctcctttgcatgcggttgtactatgaaaaaagggttctccgtggacaaaattcatgcttcgtgaa

SEQ ID NO: 756 - DNA, 1869 bp, Toxoplasma gondii
  source 1..1869: mol_type = genomic DNA
aatgcgtaatcttggtgcccgtgatgccagttctgtacggcagacatggtggcgtttttgtgcagaactcttttcggaggcttccgcggttctccagaccggggatcgcctattgtccactgcagacagagtgaccgtttttgcctgatttgactctcttctctcaagattcgcagtggcgttcttgcagatacacttgagctgtctcttctcgctaaagctttcggaagtccagcgcgagtgaacgaacgaccggaaaaagtgaaaatctctcctctttctctgtccttttctacatgtcggtctttgccgctgtatgtatgtgtgtgtttctctcggtatcgccccctctccccctctgtatctcaactttcttgcgtatgtctcccagtcagtgtctctctttctcctgctcctcttctgtatctctctccctccctcagtctctgtcgctcggtctcgctatgcatgtgactgcgtttgtgtctttctgtgcatgtctgtctcttggcaatctttttgttcttgtcggatgcagcgtcgactctggacttcttctcgctgatcttcctcggtgcatgcgttttttcactgactcttgtgcatctctatgaaaccccgttgcaaaggagaggcgacggcggtgcaacatgttcgccaccagttcagacgtccaaaagctgagtgccccagcgcggagcatgacggcacctgaatcgaacttgcgacaaatgcatctttgacgactgtacgccagcgacgaacggtcaaacttgcagatcttaggttctgcgttgaatgaacttgaaagacgcaccctgggatccgtgaatctgtgtttcttctacgagctcgccttcattttcgtcctcctgccttcttccagtcacactccctgtctctctttcaccatgccatttcttttcgtgaaaactgagatatgtggtggagacacagccaattccccagggcgaagagccttcagtgcatgcaaacgagccactgacaaagaggaagtctctcttgccttgttcgcgaacacactggcacaaatgaagagcgccccgataatgacatcagtccattaccaatgaaggtgtgtagcatttcctgagctccttattattaacgtcacagctatctgttgcaaagttcgtcgtctcgactacgcatgcggacaaaacgcacactgaaattcctgtcggaaagtctccgctgcggaagcatgcacgcgcctttctccgcgccgaagaaggcctctgcctcggcgttctttcacttcttgttccgctgactgcgtgaacgcgattcagacgcgcttttctggaggacgagtgctctgtctttctgtcctgcatgtttagaaaggcgaggaattccactctcggtgcgtatagagcccccgggttgccctgctttgcatgcatcctcactttcaagaagagtcgcgcggcgcgaagcgcttctgtttcagcttctctctctctctctcgcatgtaaatagcttgaaaagcagactttagcgaaagtcgccttcagggagaaaaacgaagaaagaaaacgaagaaaaactcgccacgagaccgtgtgctgcgacacaacgttaagtcgctgaggagcgacacaggctgctctctcttcctctcaatgtagagcagaaactggaactgaaagcgaggaaacgagaaagcatttcgtcgttcgtttcccgactcttctatttatcgtctcgcgttgcctcgcgtctcctctctttctctgctcttttcttctgtgctgtcctgcccttctcgctctcgttttcttccttcatttctgcgattctcctcacggtggtctcttctggatctgtctcgcttgtctctgcaa

SEQ ID NO: 757 - DNA, 2078 bp, Toxoplasma gondii
  source 1..2078: mol_type = genomic DNA
agatgttttcgtgtgttcacgtccatagagagtcgaccttcaattcagtggcgccacgacttcacaaaactttaatccatcagagagcaaatcacgaccttcacaaagctctgcttcactgatgctacagaacggaatcggtattgcttcgaacggaaagacagacaccctaagacatctgacgaagagtttcctgtcgacagaagtcgtggaagtcttgcactgaggaacaaagcttcttgacaacccacaagtttccatggtttcagccctgcaaactgcgctcatggatgcatgggacactgccgcattttgaacgaaggcgattgtgctgcgaaacaaattctgacaccgtacgaggttgttagtagactagttccgaaccacagcttcagattttctactgaacactctacgatcgatccactactctctaagctgccccgaacatcttctttcggcaattgtggcagttggcttgtgacactagccactcacgagccagcaatcccggacgctggtaccgcagctgctacgcattccttgctgaagtataactaaagtacaacaagtaagaatcactttcgaccttggctttagcacaagttattcatttggtaacgctctttcgcagggaagccgaggacggggctcttctgtccgcaaaatactccgacattaatgccttgcggagcatttctcaatgatacagacaagcgaattcttttttgccttcacaagctttgtctggagtttaaagcgataccgagtgtgcagttgcttcctcaatcccctcagcgtagcactgcgccagcggcgttttccaacctccttctcgctatccaagaggtatatatggacatatacgatccttttctctgtctgaaaggcatcgaagtgaaccacaccagaacctgctccccttccgaactcggtttttccctcgtcaacgaccgggtgagacccaagttgccctcgctgtcaccgtgacgttaatttgccgcgggcattgctggcaagaagacgcttctcagtggagcaatccagtccgattgcgagagtgacagaagcctttctgccgccccctgaaaagcgagaggataagtggtttcgtccccagaaatatcacatcgtcacgtgtgccgttagccactccgtctgctgacagccacccgccagggctaggggggggggggcgcgtgtcttgtagtttcggcgcgacacctgcatcctcccctgtagctcaggggacctattctgtccttttccgaataggttttcttgcagatgcagctttaattaacgtggtgaaaaaaagactagttcggctctggtcggggcgctttacctgtgttcctcttgacttcgcggtaaagcactactctctccaggagttcaagagtcgcccgcctgcatgccgcttcgcctctcgcatgcctgcgcgcttcgaccctcgtcatccatcccttcactgcgccacgatatccttcgtcagatctgtggttctgctagctttcttaacacacttgtttcgcggtttgagtgtctctgcatcgccagagcatactcggaaaaagcggccgctctccttcaagaaaacggataggtgttcgcggaggcgtgctgccactgcctctggctagttgacagaccacggggtggtctcgtcctttccgtatcagcctttcactagacgcgaatgtccgcccgagcagctccgtctgcgctcccacctcaccttgggtggcactttagcacactgtcagtgcacgcgttctctggatctttgcgtctcaactccggccgagaggctcaagggcgaagacacacatggaccctccttttccgcatctccccaaagccccatttctccggattggttcccattcactcgtcctcgaaacgtcgccaagactctcgccttacgcggcccccccccaccgacaatacatgactgaaatgaataccaggacagataagtagaccattctaccaaatccactgtcactcacactgatagttcgacctcagttttcctctgtacccagcgacgtcgagcgtgcccctttgttccccaa

SEQ ID NO: 758 - DNA, 4060 bp, Toxoplasma gondii
  source 1..4060: mol_type = genomic DNA
gaagccggcctttcctcttggcgtgtcaggtgccgtgaatacctacgatgtagattcagcgatacgcgatgagaccgactctctgatacagtgacacaagtctagttcgacgaaagaaatgggaacgctgatacgcacggccagtggctcccggcgtctccgagtgaggcagagtttcagtaattctctgcagcagacgcaagcacttcacaaaaaaaggctttttgccgaccggtgtctgtaaatcgacgtgaatctaccaacggggcagccagttagcttccaagggtgggttcgcttgttttttgactgtcacgcgaagtcgaggcgggtgattggaggtgtcgcagagaggccgcgatgtgcctcttcagcacgggaaacggacgttttttgtcgccggcaaagacggccgttccgtgtatgcaatcatccaggatccttgagactctttttaacaggtgggttttcctccataggtgctgtcctcgcagttcacattctgtggtcctcgctcgccagcgcgggaaaactgaagctaagactcttgtcaagaaacagagaggactgacagtctgcaaataccagtcaagggcagccctgctgcatgggtactgcacgcgccaagaccccgaacacggcacgaggacgcaaacgttctcagcctagaaacaatttcctgcctcctgtggacaggccgctcacatcgcagttccacgcttgatcatggagacagttcgaatcgacatgaagacaataggaaatgtggccgcgagagttcttgggcttctcagtcttcgcagctcgaggggctgttcgcgtttcacattttttccacctatttctttagacgttttatccactctcgcatgcttatctgagcacactctgcagttcccctgcgtgccggcagtcctttgtgtcggcaatgtcgcaggaacaaagtcacatctaactctgcttttcaacagcctcgtgcagactctaggaaattcactcccatccaacattcttgtggagcaaacgaagtattgcccaggttggctgcggaagaagaacactggcgggctcatggcggatagacacgaagcccctaactttggcggttctggtcatgagaatcgaaaactcaaaaaatgcgaaagatctgtaggcagatcgttaccgcgttgcatgtgtggcgtggaaatggccggtgacctcccaaatccagagttgctggctgaagtgtagggtcgcttcaaaagcacgaagatatttgtgtgacaaaaaatcgcttttcatccgtgtagtacaggcggcgacgattcgtgcgtcgaaaaactttgagtgtcaggagctcggttgccgctgtaagtctacgataccttgcgataggtaggagagagctgtcgtctttacagctagtaggccgtttatgcgttcagtttggggaagagactccgaccacgggactgtctccctctttaccggaaagtcttgagcggcatcttttccgtgtccgagctattgtgtctgtaggaagcttcacgcattcatcactacgtcgagaaacaagaactgtgcacacgcaaacagtgtcatcttctcgcagcagaaatgacggttaagcttctgagtgcagagaaaggacgaaatgacgaacacttcaccatgacagctgcgacggatacgagaagtgcaacaagatgtcatcctttccttacataatcgatccatactccttccctgttccttccctcttgtttgtgccacttctccctctatccatttttcagagtcttctcatggggacgagacatgcatgcgtactcacaccaggatcttcagctctcagcaagcttccaaaaaaccaggggatccgtctgctccccatggattgccagagaaatgcacctacgtactccccttgccaaaaaggagagtttttgtttcctaggtttgagttacccagttctggatcgtagctcatttgcacagagacgccctctacttgggaggtgatgtaattaaattgcatcgtcgagctatggtcttcacgttcttaaggccagcccctttgtacggaggatatggtaacttttactaccaatcttatttattggtaggaacaatgaatctccaagcacttccaataccttgattgcttatttgccgctgtactccttccagcttgatatggaccgaaagcaacgaacttcaactacttgaaccgacaggaaaggctgcattcgttgctctgaacgtccagctccatctggaagacaagtatttcctaagcaaatggtggggagctccacaaatcttggatgaggtaaacgaagacttctgacatctacaccagtagtccaactcgtcgtgtagactacggaggggaagcttacgaacaactatgggggttgccggaccggtcttttgcgtattccaaaccaatacaaatgtcagtgactacggcttccaagcaacgctcttagttgtcgtagccgagaaatttgcccgtgcgctcccttccacacggacaatcatcacttgatgcgcccgaaccagggaacctttttccgtgctatgtgtgttctaagcctgcctccaacattttccctgcagtatcggagggccgcagcgttctctgaggcagcagccttatgagttgagcgaaatctgatttctagaaaaagatttaatcctctctacagaagtggaagctcacgcaggaacgacttcgataatccaagcaatgcaacgcgcgcctttacagacagaaaactcacagaggcagagcgtacagctcgtggcactttcggtcctaggtcgtagtggtagactttttaacaccctgaagtcgaaaaatagctgtcgggcgttgcttgtctcatcatagtgatctgcatgagcgccttgcgggggagggggtgtcttcccagtatagtaatcttaaaaacgccgtaaacgcgcttcgtcgccgcaagtcaggtgtgctgtcgtctctgaagaagaggtatcgcttctacctcgctgaaactcacaaccccccaaaaacacgcaaacaccgactttatacaaacacaacgaaataatgacaaccatgtgcgcatacagtctccgtctgaacaatacgtgtatttatatatgaatacgtgtatgcagagattcaggtgtgcaacgctggggcctcgcacgagaggtgaagacatgcatgcttttttctcagaagaagtgtgccttgttgggtccgccgtcccgtgagctagcgagacaatgaagaggtgaaaattcccattttgtgcgtcgatgtcaacaggtcgtcgtcaccgcttttgtcgtttcgttttgttggttctttgccggccgttctcacgggcgatacgctttccttcctctttgacttgcaggcgggaaagggcagggcaacaagtctggttcctggcggcattctcgcgtcttccgtctactaaaatcgcggaggaaagttcatgcatgtcgcttggagtctttccatgttttttcaaatgcagaagatgtaaaatccgtcgaggaacgtttggcttggcagccgaggtcttggcgtgcgtctcgtgaaaggtttctccatccaaacgcactcgccagttccctgattttgtccacttcttctgtcacaacgaaccacgtcagttgtccggtctgtgttttttttcttcatgcaagtcgtctctagacgacctgctgctcttgtcactcgaaaatgctgagaataatccgtggtgaacaaggtccgcaggggtcgctaagttgacggagaaggtttcctggctcatgccttcttccgcttggttgcctcgtgccttcctgattcttttctcttcgctctctcttcaactcaagcctgtgattccgcttcctgtgaatttcgctgtagaggcttaagtctgtatagtttcaccaacatgcatttctgtatgagaggcgtgtgtcggtgctcctgcatgcagtggttttgttagcccctgcggaaggtctgagtaacttgtttcttttctcggcagtcggtcctgtacgggcgtttcctctttttccggaacga

SEQ ID NO: 759 - DNA, 2363 bp, Toxoplasma gondii
  source 1..2363: mol_type = genomic DNA
agcgagtgctcagagactccttcgaagggatccacctcttcttcttccgtcctctgcgcgcgctgaagagacttgagcaactttgagggaagtccttcttcttcacctccttcttcaccctcctcttcctcttcagcttcttcctcttcagattcttcctcatcttcttcctcttcagcttcttcctctgcacggaggccatcccaactgtcagagaccaggtccttcatgaggcggcagatcgagagagcgtcagatgcgtctttgtcacgagatttcttctgtgcggatatcattgctttccccctttgtttcaacactcgcgctttcgaagcgttcgcctctccctcttcttcctcttcttcttcctcttcttcctcttcttcatcttcttcttcctcttcttcatcttcttcttcctcctctttttcttcttcctcttcttcatcttcttcttcctcttcttcatcttcttcttcctcctctttttcttcttcctcttcttcttcatcttcttcttcctcctctttttcttcttcctcttcttcttcatcttcttcctcttctttttcttcttcctcgttgtcatccgcctgagggccagccgtcagccacggcgttagttcttcttgctccttctgactgcgaggcggcactcgccgcgctgtcctgcgttcgagcgccatggaggccagcaggatctgcgtaaggaagggcgagaacgcgagagaaacctggaacgcagagaagtcgaaagagggtgccgagacggagtcagagggagagagcgaaagctgcgggtgccggagaaaagacgcctgcagagcgttttctctcgcagtccagactccggagaaggaacggcgttcccctggctctttttcctcgagagaggagttgctgcctggcagcgacctgtcgtccttctatccttgttcgttgcgcgcctccagagagtgcatacgataccgacgcagagaccttcagtcttcgaagcagcgagtgagtgaagcctgtttgcgccgcagaaaacgcattggttctcgctggccgctcgacacccagtagtccgtctccggtttcgcctgcgagacactgtcgccttctgcgaagtcgagcgccgcgcgtcgttctcgtcgggaagcgcagcagatctgggcgtctcgaatcgccagaaacgcactcaacggaggccggagagcctcggaaagcggcgaaaagaaaagaacctttagctctacacatcacctcccagcaacttgctcgccgcgcatgcaggcgccgcggcctgagcgccaggcaccccacagagaggccgcatgtgaccggtcgcgcgagctctctctgcgaggccgcgggagaggcgccggtggaacaaatgcagatggactctttgttttggcagcgtcattttgacagaaaaagtgaaaggaagtttcttccatcatcacgcgtagaaagcctccgccttccttgtcgcacgctcggccctgtcgacggcgcagtacgcgagcctctacccttttgttgtctaggttttttcgcgcggcctcgatttctgttcgcctcgcgccggcgacttccccagttcccaatttcttcttgtcgaggaaaagtcctttcttcgaccgaagcgatctcttcgtcaattgctttgccgagcacttcacccgccctgtccgctgcagccccgcgagtctgcgctgcccgcgaacctcgaaaacagggagcgttttccagcgaagagaaatcctcttttccgcggatcattcctcccgacgcgctcgggcgcaggttcaccgcgttgaaacttcgtggattttgggtctcgacggagcgaatttctcgctcccgcgcatatacggccgtcgcgggctctctcccgcaggaatctgcccgcgttctgtgctgtcgcgtttcgccgacgagagctgcccagccagcgcgggggcgtcttaacacagtaaatcaggcgcgcatctcctcactctccactttcttttctcgtttggcagcgctctcgcctcttgggcggactctaacacatcgccgtccgcaacagcatgcgccgctttttttcgcgcagtcctccgtctgaacagtctttgttgacgactggtctcgcagagtctctcctccacctcgtcagtccacggatcgagatctctgccgagttttgcctttctaaaaaggagaatcgattcgctcttgtccctctgacttcctccttcgcgctgcccagcggcgtggtgcgtccgccggaacgactctcccggtccaggtcgactctgcactgagaagtggaggctgagaggccgcctgtcttccgttctccggccgctttgtctgctctttccccgaga

SEQ ID NO: 760 - DNA, 3833 bp, Toxoplasma gondii
  source 1..3833: mol_type = genomic DNA
ttcttgctcgaagctcgtcaccttctccttcgactccgccacgttcacctggtacgacctcaagtactcgctgtacccctgttgctgactttcaaacagtgaaccgactggcgccgtactcagtgcggtgtctgcgcggctcaagagctcctcaagctgcgccaccacatccgctatctcggcggaacgcgtcctgatcgcgatcgccgcctgcgcgccttgctcctgcgcgaggcccgcgtgctggaggacgaggaacgccttctgaatcatcgccttgtccccgtccgcctgctcgagctctttctgctcctccgcgaccttgtcgatctgctggtcgatggagtagaagttcgcaccgatgaactgcagcccctcactaagaaccgcgatgcccgccttcgcctctgtcaacagtgcgctgactacttcgtattgtttcttcccgtcctcgaaccggagcgtctcctcctgcaactcacgcagcgcctggtccagctccgcgtgctgctgagccctcaagtgactgatcttcttgtcatacgtcatcttgtgctcctcttggtactgcttcagtcgcgtgttcgcctcgtccacgatcgcgctcacgtccgcttcgtggcgggccttcaacgctcgcagcctctcgtttgccgactcctcgaatgccctgtctcgcataggcactgccaccaagctcgatgcagctgccgggaccccctccgcctctggtttcgacgcctccttcgccgggctctccgcctggggtcgtgcctccgccccggagcttgacgcatcggatcccgtcggctctgccggcgcgggcgcctcagtcgcgctctctggcgcaggccccttcctggatccggagtccttcttcttctttttcatcgcttcaaagcgacgggcggccgctttgtatcgcgccggcaactccacccgcttccccagtacccgggagaacagctcctgcgccgcgagcaccagatgaacacctcgttcctggtacgcgtccggcaagttaccttcgttgtgaccagctgcctcgacgagctggaggtaccggtcgacctcctccgagagcgtctcgagctccaggtggcggccggaccgccggaacaccgacttcacgtgttcgtactggagtccgaagaccgtgcatagccagcgcgctcccgtacgccatccctggttcgctgcgcgcttcattgaggcgaccaaccctgcagcctcggctggctggagtccagagaaagacgcgagagacgcaggggcgggagacagggagggcgtggagatggcgacagcgaaggccgccaacgagacgaccatgcaaccgagacgccacggccgcgacttcgacgcgaccggcgctgaaggactcccggcgtcatgcgaccggaccgcgccggtactacgccccccgctcttcgccatggtcttgtgggacatgacgaccacagtgtggccgaatcaaacgattaccgcggcgatgacctgaacgcaaaaaagagacaacagtgctcgaatacaggcggcgtcggaggcctgcgagactgtcggaataatccgaacggaacagcacggaggcgccaacgggaaaatccattctgaaaaaaattgaacggagaagatgtcggggtcggcaactcggcgggcaaacagaaatgtacgtgtccgctggactgcgcgcgagtgcgtcggacggaacctgcgactctggggggcggcacaaacctcctttccacggtagcaaccacctggatgcgggaagaagactcactgacaatgcggaaacgattgtgcaactggactacaatgaaattgccctttctacgtggtcgaggggggttgcggggcaagagagtgggctaccctcccttcggggtccgaattggccctctttccgacgccgttgctttttgtatttcgtatggcgcgctggcattcacgtccgagcgacgaaatgctaggtgcacacggaaaatcggggaaatggaaaaagcaaactgccaaaatctggtatgcgctcttccgcggtgagtgtggccccacttcgcgtgctaagagtgtgagttcctggctagaaagaccacgtgtacatacacctgaaacagatgtgcgtatccgcttccacaaatcattttcacgccagaaaattccacgtcgccggtcatcgaagactgtgaaaaaatatccctcgcggtctgccgcctcacacccgcttccaggttctcgtctctcgcggtctccagagcgcggtttttcccggtctttccgatttcagtagaaaatcggagaaacggcgtcgtgcagggacacggagaaggcagccagaccaacgctttgaagcaacagtcagagagaaccacgaggaactgcccgagtgaaagctcgaaaccggcggttcgagtgaagccccgaaccagtgctaagcacggtttaggtgcgcaatccagtgcctacctgttttgctagagtttcagaacgaaattgtctgtgcttctgcttcgtttcagaagccaagcgcggcgcgtggccgtcctctcgacgccttctgtcgccgaattgctggaacaagtggcggcatccgcagaggacgggaactgcgattcccggtagtttcacgttgcgcttctcccgttgaggagacgcgagaacgcagcgcatggattcaccggcattcgccaactcccacacaaacaataatgccaacgagaaagagaacctgtacgtagtgtgcaaaaaccgagaagttccgcactggaaagtccgacggtacacgtcaccgcagtcgccagcttttcgtctctctaccacattgtcgattcgcaaattgcgtctgcagcgtactgcagcggaaaccgcggagagcgcgccccattcacgctctgccgcaacttgcctgtcgacagctctctctggaccggctgtccacgctgccttgccggagatcaggctcgctccctaaaaaaccgacttcgagttcgccgtgtatccgtcgcctcacaaccgctggcgctgcgacggcagccctggtttctccttggctgaacccccgggcggcagacctcgagggcgatagaaagacgaggtgtcgaaaggtgagcgtctcgcttgcaggtctaaaaagcctcgccgaaatgaaggctatccggcttgtctgtttgcggtaggctgctaaaaatggtgtctgcgaggctgcgcatttgtgcgtatgaatacccgaaccattttatggcctctcgagtgcctctcagtctcgtggcatcattgtgtgtgtgcctcattgagaaacgcatgcgcgcgcggctgggtgggtgtcggtctattttcgaggggcgccggtatttaaagtcacagctcgcgctcggtctctgtttagggggacatgacctcggaacatggccaagatcatctcgccgtaaaggtgtggagagaggctgaaacggacttttggaccagccactgcggatttagacgttaggagaaaccactgggacgaaggggacgtagctccagttcctggggcgcaccggcgcgccgcacacgagactcttgcggcggcagttcgcgtggcaaaattgcgaggctcggcttatactcgaaacagggatagaggggagggatccagagagaggggggaaaggaggctattcttcttcctgctttgcccgcaagaaacgtagagtgtggcggactacatacactctactggccgcgccctgctggagagacagtgccggttccgtttggagagatttccaggtcctcagccacttaccctttttctcttctctgttgcgcgtcctccgcttcgtcttcgtcaaaaa

SEQ ID NO: 761 - DNA, 2396 bp, Toxoplasma gondii
  source 1..2396: mol_type = genomic DNA
tctatatctacctgtgtagatttgctcatgtattcgtgtatatattcgtggtgtaccggtgtattcatgacggagaggttttttcgcatccatcagtgtgcagtgatgcttacatgcgattgtggggagggtagagctgtggcctttctcagagacttctcgcattctggattctgtctcttcatggtcgacttttcttgcgacgttgaggtcatacgaaagatctaaaccaatagcccttttcgtagtatcttgaaaagaatagggatgcttagataggaagcaagctgaaaatcgaaacgcctagagtgtcaacagaggaacagcgtctggcaacgttttcacgggtttcctcgcccatcgagaggactggctcttattcatcagtggcttctccctctagcttgctatccttcttggctttccatctttcctccgactcttctccgtcttcgtcacgcacaaactctagcgtgtgggcgtatcgtagtcaggttgcaagcagtgggcaccccgatttttttctctctgaaactgcgttcaccgaaagtcaccaaacgggtgaagccctctcagagctcctgtttctgcttgtttagtgcgcatgcagcgatttcttcatctcgagccctgtgctcgcgacatgaacatttccacgccaagcacgccctttctccaagcacaaaacagccagtgctgtcgcgtgctttcacctaaccgtgagactacactcatgtcccccgcctcatctactagagacatctatatgcagatatatgcatgtttatatacatatatcaatataactaggtgcacatatctgtgtatgcctatgattgtatgcattcgtgcagatttaagtgtacatgcgagatgaaggcggagtggaaacttgctgcggcgtccggggtccagtaaaagccggtccgcagaatccgacaggcactgcggacgtcccggtggtgtgtggtcatatcgccatacacccactatatcaacactaaaaaaacagggtattcatgtgtgtgaaaagcacacaatttagtccgagtttcctctcgtgaatctacaagcatggatgtgtagcccagaccgacgcccgcccaccacgcagacacgtagggaaccagggacttgcgcacgaatctgaactcaaatcgaaatttgggtatccttgctgatgatctctttcagaaaaggtctctttcacatgcactgcttcgcccctgcaacctcccgcagcgtcggtgtctgtggcacgtgcatgcacgcgctaaaacgtttacttgatgtccctttgtaccccgacagaaccgagagtcttccactttcctctgtgttcttcttcactttagttttgtgtctggagtgtccctctctctcctctttctttttctaggtgatctgcatgcgacagcccagtccgctctgatccgcaccaagcggtttcgtctgtgccggttcgtggcactcgaacttcgcatcctacgacatcaaatttattccgcgtcggttacgtgcagtacgcttcatatctgtatctgtgcttccagctaaattgaaagcgggggaaagtgccaaggcggagacagagaaaatggagttttcctaacactctcgacacgaacgctggtcttgtcaagaggcgaggcggaagagaccggagaagtcgttcccgtttgggagagtccgtttagcacaggagaaacgagttctcttcaagtccttgcgactctaggtgttttggctgctgtgtttatttttcgtctcccaaatttattctaaatttgaccgtttcctttcttctgtccagacacctgcatgtcgcctcgggtgctcactcggtgctgcgctgtgaatcaggccggtggtgatttgatcagcgtctcttattggatgtgagttcccccacgtttattcgccctttccccttcttttacccactgtttcctctcttcgttcttaacaagtttcctttttttacccgcagcttttcttcctctgtatccacggtcttttccgctcgattttcctcgcttccctttgagactgaaaaccactttccctccccaccaccttgaaccttctccgaagaacagcgccgtctgcttcgtcctggagttccacgctcgcttgtttctctttcgttttctgtggcttctcggatttgcgttcgaaccttttctggggccgcctctttggcggttttctgtcgagatgttggtgtcggagaccgcgagagtcgctgtgtacgttcaccttcgcgtccgttgaatctgcggcgcgcgtgtcacttttcttctgaggtcttctttccatcttgttgagtctgcggcgtctcacttgtcctgtgcctatcgccgaactcgcccttctctttcgtctcgctctgaaaa

SEQ ID NO: 762 - DNA, 1644 bp, Toxoplasma gondii
  source 1..1644: mol_type = genomic DNA
tcaaaggtccacctcggtggtgcgactatcaggcattccgagagctgaaggcagctacagttgccgcttggcacgttgcccaggggtagaggaaacatttagggaaaggaatttgaaggaaccggcgtgtcataggcagaagcgggacgacaaatggagctctctatcttgtcggctacgagcgctctgaacaaagacggttcctgaccgcgatgtaacgtgctgtctagttcagtgacgcagctggtctgttacgaagatccacgtttttctctttcacgtcattttttgtcttcggtcccgcagttgtggaagcgtcacgtacgtagactgcaaaagtaaactggtgttagcataagcagttctcgatcttactgatgaagtcatcggtagagtctacgaataaagatcactaaccctgaaccttaaaaaaacgagaagtggagaggtcgcaaggtaacaacttatggaatattccttcattgttttagtcttttagtctgtaacaataaatcgtaaagtctggaatactgtggcattcggaagcaatgtcacttcgtttgtcgacagtggttccagaatttgaagaactgctgggcggttatacctttccggtgtcgtctttgccaacgagaaaaacgtcttttactgtgtcgtcaggaagaagtgatggtgtgccagttctctttcctaagaactctcttgtgcagtggatccgctcgtgaaaattggaccaacgagcctaggcagaagtgataggcatcgatactcagacacgggttcagccactgaatggaagatttgtgttctggcgcctgacgttgtggctcatctgagaagaacgggtacactcccgtttcacaatgcattatgtggaagatgctctgattcgcggcgcaccagcacctgcttgcagaaagtacgtggtactaacggagcatttgcctcagcccgtgtcgtctttccaagatctgtctggcaaaaatgcagcatttcaaacacaaagatcatcgcttgaccttcgaattaaattatgcgctaacccagtgtacgagggctttgttggttccgctgagtttcatcggcgcgcgggaactactccggggggcaaaaagcagcgagcgatgcccttcctcagcagtcccaggtacttttcaaagagtatgcgagtcgttgaaccgattagaatgtctgattttgacgcaggaaccttgaaaaaccgattcccctcctaggtcacctcgagtcctggatcaagctcgggtcctctgtgcaggcgttctatattaggtccaggtagatgagcatcgcagcatcgatttgttcgctcttcgcatgcgtcgatgtgtgctctctcgcggctgacggggttccagcgtcaccgccatcccatttcacagtaaataatctggatcccgctttccagttccactgtatctcgtattccacagctccccgacgaccgtctgcctccaaggcatctttatcacgtctttccttcgcttattcgcaccagttgacagactcagcatttctgcccaaagtttgtgtactcgcggcctattttttgacttgcttgcagcgttctcagtcgttctaacttggattcttgtgctctttgttgtcggattgctatctgaccaa

SEQ ID NO: 763 - DNA, 4563 bp, Toxoplasma gondii
  source 1..4563: mol_type = genomic DNA
aacgagagaggcaaggaatgaaagcggacgcaccttgctgagacaaagtccaatagttgttcgtataccagtcgagttccagcttccggatttccacttgccgcttagccacggcagtgacaacctgattcttgtagagttgcagcattgcggtggataaaagggaggaaaacaaaaaaagaatcgcagggcgactctgcgacaagagaatcctctggaagagcaggagatagagagaggagacggggatggcacagcagagactgggcaaggcaaggaagcaagtgaaaagcaaaaacagaagagggaagcgacgcgcagaaggactgaggaaggatgtagatcgctgtgagaagacttggaacagaaagtatcactagcggatgtgatagaggagacagagatcgaaagaggatgatctgcgagctgaaagagatggagaaaagcaggaggcgagaggcaacgagaagagacaaactcgaggaaaacagacgaacggtcatgaactccagtgaaactggctcttcgaagaagagggggaagcgcaagacggccgcaaagaaaagtttttcatggagattctcctcctgcttcgcctctcaatcttcttcttctccttttcctatttttcgttctgtcttgttcgtcttcgttctcttctggggtgcctgcctgcctgtggcaaacgtaaagtcgagagcttggagagggaaggcgaggtcagtgggtggagaaagcggcgagtagcgactgagaaaaaagatgttttatgattaagaggagaatcgaaaaagggatgcaagataagtcacagagagagggaaaacgagccgctgctgtgtcttgagagtctgaaagctctcatccgcgagacgggtggagaaaacgaggaatgaacgagagaaagcgagttccgaaaactgaccagcaggcgtttggtcccagccaggcgcacctacacctcaagaagaaaaaaaagacagcacaaaaaggagcaagagaagaaaattgagaggatctgcttcacttgaggtctctcgctgtctccactctgcgcaaaagggcgctcccttttcgcgagcgtgtcttgtcgaaatttctggggtgtacatacactccagaaggtgaggagcagtcgttttttttgcagcaagaagacacaaaacagatacttttcaagaggtgcaaacggcctcttgctctccgagactcgccgcagaatgcgccgctctcgaacggcgcgaacaagacaagaagccgttgaattgggcctccctgcactcaacagtccgatgcgaagcgcgagtcgaggcggggtgtgcgtacagctcgcgagtcgcggcgcctggaggagaacaagctcgctgcttctcgcagttctatcgaatataaatgaagaaaaggaggcgtttgtggcgctctctgttgaccagcgcgaggcggtgcaaaagccgcgtcctttgtctctgttgccttccggaaccaggaggtagcaaacgcgcggaggcatgacgcgaagaacggtgatcctgtcgcaacgaagaacggaaaaatattgccttttcgactttcactcctctttcggatcccgtagaggtccgagtctgcttccgaggtcgcttccttcgaatccgagaaaaaactcaacggagttgcgtcctctatgaaacggggcgcggcccccatctatatacaccgacaagagcatacgcagtggaacaaatacgcggatctacgcctttatatatacgctgattcaatctgcaaaccaatatccctgcatgaatccaagacagagacacatccattcatttacatatataaatatatatatataaatatatatatatataaatatatatatatatatacagaaagagagagaggcattggagtgacagatctcccaaaagtatagggacatgcatgcgagaggtattcgcatgtgcatctgtatatggctgtcgacgaggtgcgactttgtctacgtttgtgtgtttacatgcgctgcagtgcgtccgtcatgcagcagggtggcggtaaaatgcgagtggagactcacaagaatgtacgaagaggttggggcagtctgaagaagattgacaagagcaggtgtgtgagacgagtcttgactgtggagaaagaatgggtcgtggacctctgttcacagagagtcgatgcaatgtggacgtgagactgcgaaaggcttcgagaaagtttatccggggagagtcgacgccgagttcaactcctgctggtccacacccccctgaaaaggcctttttgcctgcgcaggactcgagtcaactgcgacgaaacctgaacgtttgaccagacaggaaggtgagtggaggcgaaagacaagagatttcgcagaaaagcctggccgggagaaagctgcggggaaaatctttttcaccaatgagtgccttctccagtgcatgcccgcagccagccgtcagcccagccaggctcttcttttttctcagcaagcactggcgagattcgcttctttgcgtttccttggtctctgctctgcggcgcgttcttgcaagttttgtgtctctctccctccgttcatgtctgttccgaggccccaactcgcggggagatgtgaggcgagactggcgttccgcatatcgagctgcagaggcagatcctgcctcgcggaggacgtgtgtgtagacaaaaagatatcccagagcatttcctagaaaggaaaatagactgctctcggatctggaaggcagagacaacttctcttttccatatgtctgccgctcctcacaccgtgctacataaacgacacagcgccgcgcatgagcaaagagatggcgatacgagaaagcaaaaagtcgtcacgataagtacgaagcgaggcatctcgcggttcgactttccctaggcatctgtaaaaaggcgtactgaaagacgtacagcggcaaagcgactcgcggcaggtcgtctgtgtagccgaaagaaaacttggctttgtttgccaggaaagaacatgcagtccactctgatccgctccgacggttcaacgtgacttctgtcaactcttcttcttgtctcctgacgccgcgcttttcgcctttgtcacagagctctcaaacggcgaagcgcgggggagcctgtttggcagcagcgaggaacagagagaaggctctgcctgaccgcgttttcgacttcttcttctccactttctccagagaacaggttccttctttctatccgttcctttctcgggccgacaggacacaaacgcgcaccccgtcaaacaaatatttaaatgaactcagatctaaatatgtgaatgtacatccacctgcacatctgtatatttttatgcagaacatgctttgtacctgtatgtgtgtacatgtaaatgttcgcatgcagatgtgtgttacatttgtttgtgtctggttagaccaaagtgtatatctgtgaatgtacaagtcttgtaggaaggctttgacagaacttgaagggaagcgtgagccgactggcgcgcgaaagactggcacaaaaagcagcgagctggacggagcgcaccccgaggcgagattgtcgtttttcaagctgtgtcgagcggaagaagggaactgcgttgagcgagtgttcgattcttttttttcttgtctttccagcacacagcaaaggccctcagaagctggtatgttgctgcaacgcgaaaagacaatccaacgttcctctctcagcctcctttttcccgtcgttcgctgggcatccgccttgcccgccgtcttccgggggagctgccgagacggcctttcggggctgcatcgcgcgagagcttcgtgtgtttcgtcggttgtgtttgttttttattgagagattcgcttttctttcgaaacaagaatcgccagcgacgccgctcgaccttttcgccgtcgccgttgcatgcctcgttcccgctgtgtgtgtcgtgtggatgggcgcagagatgcccctgcggtcggcaggacgggggggacctgagatttttcacggcgttttccggtgaacagtcgaggaacctttcgaatttctcggaactttcttcagacgggatttctgcaggtgatgtgcagcaaaggaaaccatattctgtcgccagtctcagctcaccgagagcgaagctgacaacggggagattcagctagtgatacgctggacgctctgtcgctccagaaaggtcgccttctctctcctgtctctcgcgtcaacatttcttttttcttgatccccgtctgacctacatgcttcctcgtcttcctgttcacttgttgccgcagctctccaacggcgtgtgtctgccttccactttcgacgaagacctctccttctttgccagccatcgatcttcaccagaagctgtgactcgtgaaaggtcgcttttctctgcttcttctcgctctggtgtgtcgtccaccggttcgagctgagttctccctccccctgcgtactgccgaccttccttttgcctctcgcctgtggatcttcttggcctcccgtcgtctgtctcctcgcgcgcctcttgtctggagtttcgcaaga

SEQ ID NO: 764 - DNA, 4941 bp, Toxoplasma gondii
  source 1..4941: mol_type = genomic DNA
cttccaagtacatgccgtcgtcatgccaacagtggaataaaacgtgcaacaccaacatgggtccctacctccacctgtgcagtgttgtggtcgcaggaacttaaaaatacgcgcgagctcgtgtccagccgcaacgtaggcacagacgcagaaataattgcaaagacgagcgaaactacctcgtaagagagatacaaataaactgtaagcccaccacgagtcgcctttccaccactggtcgtccactgccttcaccagtggaggatttctcagccggccaccaaccaccctggctccggtcaagctgtccagttcacattaatgtcgaagcagtggtcgtctctctggattccgctctcaccgcccgttagttcataaaacggcagccatgatggccaacactacgctcttcaggaatgttgctgatgaccccgtacgagccacagtgccgctagactttgtttgtacgacacccgtcacgggcaccaacttcttcctcgctgacacaacaacccggcagatgttcttggtccgaatgtataaacaccctagcttgatagtttttgtttctgctggaaatacactgagcggaatagtgaaggtcatcccttcgtggggtttcgtgggatctccttcccaccaagtgctggagaaatcgtcgaagaactctggaccgcggtaatctggaccctcgctaaaacaagcttgtaaagacgtaagaacagaacaaaagctatgagtgaacacgtcggcagaggggacgagaacgcctccatcagcacaggcgattgaaaaggaattgcggccctcaaagggttcgaggacgacatgaaagggaccatagacagacgatgtgcatgttacagactggcctaccacacccccagtcctttcatgttcgctcggttcggacctagttaccacagatttactgcccgtctcaaagaaagcggccacgaggggcaagaaaaaaagacgagccaagcaagggcttaagcaaccccgccggtatcctctgtgaagacgcgccatcaacgccgctccgcaaagaagtacccaacctgcgtctacctctcttggccgagaactctgcctccgtacaccgggaatcctccttgaacttcgaaacgcagaagaatcagttgctgcgtcgtttcccacaatcgctggaattgagcttgggccgcgaagatcagctaggaagcgaaaacagcgaacggggactgtggtgattccgcttggccttccggcccgcggatagatactctgtcagtttctggtctgacatacaggaacgataactggatggccttgagagaagtcggaatgtcggagccggacccagtgcagacagccctgttgcccggcgcacggttcgcatgcaatcagccgttgctgagtgggcacacttcttcgtcagggtgaccgggcagcagggttcgctggtcctagcattcgccacgactctagcccccggttgctttggcaactgcagacaagacatgctgcatggtgtacgaacccggtttcgtccaactgatggatactgacgttgtgcgacaagcaactgcaaaagcgagtttctcggtactttccacacgacttcacggccctcaggaggctactggcagggctacttcaggcagactcaaatcttgagggtgctgggacccctgcgccttgcctcttcactcctcttcttcgtcttccatcaaccccgcgggtattttctcgcgcgccatgctacgtgacgcgcaagtgcgcacacactgatcagtcagttaacagccaattgtaagcgcggatgagaaggaagacgggaaatagtcctgtgcagctactaaagtaacccgaaccccaaaactttcttcgtgcactttcggagttgggaccttaaaacggtcaactcacgactgccagtctgttcgaggggaatgttgcccccaccgaacgaacagaaaacgaatcccgagaaaagggacgaatttttttagctagcggcgcatacactgaatcagggtactgtattgtcgatgttaactcccagtctagacagtgatcatgaaaaggaatcccactccattcatacggcccggaagacacgaagcacggaagcagctctccctcggacgggtcgcgcttcattagagggcatcatatcgaagaaggatcataaactgaccgacacggatgcagaacatgcgaaaaaggactgtacatagagccgagagcctcgtacgcatatccccattttcagctatcacttgttctggctcgggattagtcgcattttcaggagaccagtcggtctgagtaacttcacaaatggttgagggaagtctgttgtacattacgtggggacggcatcctttggaaaacaccttgggacccaaggaggggaattagttcgccacatagaatccatcaggagacagactttctggagctgtatctaggtgaacatgacggctatacagcgactttccttcccctgtgtttcaatctttaaagggtttcgtatgcgtctcctcgggaatgatgtgtcatgaagtgcaacggctgtctctcgcaccggcgagaatccagggcctccaagcgtttccaaaataacgccagcgcctgaacttatctacatagacttctcaggtatttctgaacgatatatatgctaagaatgagataaactgcaggtgttcccacggttaatcaagtactacgctattcagtctgttgtaggtgacacaggcgcacacaaccaagtatctaacacctccactgtaagcatcgttacttttctgtgtagacgaggtaccaattgtagtagagaactcggtcagtaaacgccgtgcaagtaggtctgctttggtcaactcatagataccactggaaaatcctcctagagtaaatgacacgaacaccactgcgtgcgagacgttgcgggtatcgtagtttcgaggctgagaagatctttcttgagtaaaaaaaccaagttacgctaacaccgtcacctgtgccatgaatggtggcgacgttttgtggttcagaacgtgcgtctctatacaaacgttacgcgacagcttcattacgaatggatgagaggtcagattgtcatcatcgtgcgaactccctaactcagtaaacttccgtggaccgcagtgggcttgtttatgaccagccgactgtaagcacgaataataacatagtaacgaagataatttcaccttcgtgcaaccgttagggccttgagcacgacaatggaaacacactgtttctgggaatggcttatctaccattgccgctcgagggcgcagtctctttccgagtatatgtcaacgatttgagtgaatcatgaatctgacgtccaaaacttccctctgttgctctgacttactgttctcagttcataatggagtacatgccgaaccgacgtacaaagaacgggatgagttttctatttagagaagacagttttttgcttccgtgacttctggaggccccgacaacaaccagagaacgctaccaagcatacgctagcattgtcagcaccatcgtactgggacccatcacctctgagacaggatcattaataagctggttctggtgagcataaagtacgagttggattactggttcagaccgtttagctgcttgtttacgaatcaaatcacgagctggaacgagtccaattgcccagctttgtaaaggctctaacaaggtaaactgccagttccttcgccgtctatgtaccacagtacacccagaggatgcatcgcccgtggacaaaacagtgagaactggacaagagagctcgacttcatcggagttggaacgaggttgggcggctgccgtgcacaacaagagacgagtgagtttggggcattacgaacataaaactcatagattgaccatgttttgcaattgtaccattgcgagtagataaaccgagcatcacggaatccagcccgagcacatcattctttgccactctagcatcatggctcgccaatcttttacctgccacgcttctatggcgtggtcttgcccgcaagctggaggctcctcgcgaaagtcagagactaagcatgcgccttccttgatatgacgcatgctagactccaagaagagacagatttgcagggtatcctcgagcttagttctgtaaagtcacgtgacatagtggttttttcgtataaagactgcctctcgactgaagagtaagcgattgagccagtagctcgccgacgtagcaccggtgaaatcgcatgcgcatgcgtcacagggcatcgactaaatcagccagtttgctggcgccataaattctgccgtttacctggcaaggcagcagacggaaagctgctccacaccacagttttctcttctcttgctgtgtgaaatgctttttccgggacacaatgggctcggctccatcctcagaatctcccgatgccgatccgagctgatgtaaagacctcatatcttcaccgccatgagccggcagttgccccaattcgctcttcgggtttatatattttggctgtccgaaattaccgtcctcagctgcttggtatatgaggacaaccgtcacccgtgtcgcttcgaaacgtaagaggtcgctaccgaaggagttaccccaggctccgctaggcaatctgcctatagttgaaactttctcgagtgtagtttctcattttcttttgcctcttcggtagccttcgttgacggtttttcaaccaccgaatagtcgacaataagcttgtttgggacgcaaattcacaactgatttgagaccgtggctgacggtcgccatccccttccgcgccagaccctcgccccctgtaccccctgatgggcgcctgccctaaacccatcatcgcttgctcgaaacgaggcaccaggctatcgtccacgatatagcttcttcatactcgttctctgcagaaa

SEQ ID NO: 765 - DNA, 2535 bp, Toxoplasma gondii
  source 1..2535: mol_type = genomic DNA
cctgtgtgtttgcctttttatgcggtgttactttgtgcagacaatggggcattccgaccttccagccgtcgtcctggactctcgtggactggaatggcctcgtcggcactgactacccctgcggggtcggggcgctgcggaacgttgtcatcggtaagttggagcttctgtttgaggattacggaaggctcctttcacagaatgtttacaattgatgtatggcggcgggctctctcgtctcgttctgcgaaggcggggggcgttcacgcgtcgagtcgcgtagccgtttgcgcgtgagggcgagggtacgtacaccaggagataaagacgcgagcgcaaatccagctgtcgcgacggacatggacagcgagtcggttttgtgttaacagatgcgtccaaatgttgaagaatggtgtctgtctgtgtgatcagtatgggtgaatttggatagcgacacaccacacacgttctgcgtccgtgtttctgcctgcttcttgctgcagtcgagaaagatgaggacatgcctaagggacagaaagcagtctacgaataacttgcgccgatggagggaggagcacgctagggagaagactggagacaagcgatttggcggatgccagaaatggtagaacagagaacggtgaaagggaacctacagcaagaacttctccggaaccggagagacgctgggcatgtctactgcgagcgcgtgtcgccgttcggagctggacgtccaccgttctttctggttccacgtcttattttgcttgacaactgccgtggaaatacagtacatgtttcattttgttgctgttcgcctttgatgacgacgaaaaaagaacccaaattcgccggcagagtccgtatttcgaatggcgagaatggtgaagcaggcaaggtggggaacgtgtcttacggcggaaatgcctgtgcacgagcgaatggggtgtgttaaggctttctgactggaccattcggtagagtcctcacatggctgaaacagacagaaaagaagaccggattcttaacaactgggaaagactgctatttctgtactcacaccgttagtgaattgcagaccacccgggcaaagcgcatgcgtgtcacgtcgcatcccggcgtctgcggcagttgtttttcagccgaaaacaactccatgacggaggtttccctgctacccaaatctacatacttcggggagacgcagactccataaaaagaatacagatatgcgttaactcgggcacatctgaataattcatctgccaaaaagttgcagaattatttgccgacgaaatcgtgtactgcactcactataggtacacatgtaaagatagctgagtatcgttctatctacacaattcgaggatcagttggagctaactgttttccagatcttgccaatgcacatcgatgacggtgaatggtatgcgacactctcgggggggctgtcggttgcccgaccgaactggatttctaaacatcgaaagatttccttaactggatataacgtgcaaatgcggtggggacagaacacgcttggcatcgtgtggtacgtccccagatatcctttgcgcgggaggcgacaccaggactcgggtgactcaagaactttcgtaccacgttgcgtgaacccaggattctagacttcttcctctgttatgcagcatatcgagattctggaatgtggaatgtgtagctcaggaaagcgtagcgttttgaggtgggctgtgttgcgatcatcaagcgagaaacgtactgatgctgaactttgtcggttcaacgtcactcctttgtagctcagacaatgccggtaggaaacaatgaaggtgacgctcatcggcatcttcaaacgacagcacgaatagccgccgacaactcacagagcaggcgagcactggtataccttaaaaggatcgaataaagtgcttatcaaccctagtgctaaatgctacaagtcgtttctttcacgctggagccctccaaatcaacctctcgtttgcctcgttcaacgacacgccagttgagcgcgatcgctggtcgtagaagtaatgcaggagaaagaggagtttggggatataccacccgtgttggtcgagtgatgcttgagaagcttgagttgtgggatattctacgatatacagtcggccagggtcttccactcagcctgcactgtagctgagcaacaccggtacgcacctagaacacccgagagaaagcaactgatcctgaagagccacgcgttcgtacgaaaaggacttattttgacaggctgagtaagcccgcggtaaagcctcagtttggaagcagcggaattcaagaaacaggactcgcctcacacgagaagcggtgcctgtctgcaccctttctccagacttgacagcattttttcgtattaaatgaacagaggcgtgacgtattcgatctggaatattcgtctgagggaaattacgcatcgcagacgccatgaaacaactatcgcgcagcctttcatcagatggtttcactgagcatgctgtgagaccgggctgacag

SEQ ID NO: 766 - DNA, 2386 bp, Toxoplasma gondii
  source 1..2386: mol_type = genomic DNA
ctgcagcagctgttccgtttcgtcgcttcggtgtaaagcgagctttcaggccgcttgagacccaaggagagcaacacaaggcgccgagcggcccggcgcctcgttggggcgtcggctgccagttgggcgcggagaccaggcgaggagacacgcccgcaggccgcgcctccagagagaagcgcggagcctctgcggcgacgaacaaggcgggcagcgcaccgaggaaggagacgaagacgcacaggcgcaaccagctgcttgtctgcgtctgcagatgagctctgagcaggagcagcttgagcagagaagtccagaagaatgcgagaggcaaatccattttccagactgacgcgccagccgagctacgacaggagaggcctcatggcggcaacgagtggagaaacgggaggcgagagagaacggcaagacgtggaggatgcgggaccgagatcgattctcaaaccaaagacgacaagaagcagcgagagtgtctcaggccgttgagaagaagaatagatggagacagtcctgacgaagaagcacacacgaaggggagaggcggaggaaacaggcgaaggagagctgcaggagaaaacaggtcatctgcgagagacgagacgaggccacccacaggagcggagggcgaaacgagaggagaccgaaagtcaaggcagtcgacccaaggaggaaagacagcaagccgagcgactctgtcttggcattgagcctcagagacaggctctcccgacgggtctcgccagtgtgaagctcactttcacctcaaaaaactggcctttatcgattcgcagacgtcgccgttcatccccagtgaagtggaagcatttgtgtcgcctccttcgtctctcctccgaccctttcaaggacgcctccaggaaaagtctctttacactttcctgccggtgtgagacgcagactcagtccctttcgctcgcggcgctctgcagcgcctcggctcgggtgtccacacaccgcctggcattcggacggggatcgcgcgagtcgagacgcttcgcggcgtcttctggaacagacagaaacacagaaacccgttgcggggacggagtttttccccagcatgcactcgaaacgaggaaggcaagtcgtggtggcctccgcgccgcagctggcacggcagcgaaactgcgccgcggttccggtgcctgtacaccggctcctcagaacaggagacagtttcggagtgcgaacttttttccgacggccgaaaaggcttttctcattcagaggctttttctcgctggctgtgtgtggagggaggacccacgcgggcggaacggcaaaaacgctctcgccgcgagggtgtgagcgatcggcggtctttttttcgcgaacttgtctgtccaggttttcttcggttgtccttcaaaggtcctgcctcttcgtccgtgaaaggctttcttcttcttagagagagagagaactgtgcggccgaagcgacgagtgtgtgtaaaaggtttacggcttccaagtatgcgcttttcgcgagctgctgagcgcgtgcatgcatgagaagacaaacgggaaaaaggaccgccaaaccacacacaaggttgtgtgtttgacggactcaccgagacaggggctaggcactcgtttcctgaaaagcgaaaacatgagcaaatccacttgaaaaagtcttttttcgacacagacactcctggatgccgctgctttcgcttccagtgcgtggcgccgggaaggcgaaactgggaagactcccagactgtccgccgactgaggtgtacatacacccaaaaggttgccttttcgcgttgtgaaagcgagaaaagtctagtttttgaccaggccaaaagcggtatttacggggtcggaaacgcgggtcaagatctcttgtgttttttcctagtttcctcgagtctaaggcctgcatagatgaactcctttcctggcggccggccgtcccccctgtcgaaagccacggtcggccgtttgcttgctcgatgtacgtcgaggaacagccccctctgtttgtcgcgaagcctcaactctctctctctcgtgtttctcccgctcttccgaagcctgctttgcgcggtctcctttcctgtcgctccacctgcttcgtttttcctcttcgtctctactttctgcgtagctgcctgtcggtgtttcctctcttcctcggcactcggttcgagttccaccctgtaggacgaagagtcagcagtccttcactggagaacgggtctctcctcgtccctttctctctgcattctcctccagaggtcttggtctctctcatcttggtcgcctcccctctcctcagtctgccgcttgtcttcggccggtgaggtctcgttctctctccgttcgagcgtttccacca

SEQ ID NO: 767 - DNA, 1881 bp, Toxoplasma gondii
  source 1..1881: mol_type = genomic DNA
cgttcgattgaagtagacgccttctcttgggttgtaaagccagtgagggagcgttcgatgcatgtaccacacatcctcggactgcgcctcgtggtctccccgccgctgctctttttcactgtccccctgctgcgccgctcgaccttcaaccttcgcgtcgtcgctctctgccgcctgctcttcctcggtgtccacatcgaacggcgtctctgcttccccgccagcgtcggcgactcggtctgcagcgacccagttcgagtctgctggggcccagagcggcggagcttcttgcgctgccatcgaaggagatgagcgaggcagaggaagaaagaggaaaaagagacagctaaggcgcggggaggacgagagggaagagaaaagcagagagtcaggagacagcgaggaagaggaggaagaagaaaggagacagtcacgacagagggagacaggggcagacagcgccgagcgacttgagctcagatcagccgacaggaagagcaaagcattaaaacaaagggaagagttgggagagagaggaagaagagaataagagaccggaagtgaagatacgaaagtgaacgaggaccagcccgaacgacgaacagaatcgagaggaaatccaaggcatggttctttgctctcgcggtttctccctgatcttgcgttctactttgaaaagtctgtcgtgctccgtcttttcccctgggcctctcttcgatctctctgttctcctttctccttctgtgcctgtctcgtccttctgttctgctctccacggagcctccacacacagagaaggtttcgccgaaacttccagaactgcgttcgccaagaacgcaggggagatcctctctcttctcggcagaagtggacgacctcccgcgttcactgggagagggcagcgcggaacggctagcagcaggtttctgagagtgtgccgaggagaagtagaaggaaaagcgtaagaaggcgagacacggagcgagaagaagagaagaaaggagagaaaacagccggagacgcggagacgggatctcttttcggctgggagagagacgcgcgtcggagaagaaggagcctggcgcgtcaaagtgcgtctttttccacttcgttgacagagaagaagaagaagaaaggcagacgccacccagaaagggaccgtcgtttccgccacagtcagctcttctttcgcgttgcctcactcgtttcgcgttgccgttgcgcgcgcgcgacacacgcatgcagcgcgagacagaatctcggaacggacatctacgcttgcatgcgacgaaactctgcacagtttttcagggactctccgaaaccgcttttctgtgtcgtgagggactgcctgttgcctctcttctgtctcaccactgaggaagagcgcagctccagtacatgcgggagagccggactgtctctctctcgcctccggcgccctcgagagactgtcgcgttgtatgtctctgtcgaggacttcttcgtgaccggcctcgactttcatgtggagatgcgggagggccgaagagaacggaaagctctctcttcgcctgaatctccctgcgccagtgcgctctcctcagtctggtgcatctcgctcgcgtcggaactcgaagttcctcgaagagacgcaggccgcgccgctcactggggcgcgacgcgagtcgctccggtcgcagtgtctctctcgcctgtggcggagcgaatgcaaaccgcgcggtcgatgagccagtgttgaggcaaggacgaggaagcaggagacgatcagaggagggagaagaaaagcatgaagcagaggagaaccagaagtgagggaagaaaggagacccggcaggagacaaagaacagggcgggagtgagtggttggtgtgaggcaaa

SEQ ID NO: 768 - DNA, 2019 bp, Toxoplasma gondii
  source 1..2019: mol_type = genomic DNA
tctgtcgcacaagtaggatcggttttgtgtgccggtggctgttttcgcaggtcgacccgcgggcggacgtttactttcctctcacggctgttttggtgacgctggggcctctctacatgttctccaaagccttcttctgaagctggttctacagtgccgtggtgcgcgtctctcctctggggcgcgaactccaagaaagccgcgagaaaggcgccgttttgcgagttctgacggagagctcgactcgatgacttcgcgccgtctgcgctccggtggtgccccttcctgcgttgtccatgatgtgttcctcaagttcaactgaagccgaacggtcgtctctggacactgtttcacgaaacctcagcacagttgatgttaaaagcaagaacagtcactgttcctacgccgctgtccagtctggtggaaacggaacattgatacggatgagattccctgcagcagctttgctttcgcctagtgaactcactacagtcaaattcgccacaactctttcggtagtgttgtgtggcggctcagagaactggaaaaaggatgtttgcgggtagccgtgaccacagtcaccatcgaagcttacgtgcttgcactttgtcgtcgagcggaacgtgacgaaaaatataacagtccactcctttctcttcggacggaatcaataatgtgatttattcagtcgccacaagctgtcgaacactacgcatctcggcgtacccccagcgaacctttctgtgccagcgctgtgcgcatggacttccgcgctagactaccgtgaatcagcgagcatgatgcacactgtggagatcagaagggtagttttcccatacaagtacagcctcgaaataaaagacaacggcagaaaaccttaccgaggtcgggtgtccagaaacttacagcactgccgagtggaacctgcggaagtgtcggtggtccaactaaggctgctcaaggtggaatggcggtcagagagagaactttcgttgccaggtgtcgtcgattgtgcggattctgcttcaaagcttgttagaactgagccgaaacggttcttccgactgccctttgcaagtgaaatattgcgaaacagacggcctctgcatttatataatcaatatatatagcgacagagcatgtctaaactttatacgctcacgaaatcatctgctggcagatcagttattgagacgtgaaggtgacattgaaaaaaattccgaagcccgtagaatttcgtacgcgacttaggctgcggcgcatgcatgcgattttctcaaagagaggtgtcggcaacctgctgctcccttatcgttcgacgataacgttcaacttttattccgtcacacggtggagccttcggttcgatgttgttaggttgtcttgcactttcctggcaccaaagaggagctgtactcaagcaattgtcttgtgaacacccagagacatacagcggcgcgatgctgttcttgtctcgacgtttttcaagcttgcatgacccgtccattcggcacaccactacattcagttgaagagagctgagccagccatttctggcattttctttgacttaaaagaggagaaccagctcttcttcgctgaggcgttggctactgcgtgaacttcgaaatgtgcctttcggcagaacacagtaatgtggcggacgagtcgtcgccgatcttcgcgagttgtggctggggtagcatcctttccctttgccatgagcgcacatttcctttcacctgtcaagggatctcacaccgtaaaacgctctaaataaagaactcgagtcccccccccctcgcctccgcgtcaaagcggtatgacattccagttgtgtcggctgtttcgatgtggtggcgagtctccatctgccccagaagggcattgctcacaagcaggatgtgctatttgcagcttacttggactgctttcgccaagaagtctagaaaattccatggaactaccttaccctgtgcaactaacgcacaaagtgtcgaggtagaaagtcgttcctga

SEQ ID NO: 769 - DNA, 2612 bp, Toxoplasma gondii
  source 1..2612: mol_type = genomic DNA
gctacacgtcgatgtgttgtactttcggaagggactcgcgttccaggctccaccagcggcgagaaggaagaacaagaactaagaaagatgtttccttgactcggggaaacgaatcagacacagcatacagctcgtgaattcaggatcccgagacagcttggccacgcatgctgcattttttcgcttttcttcttaccgtgtctgtgtggccgtgagtgacgtagaggagctttccagattttgcagaaaaaaagcagagttctctggtgcgtgcgtcgaccgcgttctctgcctcgcctgtaaacgtttctcccctgggagtggcaagaaccttgccggaacagaggaaaactgaggctcggtggacaaggctgcctcctgccaatccccatgatggtttctctcgctttccctccctaaatcgctcttcagagacagaagctcgttcgctgccaagcgccttcttcttctttgaggaaggagaagcaggcgcagacgaaggagaacagggaaaagaaggggaacaagaggcagaggaggacgcgacgctgggcgaagtcgagcgcagagtgtcttttccaagtcgcaagcgccgacatttcgcagccttcgtctcgccatcctcgagaagcctctcttggttttctcccctcttcttttttccgctctgcttcgctgcagtgtctgtacaccgcgcgtcacctggcgagcttttctcttcggtgtacgtacactccggatcctgctccgcagcggtggcctccaccgacttccggcttttcttcttcatcgtgttaacagaggtttcttggcgacacgataggcgggaaagacgccctgtggctcggagagaaacggagaaacgagtggaaacggtggtcggaggactatgcaaagtcgaagcgacgacgtgggcgggagggcgtcaggcgtagcggcgaggctgtgactctcaaccgagacaagcaggagagaagaaaagaacgtttttatggtaagggactcaaaacacaaaatactacctacatgaaaaagaagaagcctttccgcggttgaccgccgtcatcgacgaatcgaccgcctcgctgcgtacgcgttgaaagctacttgaggagaacaggacagagacggggatcgcctcgatcctttatttcaaacaggctcgggatcatgaaggacgccttcaaaaatccttttaaaactgtaaaaattccgcctccacgccctcctttttcggccgcgtgtggggtcagacgaacagcgcagcgagtccccggcgggaccgctggggtgtatatacagctgggtcgaggcgcaggatagtatgagcggcgtttccggaccgaaaaagcagtttctgtttcagaaaacacgctcaaaacgcgtgtcgaaaacgcgaacgtttatgactgtcctgtcagcgctctcacgcgacgcctcttcgcaggcgttcccgcgattcgcgcgcttttcgcagtcccagaggcctgtctcgggtgctgttgcatgtgtacccacgccgtctgcggaccccctgagagcgagtgagagactcgagggtgtctctgccgacgacgtagagcgctctccgcgacgaaacggaacttgtctctctgtttgcgttcgtttttctgtcgagtcccccggatttcaataagacgcacgcgaccggcgcctctgagctcctcgtctctgtccgcaccatcgctgttcgccgttccagtgtgagcggaaaagaggcccactccgaagcttaacagcgaggtcgtttcgccctcccgtttcttctccctagttctctccacagctccagggatcttctgcgacgctccttcatctctgcagactgctgcctttgacgcgtccctcgtctgtgccattttgcatttctctttgtcgcggtcgatcttcgactcgtcgatccactcggcctgttaacgcgcagaccttgaaagggcaccctgtctctcgaaggcgcctaggcgctgcacagcggcccgagtttgaactccgtcacgggatgcgtccgcagctgaggagaaatcctctgacgacaagcgactcgagcttctcagacaggcgcgagaggaacgcgcgtgagtgaaaggcagcgagaagaaggcgagacagctctgcctcttcggattcccctttgtccccaaaacgtatttttcgtctgcctctctgcgacgaattgatctcgcggcttctctctcgactttttcgtccgtccgcgtttcgcagctgttcgtacacatctggtgtcgacgcgtctccttcctctgttccagtctctgtgtatgtgctccagcgacagcgttcgcgtgttccgcgcgtccccagttcgcgaaccttctctgaagtgagcgtcttccttcctgtgcctctctggtgtctctgcttcggcgtcggagtctctctgcgtcgctttctccaaatcctctcagcgtcggccttctgtggctgttcttccgaagaggcgacccggtagagttctcgagagacgctcgagagactctccagcgcctttgtggcctacgattcgaaggtcgacccgcctgcgtctcgaccggcgccgccgtcggagcctcttgctacggctcgtgcaacga

SEQ ID NO: 770 - DNA, 2067 bp, Toxoplasma gondii
  source 1..2067: mol_type = genomic DNA
ttgtaagtgttaaggtgccattcggttgcgcgcaaaggacgaactattcgtaaacaagaaccagtcgttgtggccgttttttgcgatttagttctgctcctttttccaccgtgtgactcccgtatactactgagtcgtcgctcgttaaccattggggcgatgggacgtctcggtgattgctgtcaagtcacggtggcaatgccgtttttccacgttattttttgtcgtacggtgcgtttctcgttcgcagttgtatttggaggatagcgatctacatctggcgcccgttgcgcggccttgagaagtggatgtgccgattattgctttgcaagaactcggtgtggagtttgtggagactgcaggaggtgcagggctccagatgatcgagcggttagctagagggaaattggcgggagtcttctactttatactcatttcatatgcagataaatcgactgttcaccgtagtaacgcgcgtgtacagagacgaactgcaatgttaacgcacacaaccggggatacgccgccggtggtccgagagatctcacagggccacataagaagccacgttttgtcaggagagatgggcctgccttgacttatattacgagagagttgctgactggtgtcctaattacaaaaaatcgatggtaatttccggtgaacgctttcggattccttgggaccatcgatagacagccttcgagctgttatacagttcatccgaaattatgtacaggctgtgagaaatctttgtatttttgcatccactttcgtttggcattcaagaggttctatgacatcacggggcctcacagccgggaccgccgcaacgatcaagtatcatccgggtggcatttacggtacataaactgctgataatatcgaataagcgtctgaggtaggcgttgactgataaccaataccttcaatctggcctgttagactaatatattgtgacaagaattacggacgtacaaaaacgtcgcgtaagccgcacaggcctaaatattgcaggtgacgcgaaatctttactgggagcccgtttgtacctcacgtaccacaacagacttcgaatgacagctaccggaaatttattcgacaaaagacactgtttttgtgacggtagaacgacgcacggatgaccattaactcaggacttatgttggtgcctgacaagaggggacatcggacacagctatggtcacggcggctaaggttgaatcccggtcagccgtcgatttttttaaaatttcatgtccctcaaatggaaggttccctgtcttctttgaacagtagtcacaggggagcatagctgcttgattcaaaaacgtcccagtaacgctttatggttgaatgtgactcgacagcccagcagagtaaaagtcgccgaggtataacagcatgcatgccgttgcatgacacgggcaaaaatccgataagacagttttcaggctgggcgccggacgggcggtcgaacttgagagcccacacacgcagaagcagcactggtagtccgaaaataatatgctaggatgcatagagctgctcagcttatgccgctcgtgctttacaaactctctccacaacaacatggggaaaatacttcttaccgctcatcaccatgttctcaggcgtctgggtgagccacccggctctgaagttgtgcagcagctctgtcgagcgcgcaccaccaccctggaagagcgagcgacgctcatcgcgcctagggtttcttttgtgaaccgatactactttgactggcgacagagctacctgttttctcttgaaaaaaagcggccttcccccccttttgcaagcttctttcctgttggcgcggtgcgtaggttgttaccctacggtggtgaaacgtgaactagcagtgcacaccgcgggtcatccgagactcaaccttcgctggactatgcggattgacggtactccctttctctctcttgtcactttctcgagatccctggcgaaaacgcgagtaagtcctaatctcgaaaggaggcccctcaactttttaccactcacgtggttgcacactatcgctgaggagcaaaa

SEQ ID NO: 771 - DNA, 2303 bp, Toxoplasma gondii
  source 1..2303: mol_type = genomic DNA
gccatcctcttggatcttcaccacttccgctgttctccaaacatcagcggcgtcagggacgtagatcttggttccaacggcgcagcggacctcctcctctcccgggtcgccgcctcccggggcagacgccccatctgcagaagatgccgtcatgttgtctgctgtttcgagagcgcaaaaaattctgcaccgagttcagctaccggcgggcaggactgaagcacacgcaaatgcctcggcggaagattctggtacgcagtctcctactacgagtgatgatgtgtcttcactcttgatggttaaggacgagaccccaggaacgggatttacagtaatttctccgacccaacgggcgcgcaccaaaaatgcaacgaaaaaaacgaatactcgaggcaccaaaaagctggcagatggccggaacagaaaacgatcaacagagaacacgcacacggcaacgcaccgcgacgaagcaggggatgtcctcaatacgacaaagtccggcccgccgggacgcgtgtggcaacaccgccaggggacgcggaatgaacggtatgaaacagatgaaactatggcgaagagaggcggagcgaaattcgagaagaccagtaaaaatgcaaagaaggacccaaccgaatgaaaacgaaaaacgtcgctactgaggcgaacaaactgctcgaggtaacgggcagttgtgtcaggagtacgaacccctctcagaactgccgtggtggtcgccgacgatgcattggctgaaaaaaacagtgcttcttttgagatgcagtgaatcgaatagacgtgtatgcagagaaaattccgtgggagagccccagtttgaggaggaaaactcgacaaaacgtcggggtgttccgggcgggaacggcaacgccacaagacaaacaaggcaacgcagattgcacgcggcacggaaaagagcttctgttcaccaaaacgaaggatcaggtgatacgagaaggacgtgcatttctgcggagttgtaggacagaagaaacgacggagaacacgagcacaaaaggcgtggacggctgtccgcagctacacggtcggccgcccgatgctggtcaactttaaaggctaccagaaacgaacgagaaaacagacgtgcttcaccgagttggagacagcatgggaaagccgaagtgtcgcaactgccgtgacaccgacgacactgtgttagaaaggggaaacgaacaggacacggcggaaaaggaacgcgttccgctgtgcagtacatgtgcaaggttcgccgaaaagactctcggcaagcctagagagtgatgcggttcctaggtccgaagagcaagtcagcaaatagggcaaccaaaacgaaccagccctgttcttccctgaggttgcgccgcaaagcagtcgatccactttgtcatgaaaaagacacgagagaccgtccgctgcgttggtgccgcgaacgcttcctctcagtgccgaaagaaaatcgcagcctgctagaaagcggacggagaaaagacgccgctgctcctgcaagagtgacgcgagcacggaatcccggtcgtggacggcagcaaatgtgctctacgtatcttccggaatctcctgcccaggtctgtatttctgatcaagagaaaaagggcaagcgacagctagaacgtgacgttctcaccatcgagaaaacaaggtccccagtgagttgacgccgcacacacacggcgacaagggcaatatagaatgcgcgctcttaaaatcggtgctctcgcccttgcgcaacctgtcaacagactggggtcccctgctgccgtcgttctctctgggagaaaggcggcggtccccagacggaacaggaagccgtggcgcctgctctcccccggtgacgtacaacgtagcgcttcgctacctctcgtctgaagaaagtatttgtccatggaatcctgttgtggtttgctcctccgctctgccctgcaagctcttctgctgtgaagaggttgcttccggtagcgagggtgacccgccgcgtcctttggggtatatataggcgccggtgttcaggcaacggctgtcacggggtacttgcatcgcgtactataaagacaacgtagatgcacagcacacaatatatatgatgtatgtagatacaatacatatgtctttcggtacccgctggcaatttttgacgtggtagaggagcgtgccttggaagccagccatctctctagccggtaccgggtttgccacgatgtgtcatctcggtctcgccctctcgtcttgaagagtagcatttttccttcgatggcgtttctcggttgcgaaca

SEQ ID NO: 772 - DNA, 2780 bp, Toxoplasma gondii
  source 1..2780: mol_type = genomic DNA
aggaagaagaagatttgcaacttccacgagcagcgcaaaggcttccctggcgctcgtgagctcctctgcagagtacgtcgaagaaggagctgttgaagacatagtgacctagggcgcagatgctgaagcttcagttgctatccaggtgcttccacctcagtgacattctcttgcatacattgcgctttcaagggacctcaaaaacggtgctttgcgagtgtcaatgtcatcaatatagtcaaggaaatagttggttctgcatgtcctgagtacgtaagaggcaaaaagatgcgaagtatagaggcaatttcatcggaaaccggtgcggtttaaagaggtagctacggcgttaaataccacacaaaacgctgtacacctctcaattggtaataaagacagttatcgtagaagtacccagccagttactgaggaacagccacgagcccgaaaccacaacttagtatgaatgaatgcacgaaaacacaccgggacctcagtgtgcgaacggagagagagggaagagaaaccagcatgatagacaaaaatcggacagaactgtagaggcaaacatgacacagcacgatgaagggcggaacaaggggagacaaaggatgcgtgactgtagggaagacaaaaggtcatacagggaataagggccaagagcttcgcatgataacgcaatctccacaaaataattcaatctagacgtttgataaccaagaagggatggtggtgacccggacccaaacctggggaacacaggtgtcgagatcgagaggaaaacgcagcgaaggaacagaggacgaaagatgctgctgaagcaagcagactggtagaatgttcaaaatgcaaaagcaggtaggaaacgtaaggtcgtgagtttttttaaatgggacgtcgttggaatactccagtagtggtctggtttcagcgtttcatagcggaatcctgagcacacgaaaaaccctctgctcctctccgacaccctaacgtcagctatgtcgctgttcgacccattcagcggtgaaataagtttagggagtgatgaccagttttctacgtccggaactcggcggcgtgtcttcgtcttgcagcaacccgaccccctcgcaacatcgtggatgctcatcccaccggccaatcacttgaatgtggggctttcttccatatacatccggagcgatcttgttgagacatgaagaaaaaacaagaaatatcaaggaattttttccctgtgaaccctatatcgctcacctgcgtattttcgcagcggagtctgcgcccgacctgggttggtgtgagccaccatcagcgttgtatggcatgctgcgcgtgggcgcgacttttcctcaatttgactgcctgcaagggaacggttgtctgctgcgccgtggcaaaaagtacagttcggtgaatgagaggcaaaacatgcagctacaaccgtgacagcgctgccgcgtctggggaatcacgatgcaaactgattccatactctcgctgcacactacatgggttagacgtgccgttcctgctgagttgcacgagttgagcccgtttcctcctctgtggcagtcacacagagaagtcctgcgaagtttcgcaagcgatggaagtggaaaactgagcaacaaagaaaccgtgacggagtgtagggaataacaaccagggcttaacatttcaaccttccctaaaggaggcgcgcaagacctgagagctctccagttgaaaaatcctattcctggtaggcgagcttccggttggacatctgcgtgcatggagcacgtgcataattccacggataaaagcgattcgctgcggagtattggcagaaattcgctcccctcctcgtagacatcgctgtcctcggtgtgcatgcacgggacagactccgtgcgcggcgctagctcctctcgcgtcgcgggaatctccgagcctcatcagtgcgccagccttcctcattgcagcttgtttagcgacgattcagcgcatcccctctctcccggtgacagaagtcatggcgtacctgccataattggaatgcggcatggcaccgctcatcttgtcactggtcaagagggtggattccacgatttgtcttcagctgcggaagctgtcacccggtgcgcgcatgcgctgcaactctgcttgtgtggcgaaagaggatggaatcgacgcctctgtgagctgttcggaactcactgtcagaggatgagacaactcgttgcggcatcgatccagcattaaaacgcgtgccaagtcgaagcttcagggcgaggccccgtgcagttcgtttcccgccaaatttaacggagtgcagttcctgcggtcgatagttactacggggaacgtcacaaggggcaggtaattcgacccgtttgtgctactccctgggaaacgcagcacattctttcagttgtcacgatgtttcgttgtctattcgcgtgatgattcactgtgctgctgccgcggctgccacattgccatgccggtccgggtttgacctctctctgagtgccggaactcacgttgagccgtttccttctcacccgctttgtaggttaccgcctaggcatattgcttgtacgcctatatatttcaccctcttcgtttgagctgtttgtttttgtgatttcgtgttcgctttgcgtgcggggtcgccgcgctgaggcttgccgctatcaccgcggtgagtactgtgctccgcgggactgtgcttggtttttttcagtctctctccgcctcgcgggtctaattctcaggtttttttcttttgaccaaga

SEQ ID NO: 773 - DNA, 2122 bp, Toxoplasma gondii
  source 1..2122: mol_type = genomic DNA
gcgtacctagggaaaacgtttctccgcagtggagttcttcttttggtatatagatgaataggtgtagtcatgagatttctgccaccacgggagagagaccaggtcgcagcagctaggctgctaatcaaatgattctcatgatctagtcgctgacgaacatttggaaggcatatgttgccattatcgtcgagttcgaacacaatagaccccgtttctccaatactatatttggggtgcacactagcgaacggtgcccttgaaggtgaaacggatagccggtcacgacagtattagtatttcaggacgttccggcacgtcttcagacgaattctttcttgtgcaagcaggaagagcttcgcttgtttctaacgcaatatttcagccccagcgaaggcaaggcatatcaccctatgcgttggtttattccgtcatctgtagactcggaccgagaggcccgtaggttgtcttaacttgaacttcccagtatacgagtgaagcgccttatgccaaatgcatgcgtcagagacggcccaaagtgcgagtgtgaatgaatatgtcccgggaaggaaatcatgaatggtgttcattactgtttcccccagtcatcttcgaggcacggacagctctactctgtcctgattcgtcgcccgtggcctttcgccgtttccaggaaacgaaccagtacgtattcgggggagatgagttagcactacacaagcaaacgtctggaacgcgcagcatggctggcactttcacactgattcctggtttccaatcctatttcgcatcagcaggtggggacaggagtctctgtgtgaatctcgtgtactgtatcctatcattcggggcaagatagcagaacaagcctgctcggagttccacgtggttccaaccgacacaacggagcacaaactagctatctggagattcaaggtacgagtgcccttccgcaacgaggctgctgtgtccttctgtgtatcggatgttcactttttcaatgtcactgccgccacacgcaccagaacctggagagtggaagcctgcattcttgtggaactgctcagatagaaagcacagcaggaaagtgaattcgctgccgccacaagtgtacggtgtggtcgccacatccaagaggtctgacaagtgtgccacggcagaaaagcgaaggacgacgctgcacagggcgacgtaagttcatgttgcgaccatgagaccgcatgttattggtgagcgagcaaactgagtaatccatcgtttttggacgtaatacactcaaacaaatgcagtatctagggatgattttccgcattccgaagagaaaatttttggaactcgaattcagaaaacgcttctctttgtggaaacacaccaagtacttcacgaaataatctgcatcttaacaggatttaaagaggaggaagaaattggtcgtgggtttctcttcctgggaggctgtttgtctcgctagactggtgcatgcagtctgtgagcaaaaagaggagaggctacagacacactgaatgtacaaaaaggctgatcagtccgccctgttacttccgagatgacaacgcatcttcgttttccgcctcctgagctgtgaccaaagaagacttcccttatttttcttgagcggctacgcggtgcgtctctttttctccaggacactatcctgtcgcttggtgacactgtgtgttgaccgcgaacgttgtggtctttcattcgctagttgtttcggccgtgctcctcttgttgctcgtaacacaatcgaggaaaattatatcagtcttttgcgcagcgcaaatctttactcagcacatcaactggttgtcaaagaactctgtggttggccacgggcagtcccatgcgcccatcccagctgcacgcgcctttctgtctgttaaattcgtgctctgcgaattctttctgggcagaagggtcgaactgccccgctggctgtgtaaccacgtggatttgccgctggattcgggaaagcacaactggaaagtatggaatttctggcagatcacagagcggcttaacttcttgcatcccgccacacagctctgcacagaaaaagacggcactaaagcattagagattctctgtgtgttttgaggcagaa

SEQ ID NO: 774 - DNA, 1764 bp, Toxoplasma gondii
  source 1..1764: mol_type = genomic DNA
ctgatcgggaccatagaggagaactgcaggaagctggctgtggacagccgtggcgacgacagcaagacgccacagagaagtttcgagaacctcgcaaagtccgagaatgatgttctgcaggcgagtgcacaattgactgtacaggtgcctgtgacgccgcgagaccactcaagagcgggcggtcagctgtgagacatctacagcgtgcattggaggcggagactgatctctctggaaaggttttttgtcgagtcttctctcggaacgtcttcacactttcttcccttttcgcgtccacgtcttcacccagttttctgcttcttcgccctcctcgtcctgctgcccagacgacggctctccgcaccgcccacgtcattctgttggcgccaagagcaggcagaacgtcagacgggaaggacggagaggtggaacagcgtggatgaggcgctccagagaaacagagcaggaaagaacaggggaacagaagaagcgagcgctcccaagtggggtggggcggtgtacagcaatcaatcataaagaactcggttgtccggcataaaaagagagaaaaatacgcagcaagcgcggtcgactcaagcgaaagcagaggcaaaagtttccagagatagcggaacactcgaaacaggagacgtctcaagaggaagaaggagaaaactcaggagagagaagaagccttaagaagaaggaagaaggaaagacaagacaagggatacggagaatttcacaggaacgaagataactgaagggaagggaaggtagaactgaagaggacggaaaagaaggttgaagaaaaaagagaggactgaagagaaaggagaagaagatcggaggggaagaataagagtaaagagacaggagacgagcggataagactagggagaagaaatccgctcctcccgttcgtaacaactttcggccgcacaaccgagaatccgattagctactctccttcccatcagcccttgagactccttctctcccttctgaaggaagaagaacgccacagaagaagaaaacaacgaattggcgttcacatttgagcacgagaaagaaagccatcttctgcgtgtttccctcgcgacttcgctttctgcaacacactcaaagagcatgcctgcgaaaaaaccgagtgctgcatgcgcccgtttccttcgaatctgagcaatctgtccttctgcgaagcgtacttttcctcgtcgacttgggaaaccaacagttcctgagatctttgctttttctttcctccgtctcttatttcttctttctgcttctctcttcttctcgcttgttctctctggcgaacgcggttcccattgagctgcgaggctcggcttcaatgcgtttgttttggagaaacagtgttcctgataaaatttcaactcgtggttgattcatagaagcgtagttttcaaagcgcgagtgtcgccttctttgaacactcggaaggctgctctcgaactcaagaacctctcccgaagtttatacctgcgtgccattcgcctgacgagatccctcttggcaagccgcagatttcgtctcaaacctcacgccaaacatcaggcatctccctcgtcgattccagctagatagacccatagaaagtctctctgcatatatatatatgtatatgtatcgagtgtgtggtagtgcctgagctccggagaaggcgagagaagcgaagcagtgggggtaaaagatttgaaaagcagtttttcgctagtttgttacttttcggtgttagaa

SEQ ID NO: 775 - DNA, 5004 bp, Toxoplasma gondii
  source 1..5004: mol_type = genomic DNA
gcctccgtcatgaggtcgctgttttccattttgttgcgatctgcatgcgagccctggagagcgctgccgacgccagtgcgcaggcgcagagcgtcgacgtgcgttcttctctcgtcgtcgctgtcgctgcgtcgcccccgtttcgcctttcgtctctctgctccctcactgtcgctgtcggaagagcaagctgagtctcttccttcgtatcctctgcttctgtctctcctctgacgctgtccgtctcctgtcggaggttcactgcgagaggacagagcagcgaggcgcgcgcgaaccccctccagcacactgggaccggtctcccttgctttctgttcttcctgccactccagctcttcttcgtcgtcttctgctcgctctcgttcgccttctctgtccggcttccagctatctcgaaggagatgggggtcgtccagcaggtcgtgggcgctgagtttctttccagtctccggcgtggacccctcttcctcatcgccgaaggagagaagtttcttgtcggcttttcgcagtttcgctcgcgccgcctcggcctcttcttctcgcagtgcgctgccttgagatctggctcgaccttcggttgtgcgaccgccagctgctcgtgcacgtttccgttcgtccttctgcgccggcggtgcgtccggcaacctgcgaggcaccaggtcttcaaaggggttccagagaacatccacgcttttgatgaatggcggagtcatgggccggtcttccttgccgacttccaggtcgttgaacttcatcaagttgtacagagtgtgtccagtgactttgccgaagagtgtgtacgcgttgttcaagacgtccgcgcgcgccagcgtgatgaagaactggttcccgttcgtccccaggctccggcctcgctcgtcgttctcggcatccttcgacgaacgacccaagttggcaacccccaccaacccccggtagcggaacttcaggcggggatgcgtctcgacatcgaacggcttgccatcgaacgtcgtgtcggcgccgccgcgacctgttcccgtggggtcgcctccctggacgataaagtccttaacaactcggtggaaaattgtgttcacgtagtacccctccaggcagagctgcacaaagttcctgcatgcgagcggacactcccgcgcccaaagctcgacgtccaaatcccccaacgaagtgtgcaaaactaccttgccccgcgtcgacggctcgtgcacgtacacctcagacatcttgacgagagacgagaagccagtgaggtgcacaaacaaaacgcggtcgaaaacgtagggttgccgaaccggggagcggggcgagacagagacaccggacgacgaaggaaatacgttgatgaggacgaagagaggcacaaagatcgacgcgagaccgtggaggagacgtagacagagagagacggaaacgaaggagggagagaaacgcggagagagcaaaagtgaggcacaaatggatagagaaaaagagcaagggacagaggcggcggagaaagcgtaggaggaggtgtgagtgctggaagcagagggcgagagcagaagagaactggatgcatggacaagaaacttcgccgggaaattggaaaaaacgcgggggagtctcgaagatcgatcgagagaattcacactccatgtaccagcactcggaggcgcatggaaaaaagagacaccccgagaccgaagagacagaaaaacgagcgggcaaatagaaaggaagactgcggccgcaaatgcaaacaaaggcctttacatctttccttggcacaaactcccggaaaaagtatcaggacccccaaatgtcgaggatcgccgccccgcccgtttgtgtctcttagagggagcagcgatggcgttgctctttgcaaacatctgctacaaaaatgcgtatttttttctttcttcctctttcttttttccctcaaggattccataagcaggcgcttgcctgctctgtacacagccgctgtcgctctcgttcttctctcgtgacccctcgccgctcgtagactgtctgcctctttgttcgtgcctctatatctttcaatctgagaactgagtgaggcgagttaagcgatctggtcgttcttttttcccattaagacgcggaaaaaaacatcagacggaaagcgagaagagacagcgtgtcagcgctgtgctcgactgtgcgcgacatgcatggaaaacccgacgtttcggagctgggaaactcttctcaaacatcgagcaaccaccgcgtgttcatcatggaaaaatacatgtattttaatatttcaaacaagtgaacaaaggggaaatagagttatacgtctgtcggtgggaatacgtcatgcggtatctagtaagcacacgcggactacacggtggatggctaccatggtgaagaagcagaaaccgcactcgatccgtagagcatttcggttgctgtaggaatacctgatgcatatagatacaatgctctatatatacctaaatgacacatttatatctgtctttctgtatccatatatccatataaatatggaactgcatatagatacaatactctatatatacctaaatgacacatttatgtctgtctttctatatccatatatccatataaatatggaacttcttccccaggaactctcgtgaaatgaatcgactatctctatataaggtaaatgcgcaggcatgctctataggagtgtctgtatcgtaaaagaggccaggttgtactcctggaaaagctatttttgtccggcagcgaccatgctgggcgtatctgttcattctttgtgccgctcaagtcactgacgcttcaagggtcaaaagcagggtgcctcagcgtgcaagctgctacacagctgcaggggagtcccttttcagcacgctcccaggtgtatatggatttaagtccttctcagagtcgtcgggtatgtctttcataccggaacctcgagaagaaacttctcctgtgtagtgagaacatcgagacatttcatgcttgtatgttcacccgcagaaattagagtgtcgcggtagacgcatatccatctgtgtccaccacgggcgatatgtatgtatgtatatatgtatgtatgtatatatatatatatatacgtagatagctacccttgtctttgtgtatctctgttcgtaagaacctgtgggtgagcagggaggggaacgaggctgaatcgagaggctcttcttcttcggcgcccactgaggtggatactgtgtgacaaacgtggcaccgaaagcgttcccgctagtaaagattcgctttgccttctttgggtcggtcacagcacactagaaggtcaacactaaagtaagtgccgaaatccgtacatacgaatagctatatataaaagtgtatacatgtgtgcgcttcttctgtactgaaaagctgccggtacactatggaacggggatccccgactgttggagtcatcgacgaagtccaccaacggtacggaacgaatcccaccatcggaggcgacataccgcctccccgttttgagaaggtttctgattcttgcgcttttcttcgcttccaaactcttttcgcgctttttgtctggatggaaaacaaccttgggcatatagagaggctcgttcattgcggtgccctccggtacaggctggcaaagacgacgtctcaccggacgaaagcgcaccagcggcgcgcatgccacaaacgctgccacgaaaatggggagaaaagacgaagtcagactgctttccagtggatttccttgggaagactcttgacggcgcgcgcgctcgaaatgcattctgcgtacctgcttggacattttcgcgcctctcactcagaaacaccagttccgctgtcggcgaaacggggtagcgggcaggccgcgacgagagacgagggaaagcgtgctcaaaaagcttccactactggttcgggtctcggcgagagggacgggacgactatgcgagagagacgggacgactctgggaacgaggacaggcaacaacgctagtagtggcagacacttcctgcgctccttttcgagcgatatcgccgcttcgcctctcatcgtttacccgacttcttgccccccgtccttgcgtccagctttttccggacgcacccgcagagagaacggtcgagctgttttgtcacgaagcccgaggaaaactcgggaaagtggcacattccgtgtcagcttccgtttacactgcgactgcgactctttgggtgtacatacactccgactctacaccgctttcgttttggcttcggattcgttccaccctcgtcggtcattccataccgcttactactaaacttcgtatgctgaggctgatctcgttaggctcttggtgtataccttcctggatcagggaaaccccggatgctttctcgtttccctactcttcttttcgagaaacatcgtccaaagcgcgacggctaaacgggacacctgcgtaccgccatcgacgtcgtcatcccctttcaatctgtccgatccaccggcaagatttgtgccatttgcgcttctctctctctgtcacgttccgtcgagttgcgtttctccgcgcgcaaaccgtatcgcggcccagtcgctccgccgcaccggcagttccatccctcgttgacttaagcagccatcgcctgtgcgcactttcgcgacatttcgagaccgttttctagggcgtttgccttttcttagcagggcgtgcaggcacaagggcagacacgcaccatccacgttctaggtgaaactctccttttgtagtccagcgtctctcgcttgctactccccgtacctgccgtctcttttcctcgagttttttctcacactccccctctttctttttggcgtttgacccccacttctcacgagttgaacttgcatcccgatcctggcttttggcgccccaaatcccgtttgtctttcgggccgcgtcaaccgcaacctccccgtcgttcgtcccgcgcctctttgcccaaggtccacca

SEQ ID NO: 776 - DNA, 3941 bp, Toxoplasma gondii
  source 1..3941: mol_type = genomic DNA
ctgacttgaatggcagtcgctgtcgattcgtggaaagtagcagcgacagctcaggctgtttcgaggggctgtaacaacagagtgaccagcacaagaagcgccgggctcgctggtcgcaacagaacactgccggcctgacagaaacctttcccatcgatcgggccagtacctctcaaggcacttgcccacaaagagcaccaaccgcaggtagtgcattgtaaccacggattacacatcattgtcttaccgctattcggcccgcacagtcccacgtattccgatagagggtatcactccggagtgcttgcatcatcatccggcgcctgtgtgagcaaagagcaacacattttggagcgtttagaggacggcttcttcagacaacagatcgatgaactaggcactgtcgatgggcgcacctgcagcccggggcaccatcgctaccagccggttctcttagttcatagccacctgactatacctctccgttcctagttttcaggcagttttcccagtcggacactgtatggacacacgagttcagagatcttgatttatcactgacatttaatgatcgatgctgacatacctgactgtgtcgagagggtacgcaataacacccgcagcagtttccacccctaggcctatggcgaagttccgcatcacgggatgattcaccttcttatccgaaggcaacatggccttagccgtgtcgtaaagaccaaagaaggcagcgcggtacacgatgataccggcgactgagacgaggaaaccgcgatacagacccggaatgccaaactgagtcgaaaagacacaccatcctgcggcataaatagattcgtccttggcgcattatggcttcgggctcccccgcgcttcgcgaagttcagctgaaaaaccaagattccgcagaaactccccccacctttttttaaaacacacagtgaacactctctggcaaataattcatgtcttgtaggttgacgacgaatctctcgcacacacttgggcgacgacggataatcgttcgtcagagccacggctgaatcgaggtcatcaaaccacggaaaactgatgcgaggacccgtccaatcctagtgtcaccacatatagtgcaccaaccttcaaagacggaatccccttcagcaaacgctatggtccatgcggacgctgctcgagtggtttgatatcactgcacactttgtcttatgaaagcaaatcgtcttaattacttagagccatcgaaaaatggaacgtggaggcgcacaattcgacgtacgcccgacatcgttctcaacgacagaaactaacaatacggcaccactctcccttggacaacgcctagggtccctgatgacacacctcgcctgctaacgcatgcaggatcgtacataacatatcctgttgtaagtggacccgacctcttggtaaatcttgcgaatgcagtcgttcagcccagtgaattgtcgctccgcctgcactttacccacgtcggctcctagacgagttcttgcaaagtccagggggtacacgaaagaaagtgaagtggcgcctgcgaatcaaagatatttccagagacgatcgttcatggattagtgcagcaaaagcccactcgtgcgccttcgcgagtgcggtcgacactaccattctggccgccaacactgttccgtaggcaaaaaaagcaaagaacgacggcagatacgcagcaaatcgtatttcacggggatccaaaggaacccccgctgttcttttgctgtccgagcacgtgcttgagcttactgcacgcacagaccaatatttttaggcatgcgtatcgccgacaacttgcctgcagcaccgcccgaagcgagcgtctctgcaaagaatttccagaaatcctgcttcggatcatgccggacaaagagcttctggtacttctccttgcacgcgaaattgagtgcttgggtggggaagtaacggacaacgttcgcccaattgcctgcagaaaagattgaagaaaacagtttccacgaaagattcattcttcttcagggatacacacacacacacacaccgtgaagacaaggccgaggcaaacagatagccccacccgcttccacatgcgaggcaagaggtggcaccgcgcctggtgacttggcttttttcaaagagacagcggtcgggaactcacctctccagaaagaatataacccctgctcgcggtgcaccctgacaaagcaatctttcaatccctcatacttttttatctgaccctcttgatggccgatctgcgtgctagcgtcttgcagctggagcagcagcttcacccgctccactggggcaacaaacgtcttggaaattcctccagcgagtccgcccataagaaagtcccggaggaaggacgccgatagggccttgaagtcggtagtctgcggaggggaagacgaactgggacacgccattgctaagaggagaacagcgtttacccgttaggtccgcaggctgtgtacagtacagatagcggctacgcgacagagcaaggcggtaagaacttgacctgcccggactgccctgcgttctacccctagcgcaacagagctgcctccgaaccaaatacagaatatcagccaaaaatgaagaactctccccaacaacacgaagactagtcaccaagatgagccgtgctgtcagttatcgtttgaccacagctccgcgccgaccctccacaagcaaatcggggttccccactgagattcaccagcttccgctactgtgcaggcagagtcagcagacagaatctcagcctgcacacggaaaactattcattagaagcatgtgaccagaagcgatgactctccaaactagtcatgtatgctgtcgcggactcaagtgtccgtcgtttgaacatgaggaacggaatgtctgcgctgtcaatttggtgccagattcgttgagtgagctccagagcgatagctaggaaaactgacaggtgtgaagcacattggaggttgggaaatgcaagcctacgtcaacgtgggcaccgaaattagtaccaggatcacgtgcttggcttaccatgagcgcttgctactttccccggatcctgcatggttgtatagcctgcatggcactcgccaagacacgatcccagatgcctcccttttttggacctctgattctctctgtttctcaacggaagagtttcttggcttttcgcagaacgaaaagagctccatgatgaatgctgtagtgtacaggttttcgcagcaaccgcaactcagcccttgaatttcgggatcgaatgtcctgccgcatctgcgtcctcgcgcatgcgactgccttgtggtcttgtccctagaacgggtcgacagactctgtgcttcgttgactgacttgtcacttcaacacttccactttgttaaatcacgagagctctcaagcgcggcattttggaggcacgcatgtgtttttcctcctccacaagtccatattgcgcttactacgggactgctgtgcaactgtggagcttgaaaacgtggacgccagcgtttgcctgtccagctccgttccggacgcgtagagcggtctttgaagttctcgctttcttttttcccatatatttgctttcctcagattttcgcattcaaattgccggaaaatccagcgtgctactgctggatcgtggcatgagcgctggccatcggccaagaaacggaggagttgtttaggcaacgaccggaccctccttacagtgtgtcccgactgttgacacccttcactctcagcggagactgcccgttcattttctccgcgaaactgtttttgctttagcgcacgtcgttgcttgaacagccttttttccgtgtggcttgcccatgccccctgtacacgcagagcgtctctgcggtaacctaagcgtcgcggtgcaccctctgcacatctctattcacagcgattctggacta

SEQ ID NO: 777 - DNA, 832 bp, Toxoplasma gondii
  source 1..832: mol_type = genomic DNA
cgttccgttgccctaccttgttgctccgcgacttcggagaaacctcgggccgcgacgtcggagagagttgggcgtcggaaggcgcggctcttgagcaccggtcttcctcaaacgcctcgccgaggacgccctctggcagtagggaggaagcttctgcaatcatctcaattgcagagtgaagccacgaagcgtcgcggaccatcacagtcgaaaacgccagttgatagtgctgcgccgcaagcgcggccgaagcctcctcgatacgacatggcgctgacgaaggagaagaagcagaagaaggagaagacgcagaagaagcggtgtttcccatcgcctcttggaggaggggaagccagccaggaacccagtggagagaggaggcgtcgttttccttggagtctggaatctccttttcgggtgagtgtgcgcctggctctttgtttgtctctttctctgcagagcaggtcgcctgcgtcgcggcggtcgcagcgaggagaggcggcaggggggcttggcttgctccttcgtctggaacggagacagaagacggcggaatttggtgaaggaactggagcagcagatcctgggaatccacgcgtttgcatcttctctgcgtgtcgagacactccttttcgaggctcttccagaagcgcgaaaggtcgtcgaggttcagggaaaccagctcctcgaccgcaggcgagagagcaggagaggcggcggaagacccgccgcggtccgccatgtttctagcagaaaatcgctgacgttggtcgaagcagcaagggaagagagaccggtttagtgtgctgtcaagacacctcaagaaggcgca

SEQ ID NO: 778 - DNA, 3189 bp, Toxoplasma gondii
  source 1..3189: mol_type = genomic DNA
gccgacgcacactgcggcaaattagaggctgacgtgttctaccaaagaagcgcctgaacggtccagcggatccacctcgatacgcgttcctcggaacgcccatttgccgcggcaaaaaagtatggcaactgccgacgctttctgctccctttcctctctgccaaggtcacctcctcctcgcgagcaaggcaagcgtcaagtcacttgcaccgagttgaaaatgaatgaaatgctacacccgtttcaggaggcggatcgatgaaagaggcacgccgtgaagacgcaaaacgttgaaccagcgacggctgcgcgacgtctatgaataggctgccctgcatatggggcgaggggacgaacttaaggtacgcaaatatatatttgaatgtaactaagaaatctagagaaatggcccctgaggcacaatcgaggatccgacttatctgtcgtgctcccttgatacaagagcgacaacgcggtgccgcatggactaggttcccttcggaagtgttgccaatgacagccgccacggctgacgaacaatcaaacccgaattttcttgtctgggaagtcctggcaacgatcgggagaacagggctcggcagggaggagggggaggggcggaagcatgcgcgggttcgagtttaaactagtcacaaccccagcaaacggccgcccgcccggctgatgaactgcgtccgtagcggactaaaaaaggccaacaaagaggcaaaaaatggtatgcagaagctgtcccacgcaggagagaaatatgaaacgaaaagcggtagatcacaagggaacgtgcccggcacggcaactggaaatcgtcgtggccagggcagaacttgcagaagcacgcaacacgatggaagcagacccaaacaatgcatttcactgcgtagcaaagacaggaaacaattgttaagtgctcacgtaacgatgccgcagagatcgcgtacattgacgcccggacgtttaacgcacagcgccgacctttatgaaaggtgccggcgggatcaaattcaagtccacgatgcacgggtggccgctttgaggctttctttaccgaagacgattccgaccgaccacaaggcacgccaagttcttcaagtcgtcttcggtacggacgaagccgcaaacggaaaaaaaagcgcagtggatccaagggcgcgcagcaactgaatgtcagacgttttcggcggctttgctggaggcacgacgagtctgacggaaacgtccaaatttagaattgctaccattttctgacaaccaggaaggatgagtcggtaacgcaaacgagaaaacaaaacagtgcagacaaaaagactacttcgcgcgagatcctaacgtccgggatgccgcgtgcgttttccccaactgaattggtggggcacgcctggcgtacttacacccagcttgattggacgtcgattgcttgctgcgcgctttccgacacctgattcccaaggaaagcaatgccttgctgagagccaacgacggaaccgaaaaagaataggcgagtcaacatcgagtcacgacgcgcgtctggtcctagaccttcgtggggggaggggggccctcttcgggaaaaagccttgatgccctcctgccgtcgcattattgcaaagaattccggcattacagtttctctatccgccaaacatgccacacgccgccgcgcccccagcctctctgcccttcgaggcaaacggtgcatctccgttgaaaagccgacgcattcccctcgacgcgcagagcggggtaaacaggtgtgccggcaacggtctgccacctgaaccgcgtccccccgcaacagtcgacgccatacaacatgctgcatgccctgcactgcctcccactgcgccgaacccagcttggccggggcgcgaggggaaaccctctgccgcggctttgcgtgccaatctgggctacgtttgtctctcatcgccatgccgtgcccggagcgccgagcagagggtaactgcaacacacctacttcggctcgccctttcgttttgagaacgtcccgttgccgggaattaggtccttcgcaagaatttgacgctctttttcttttgtagcctccttctacgtctcgacgatggggttgtctgggcggcaaacccagttacagcgataccgcgttcgtttgtgaatccgcgcttgtaccttcgtggtatcgcgccttgacgccgcgccctcgtacaagtcttaaaatattttccttctcagttgcacgtggaggccgccacaactcaggactcgtgaaacgatttccctgtacaaattatagaaattttccccacgcaaaaaatcggaaggggagctgtttagggtcatgtcttcctctcgatgcgcttcctggcggggcagacggtcaagcgaccccgggtctgtgcctgctgggtttgagtgcctgtgcagtgatctcgactagtatctttctagggagtaaccgtttgtcagagaccacgtgtctgattcttctggtttttggcccgagcctcttttgtagatatgtatcttctctaaacactgtcttttcctggcagcctgggggtaccccgctccggcccttcaggtgcgcgggcagactcgccagttctggttcatctcctgtaatgcctctcagcgtagagttataaaaccagctgtcctgttgatgaaccaccacgtctttctcgccttcttcccttcctctcaatttctttgtctccccagccgacgcacaggcagcccagaatgcgtcaaactgccagaagttcgagccgttgagcgatccttcttgcactctggagcattgtttaccgcaggccactttgccggtggcctggaaattgttgccactccgatgttggtcgcagcactgacctacgaagggagcagagcgacacattctcggtaccgcagaattcgctggctgttgggcacgcgcggtttccccaatggcctggaagtagcacaccagtgagttatttcttagttcaatcttacatatttctcaaagcggcgagccccttcctgccgtgtttcccagtggcatccagccgtggtgaccaccagggtgcggcgtcgtgctgaggctgcttggaggcctccagattcacgcatgccagtgtttcaagccgcatcgacgctcttagttttcctagacggccgctcagaccaagctcattacgtgcaacaaca

SEQ ID NO: 779 - DNA, 1652 bp, Toxoplasma gondii
  source 1..1652: mol_type = genomic DNA
agagagacaagatgcgtgatagcatgctcgatgtccgattctctctcctcggccttctgtgtccatcccgttgggcgtggtcccgcgcaggattgaactcggctcaaaaaagcggcgctgagtgagaaagtcaagaaacctcagaggcgaaatggcagagtcaaacaaccgctgaagagcgacgtttgtgtgcggctcggctcgcgtccttctcgggctccaagttgtctgaaggaatcgcgaagaacaaatcgtggagtgatcgtgaaaacaatgtgatcgacaacggtcttgggtgcacttcacggacgctcggaggtggtggagacgcccgcgaagcgcatgtagagctgcaggcgcagcagcaaagacgagcgacggccaagtctccttgtgcgctgtgttaagccttcctggtggatcaatcctgagatatgaacacaaggcagcgcggtggagggagtgaaaggcgttttgagcctactcgtccaataaccgaagaaagggaaggaagaaaagacacaggatccgtcagagagtcgaaacgaagggagagcgacaaaaagaggatagtccgaggaagaggcaggtcgagatcactgaaagcgaagagacggagtccggttgagaggccgtgacggcttatagccccacataaaagaaggcagaggccccgagagagggacacgaggagacggaccagagaggaccaggagatcaaactaaagacgcgaacaaagcaaagaaggaccgaggaccaacgctaggcagaaaggaagagcgtgacgcgtcgtgggttgctcttcgccgcgacagggcggcggagccagagccagagaaaaggcaaaagcgaaaggccagatgcagcaacagaacggacaagaaagcgggacagagaaaaaaagaagaccagcgacagaagaagagggaaaggcgaagtcttgtcgccttcattcttccaagaatttgaggattttcctgtcgggaatctcctcaggccgctgactttcgccgcgcatgcagccgcgtgcatgcaatctcgcggctgcgggagaggcacaccgcggctagcgcagaagcagaaaggagacctctggacgttgccggcggtcataaactctaaaccctggtcctcttttgctgcacacggcgttcgatttccaccctttcctcgctgttcagacgccctcttcgcgtggaaggttggtgctcaggaacgggaagccgagaggaaactacctggaggccaactcgactgcgcgctggcaaaaagcccagaaagaccgtccagtaacagttgcactcaggggcgtttctcgtcttgcctcttctgttaggtttcgtaaaattcctttctgttccgcttcacacctcgtccccagactaagctgccggcgacgtcgtggaagccgggcagggtcgggtgaaaatcgattttgtgtctggctcgaagttggcgtgagttttcgccctttgtctgtcaccacatcgtttctttcctttccttcaagtctttgagtttgtattggctccgggctctcatcttctttgtttcctttcccttcgttgattttctgctgtgttcctctgccgccctttcttgttccctcccccatgtgtctgcggtcccgtggccacccacgccttgaaga

SEQ ID NO: 780 - DNA, 1611 bp, Toxoplasma gondii
  source 1..1611: mol_type = genomic DNA
gctgccaggcaacctctacacacaaacaagacgacagaaagaaatttttttatctctctctctctctctctatatatatatatatatgcatagcagtacatgcttcaatgacgaccacgccaatagcgtaacatcacaaatacatatacaggaatagatgcacatgtgaggacaactgagtctatgtcgacataaagaactatgctgggagagtccatgtatccaggacgaccggatggtttccttaccgttgcaaggaatctttgcagttgaggagaaaccttctgtcaggcgcgcatgtgtatccttgcgtgactccgagcagacgttttactccgtcgaggtctccggctcgacttagacgcagcatgtcctgctcctcctggtcgacttgatcagttttttccttcttgcctcctacggttttctccgctgcatctcgtttgtctcctttgtctccttttgcgcatgcagcatctctgctggcctccgcctcgagctgccgggctcgctgttctgcgcggcgagcagctcgtcggagatcggattcgctcttcttcttcttcctccctccgcgttccagagcatctccacggcccgctgagtgaggcacccacctcgcaccttcttcctccgagtctcctcctgcatgcgcgcctcgtgcttccacactgtctctctcctcttcactcggtccaggcaaaccagtctgagcagcagaggcagaagcggaagaagagggagaagaaaggaaggaggcagaagaagaggatgaagaggacatttgtgtggcagaagataaggagttggagggtgcactcgaatccatttgggagagaagaccagtggaagaaaagtcccgggcgagacggcaacatacgaagaaacgataaggcgatgaaacgaagacgaggctacgtgatacaaaaacttctgtctcggggaccagttgcgaacctgaggccaagaaacggagagagaagagaaacaggctttctctgtgaaacttgaaagaatttttcctcccgcttcagaagaacagactctctaagaaggaacgaggaagcagacaacgcatcgacggccgccgtcgccgctcggaggttgcgaatccggagggaggagagacatagtgccgccagatggtcgaatattagctaagaaataagcgtgtctgtttcacttttcttcgttctcgcctgcgttgccttctcagagaatttttctgttatgcatgcgcacttcgtccagagtctctgtatgtgcatgcacggcaaaaaggtctggagcgtcctcaagttttgaggcctctcctgcttccccgcatctccttcgccttcttccttcgccagttttgactttctgcaagaaactcgagacatagtctgctgtcgagacaccctcggcttcgtcattgtcctccctctagcctgtctcgcgcaaaatcggtcgaacccgtctcctgtgaacagactcaggacacactcgggagttctttcgcgtctccggtgaatcttccgatctctcccgcctcttcttcccgctcctccctcccgtctttcacttttcctcccttcctgcgccgcacactttccgtctgcatctccaaga

SEQ ID NO: 781 - DNA, 4025 bp, Toxoplasma gondii
  source 1..4025: mol_type = genomic DNA
atgaagaaacaaaagccggacctagcggtgacgttcagacgctgcccgacacagattccggcgatgcacctgtgaaatccagggggactgcgactggtgctgaggcgcaaatcaccagtggtggatataagttagcatcaaatgcgtgtccctcgtggaaaagcagggatattttcccggggctacgatctgatgatagtctaaaacaagacgatgactctggggaggtacctaaagattcccgcgctgcgtgtacgggggactgggtctcagactcttccaatacaggttgggggccagcggaaaagcaagcccgcagcttgccaggcaacacaaaatattcaccaccatcgtttgtcggtgatgcggcaaagaatcaagcggagtggcctgaaggtgatatttcaggtgacgatggtagcgtcaatttgtctctgagttcctccgaagcagattttcaaccctaaaaccccatgagaagtccactgacacgtggccagtcgtgttcacctatgcgcacgtttcctcttacacgtctaccgcacccgttcaggaggcagcctgcgaaaatgcacacacaaaggttttgtacggggagggtgcggtacagtacaagtataacatggaaaagcagcgcagcaacgcattctggcagcaatgatgtaataagaaaggaaatgccacagatggcaaaggagaggatgccacaagccaaaatggcaggtgaaagaccctcacttcttgaacagtttcgtcggatgtaggtacgttagaggccgactacggacagatgagtccctttgtgatcccctcactacatgaaacgctctgatttcatgtttgaccatgaagtcctggcggtgccaaacaagtgtccaataagcatgcgttgggagtagaattttggcgacgctcgagtgactaaggagaagaaatcatgtttgggcggctgggaattgagtgcaagatgaaacaggtgggacggttaaagatttttacacatttatggagtcagacaaatagcaccgtcttggtcagtgttgttttcacaattatgcattgtttgagtgcaagcgaacaggcaataccgtacacgattcggttcacaaaagtgccaatatctttttgtttttttcacggctgcggtattgttactgtttcccgctcgtgtgcagccagctcccacatctcacgaacattttggccgctggaggcagctttaatggcgattcgaccgaaacagattaattgtccatttcctaccatttacacccattcgaacactaactcaggtaccccagatggaaccatggtggtctcagtgaagcggactcaaatgcttagttccaccgcaaatgatttgccctataaatgcacagaaagagacgtggcctggcttcgaaagagtccaggaggacgccttgggccaaacggaaagtgatttattatttgttctggcatccgtcgtagttaccgtgtctgacagccaatcagggattcactttcgatcagcactgtcatgcacaagcgctggaacactttatgtaggttcgtggagatccacattctgcggaagttcgtacattccaagagtctctttcatgatgtgagcatactaggaaaattttcccaaatctttgttgtcgttcttgtcttggtgtgtttcgcgttctcctgttgctttgctcaaaacaagtggctggcttcctggcgaggttcttctgctacgttatccggcgaccggtggtcccgcaaagccttcatagatgagtcatcacaatcagtcatcatcattgtatttgtgcctatggataatgaaatccgtttgtatcagatgtcatttatcgtgactgccccggctaatttacggtggggagcggatagggggataagcaaacaggggggtgtgccagacacaaaaaacccaatgtaaacttggagcgagccgctgcaatgcattcagcaatacacaaagttgcttacgacagaacgaagtgcaatgaagtagtgaccgggtagaaacaggacgtatacaatggcgattggtgttgattgcttgtagctgtccactgcagctctccgcggatgtacttcgtgaaatacaccaaagtctttgaacttaagttgcgaaacgatataccgacttccctgcaagaaacgagcaatgcctgctgaaagaaggtaacgcttgcgagttgattggatggcattctagtcgtaattaagcatgccatgacaacactggcatttctgataacaccagggtggtttcccattcgacatcataacccattttggctctccctacatagaaaatactttctgtgttctgcaagaatccaggaagtctgtgactagaaggagtgtctatctgcttcgctgtgggggtctgagagctgcgttcttctgccccttcatgagctgtgggggcttcggttttctgtcgttgaacgtcaggaacagtgcatgcgtctcctcttcagatacgcggggagagaacccagaaaggcgcaaggcattaaactagaccagcgaaaaaacaggaaccgctcaatctgaaaacggcgggtgcgcggaaactccgataggggatggttgacggcattcagcgtgcccaaacgacaaacgaggaataaaccaccacaaaaagagaactgctcctataagaaggcggtacatggctagaagctggcctaatttcggaatgaacgtttacaaaaaggaccaatgacgagtaaagtgcagggctgcaaacaaagacatttgtggtgattgagatctctggtagctgcggggaggtgtctttggctggtcaatttgctgtgactcaagttgctcaattcgataatctgctccgtaaatccaagccaccggacacataaaagtaaataagaactttaaaaaaattagtttaattaggaagactgaaatggcgggaaacgacgacaagaaattttgtcgttttacaaaaggggagacggacagggtcaccttgtgtcttgcaagacaccgctagcgtactcgcgcgccggtgagggagtaccgcgcctgggcgtcgcgagagaaaaacctcaatagaagacctttctttcggccgggggtttcctagcttttcccttggctttccaccatggtctttcccgttccgtttgactcctttctctaacgcgaacaatagtgtgctcaaatgtaccggcaccgggtcgggtcagggacccaggcggactgggacgctcaagattcaccttttttctctgaatttgtcttcaatttctgtgtcatcatcccctttcattgcatcgtctagctctaagctagcacgtgttagagttgactccacatcacgtttaccatagtcacgagcatgccttgccatttgcggcgtctgtcgctcctcgaatcgtagaaccgcatgcggagggagacggtgaagaggagatttttctcatgaggatctcctcccaaaaacaatatgttttgtcggagtgacaagtcttcaaagggaagcaagtctactggcggtactcctcagtggagtatcaacgcttcacgacaagccatggcagcaaacagttgggaatgcgcgttgcacgacctgtccgttgttccttcttcgtatgcacttttctcgttatgttttcgcaacactttgaacatcttttctttccacgcacagtccgttctccgattgtctaacaggctacccggagatggatcccgcgtcgtaactggtctcctggctggctgtgaaagatcgagaactcgaacgggtaactgccagctgaagaaaggcacaccccccagaaagtctcttcgttgacagaggtgacatacatctccttctgcagctgcgtcggcgagacgcacatttcccggttcccttgttacctaccgagtaaattacattttgcacgcgatcgtagctgactggcggttccgccacccccaagatttgaaatcacgttttgtctgtgacttcttactttgcccggtctatgcgcttctatttgctcgctctgttaaga

SEQ ID NO: 782 - DNA, 4144 bp, Toxoplasma gondii
  source 1..4144: mol_type = genomic DNA
atgagtatgctagatgacaaccctgcaacaattgagtgaagtgttgcaggtggtctgcgcactctgcggaaattacttatttcgtcttcgtagtttgacgaagttcatggcaatggcaaaaaggtgcggtgtcagtggctgcgagaaggtgagaaacgggaagcgccctggtgccattttctcttgatgtgtgttttcagtgtttcgttcgattttccattcgagcgcgcgaattgaaaatacaccattaacacatggcgtatgcatccaatgcggtttaacatgctgctgcgttgtggctctaagctcagcattatgcactctgaaagttgaagagttgagcaaggcagatttaaaagcagttagtcgtcggttgaatgggttcgccgtgtcccgccacttcccggaaaaagcacggccttggactgttgcatgaacaagacgagacacaacctggaaacaagagtaactatatacagcacgggcaggcagcagtaaatgagatgcaggttattcgttgtaagaaacttagaattgcctaccgacggcgtccacttttcttggcggaaaggcaaacgtgcctcgacaagcttcatataacatctatgtcaggtgcgcatatgcagctgtatacgattaatttagatttaccttctctcgatttgaactttggtcgccctctgatggttggctacgaaatggtgcacaatcgtcttcagcgcgggtgaccaccgagagtgtcgacatcctctattatagcctgcagtcgcgtgtcaaagtagtactcatttttaacaaatagtgagactgcgacggcaaatagtcctgccaatcataacgcagatgagttatctccacgcgcagatctcgatcctggatcatctgtacacggccaacatctacttgtaacgtagtaattgccatgcatggtataatcatgaccttcatgttcttaagcattgattatcgtcgacagccctgctggcttacaaaatagcggcatgatcctgctgttgccatgccataacgaactggaaacacaacgtcggcggaattcgggtataatttttgacagacatttaaaagcagactcatacgctgctgtgcgatggattaggctccccccacctcagccacagtggcttccgaaagacatctttcaactcagccaagagtatcgtagacgagttgattaatactgcacgttttcctgtctctgttcagagccacgaaaatccccctccgcccgctcgtaccgcgacacacacgagacgatgcgaaagctgttggtctacaggtcgaccaaaatcggttgccctgctgacacccaagcgtctgtgaagggataggaatagagaacacgtccgcgaccgtaaccctcagtggacaaaaatggcaaaaaccacgtcgaccaagcttaatgtcagtcagaaatcaccacctgtgtaggtagttgtgtgcagacacatgctggcctgctgatctttcaggagcatatcaaacgtgttaaccttgtgttttcgtgaaagttcaccgacgacgttttcacacctgaaaagactgaagcggcctccaaacacattgcagcgtcgaatgcgcttttgctttcagagaaagaggaaccggcaaagtgctcatggcacaccctgcgtaacgggcatttgctattcagtctgttggtaagcgattacacacgcgtcagacgaaagagtatacaaatggagcactgcttgaaggcatctgcgtacaagttttcaaaagcctgaaagtcaccctcttgcagaagtatcctgctgagtttgcctagtttgcgaatgaggggacgacgaacgggagcctgtgacacacagacctcaaagagggcgcctggatggatcgacaaggaacaaaaggcttcaggctacttcagcgggcacgctttcaatgaaaagactcagtcggaggctccaacgttggcgtgcacatgctaaacagcgagtgggaaggaacgagtttcggctgtacagcggtgacagacgatgtatgtgtagtttgcgctaaccccagatccgcatgagtatgccatcacggacaaaacacatgaactggtgctgttcgctgagacgaaacatgttaatcgagggtaaggaattatccgctagacattcttgcacttcagagtggtagtgtgttgccgcctggcaagaaaggctgctaggcgagaaccgacaggaacgatataaaacccagcagaacgcagggcagtttcaatattgagttgaaggtggaaatgaaagctaatgaacggatctgtccataagacatcgatgaaacgttctacacgcgcacaggtccgcccacttctcctgtagtcggcaagcgatacgatgcaaataacccgtcaacgccaacgaccctctctggaacggcaactgaaagaaagacttgcgtcttttcgaaaacctattgctctacgaaattcaacaagctgaggaagaagtatcccgctaccgaaaaagtcgaacagaaactcagtaaacctggacaacaacgtttcctccgtagatgcgcatacgcatgtggctactgtcactcagggcaagtggtgtattatattgaattacataagaaagaaccaacagcgaaaacggccttctgggaaattgaacaatatcaggttggtcttctaaaaataagtcaaaagctgtttcttccggggaagaatggctcttatctgaacgggggctgacagtttgcaccgcatcgactctctgtatattgacatcgtcgccttggagatcgtcagaagggcatgaaaattcgacgtaattgcttccttctggtcatataatacccattcaacaagatctatgctcgactacacagcgtgaccctggcgtaattcctccctgaaactccgggtaacaagcgagcagtctacacgcgtcgctgccactgtgtacatgcgtttcctgcaaacctcttgtacaatctctgtaagtctcgatgcgcacgtgtgcctgtgatattcatcagctgacaagaggggagacattgtgctctgcaaaacgcacacgctgcgctctaggacggcagcacacaaagcaaaagacgaacctctgactggactgtgtgctctgctcgcccctgcccctctctgcctgactggctttcaccatctggaatcctactcgaccgcaaaatatccggctgtgttcgtcgccggttcctgtttcgcgtactgtctgagtgtgcggccattcgtgctttgagtgacgtcccctgcagtgactgtcagtaaaacacgcaagcgccagtggacactacgttttcgggggtcgcttgcgaaagcctccgttttgccgcggtacctttggagcattaaacgtcttgttgtaaaagactgaaactactggattcgccgttactgaccccaagctccactagcagctggcacgagcgaaccgccgcatgtaaacttgtttcgtccgcgcacgctgcatgtgcaaaaaattgtgtgtaacagaactggtgacttcgatgtgactactgctttgccgctcccgcccgtttccattccctcgcttttctctttggacaaaactgcttccaggagttgtttcccactatattttctgacgttccgtgcggccaagccgacaacgctgagatacacgttggcgtcgagagcgcaacgactgaaggcgccatgccatttctgtgtctaccaaacggaacggcacgctctgctcgaagtttgcagtctgccttttctcgtaaaacaaaaggtctggtctttctcccgcacgcgacaatctggtgaatcggccgttggtggcggccgcaccgaatcacatctttgtgtcgatgccgtttctctgccggtgtttctgactgcaagaaaaactttgaatgtgcatgctaggcgcaaatcccgcttttccctgacagttcctgggagacggggaaggagtagacgtttcacaccctgagacactgctgcgaaggcgaaatcgagcgatagcgcgttaaattgcgggacagaaaccccgagtttttgacggctcgcgctccgtgtccgatatcgctgccgtttaggtctgtaccaacggccctctacgctcgttaaagaagtattctgctcccgtgctcgtccttgcaaaaa

SEQ ID NO: 783 - DNA, 4838 bp, Toxoplasma gondii
  source 1..4838: mol_type = genomic DNA
ttgttcgtgcagactctcggctttgctgagagaccctccgaacgtctttttggctgctggcaatacggagacggagcggtgcaggggcgtcgccagcttctccttcttgtgtgtcagctccttctcgcctttcggcttcttctcccccagacgaggatccggcgacgttgtattacctcgcaggagagacgccttggcaccggcagacgcggacgcggcggcagcaggaagacagagggtcgggagcctgcgagcttccagaaaccgggagacacttgggtcctcatagataccggcgggaaggtctttcccccggcgcttctccaacggcttcgaggaagcaaaagaggtcttaggcgagagcagtggcgagtgaggaagcgacttgttggcaggtctatttttcttcagagaggtcacccgcggctttcccagaggaggagatgaggggctgctgtccggctgcggtgccgtcgatcctccacggggagcgaaactgtttttctcgttgctccgagcagatgtgtagcatgctgccgaaacgttcgcatccgaatctgcaggttggacaggaaaggaaacgcgacttgacggagaggaacagaccactgaagaaggacctgaggcacagagagcagcggagcaggaagcaggaagagccggcgaagacgcctgggctctccgcctccttttcttcttccttttttcgtccatcggtggacgatccagaaggagtgaagaactcgcgagaaaagatctgaaacgaaggcgaccaggaaaaacaatggagagtggcagaaacaagaacgacgcggcccttcactcacggcaaagaagtcacggagggaagggagccgcgatcgccgctgggtggaaggagaggaagttgaaacgaggggagagaggcgatgcgacgacagaacaaagtcgaggctggaatacttccacgtaactgctgcggtgtttccagaggcaaattcgcggcgggcaatttgaggggggcctctcggagacttggggggtttcgcaggaaggggacgaaggcagcacaagacaagaggcggattttggctggacaacaaatcacctggacaagtggaaagagcgtcagtgaaaccagcagcgaataaacgggtgtcgaacagagcagagggccgagaaacaatgaccaccctggacttgacgactcttcatcgtagacagccaatcgatgctcgcagctgctgcatgcgacaccaactggcatgtgccgtatttcgaggagagaaatggaactagaagctacaagcagaaacgaaaaaaacagcggtctccctggttccttaaccagaaacagttaatgcagctgcatggacaaaacgcattcactcatcacaggaaaagtcgcaaaagaggggagtcgagtgacccttcaacacccagggggaaacgaagacaaggtggacgacgagggtgggtgggctgggactcgccgtttaaaaagcgcgacggtgcctgacggtagttttgcaaaactggaagatcctttcgacactgactaaactttgtcaccgttccaggacgtagttcttgtcgattgacaaatgcgcagtgcggggattttggaaatcgtcggtttctctgctcgaactggatactctgaccccacaactccgcgtaccaggctgctggtgcctggcattccgtcaggaatgtgtaattcacctggatattcatactctggaatcaccactctgagcaacagacgggcggatccacaaagtatgacgccatcatccaaaatcactgcaaacaggactgcgatgcacagataggtgcatgctctctcacacatatgccagtacagcgccgagtcttggaagatcctcgcagctagctgagtgtgtgggtcattgtttctaccgacatggggtaaaatgagacgcttgatggtcatcagacgtggacaatctgcgctgtttgttcacctaaagatgctcactggttcacgaggcgaaccgggtgtgttgcgagctccgaagaccagcgagtagtggcaaaaaaggaaaacaggacgcacgcgaatccagcggacgaagcgttgattagtcgagtcggtagtcaatccttcttgtcgttcttgatgaaacatgaagaggcgcaaaggatagtcgtgtcatctggaactgcacatccatgtcgggcacacagagacttttttcttcaggaagggagcgctgtgactcccagggacagcctcttctcgaagagaccaacccagatgtgccgtgtgctggtcttgaacaaactcatccttcccagtcgtgaaacgcccggacgcaaagcggacaggggaacgacgaacgaaaatacgaaattggcgaatgtttggcagtcctatcgatacttttgcagaccaaccggccgtcggaatcagttgggcccggcgtcgcaagcggcgggtccttccagttcagttatgataagcaacgcatcatttccgctagtgagtgtcacgttatgacggtagtccaggagagaaactagctctgcttccggattcgtttgctcttctttacgcgcgcagtggtaattgagaacagctctccccattttctgtctttctagcgagttagctcatcgtgtagcaccccgctcccagccgattgagccttccgcggtgcctagggaacgtgaagctggtaccagctttccagggagatgataaaccatggatattgtaccgacttctagtgtgcccttcagaagctgtcatatcgcaatgcagtcatgcaaatttctcatatgtgacgaaattgggcgacgcgcaatgaaagcactgacccaaaccgtataacagatgcttgaaaagacgtcggctgcactcaagtcgaacatttggtttttcttaagcgacgagagacgttttttgtgtgtattccgaacaagaagacagaaacaacttggatttgataaatacaaacattggaaaactacacgcaaaagcgtctagatgcaggaggatgtcctcatcgtaaaacagaatttgtagcagttttagaatctaggctgatcgattcaatgagtcgggttactgtttgtcccatacttattcgtggggttacattttgaaatgtttctgcggagctgttcatgtttcttccttagtgcgacgttttctttacgcaattttcagcacaacagggactctttgcagttttacctggggactgtgcttcagtgcaccgtaatgcaaaaggatggcccgttctgtttcgaaacccgtaagttttttcacgtactctgacagaaactgaacgatagagatggtttctgcgacttcatagttttcttccatgaagacgatttcaaagaaatacatctcaactcttccgctcattccctgtctctttccttcaagcatacttttcgtacgcagtttccgagttcccatctgctgcttggtgacctctggcaagcgaatggacttggtcaaactctgttttgaggaattttagcatcagacccgcggtgggctacgagaatctgtgagaagctggatgggatggtccacctttccaggccagacaggaaggtttttttctcttcagaggaaaggaaacggggctgaatttcactgtctgtcgtcttctactgctgtaagggttgcggacgagaccctctgtgcgtggcttctctgacctcaccctgcaaggcttttccccagcctcctgccgcttacccagtgtaatacaaccaagttggcaagatcgataggagaagaagagtgaaagatctctgtttgaaacagtctcgtgttgggtcgccgccataggggtcgacagttccgtttacaaacaggtttggcgtgatgatctgcgttttccacgattcgcccccctccctcctccccctcccctccctcggttgcgcagcggcaggacacaaccattttccctcctttgttccactgaaaaaagtccaaacatggtgttgttgctgcgttgagtaagaatacaccttttactgtcgcgcagatgtgtgcaccagatgttgttgtcggtgctcgaccggatagttcggtcttctgtcttgtcgcagctgtcgagctcgcggcctcccgacgttcctccgtcacgtctcttcttgcgtctgtacgcttgtgcgtcttccttgctctctccagctgagtcggctttatttcctacgctgcgaccttgcctgcaaagagccgttgccttgggtcgttttctcgattgatcgttgcagatccctcttcgttctggccatgtgcaatctgacgcgttcggatgaacgacgcgtcctcctgcccacccccttgtttcggtccgcgcgtccgcgcgttttctcccgcctctgttttcacttttctctggtgtttctgcttgtgcaaccgttctgcaaggacggcgcagcaaagaagatcatcaagtatcgatgtccacttcgtttgccttgttttttcgctctctttgttttttcgttccacttcccctcgaaacttgccaaaaatataaagctcggcaaaaagctggcacaacttgcatgcttggcctgcggcgggggaagttcctttgggccccgtgtcccatggcctgcgaaacgcagccaatttgccgtcagttcgctgaccagaacgaataaaaataatggctggggcatctcactttgacccggcggtacacacccctgcctcggctgctgtctagacgcaaacgtcgttgttccctctgagcgatacagattcacctgcttccgcctcgacttctgcctcgacgcctcagttctgtgcttgggcggtctgcttctctttccgagcgttcttccctcctcgacca

SEQ ID NO: 784 - DNA, 2664 bp, Toxoplasma gondii
  source 1..2664: mol_type = genomic DNA
gccaccgagagagaagcgatgggtagagaagcctttcccactgcaatgatagaagctgcatttacaatcagacagtcgctgaagtatgtgcggcggctcgagtgagcatcatctgataccaatgaagctgaaagtctactcgatgtgcgcccgaacttccgaggcctttttcaccatgctttggaacttatcaatgcttgggctgttgcttttacacagggaaaaagcctttccagttaaaaaaagatcatgtcgtatcctcttttatggtgtctgtttcatttttggaggctgcgctcttggaaatgctcacgaaggtggggccttcgatcagtgctttgaccaagtgtcagtgtacaaaacccagcggatggtgccggttcaaatggaggtactagaaaacttctgaccgctaatcgtctggagtttccgctagaatccaatgccacgcagagtacagtattcctgccgtgctgagaaatctcagcattagatgcaaactgggtatgtatgaattctgtcttctcgacaggatatatactgtcaacaccgatgtgtggcacgaggagacaacactcactgctggtcacgtgtgtggtagtcagttaagcgtagcgaggatcccacgaaaacagatgacagctgttatttaatccatcagcgatgtgagctctcccaaaatccatcttgcttcgttattggggacgcatcttctgcagactaccactggcaggtcaatacactctgctgttagagtgtcgttctggaaattgtctccatctatacttgacgcattcggcggtctcggcggcagtgcgatgaagcatcacgttcaagtctcatacgtcacacccgaacaaggggcccctgcaagggtccgtccagttcatgtgtaagcatctgtcgccgtatgctccgacggtcgggtagttctagcgaaaagataagaagcaaggcggacatatacagaccagccatagggtgccgtccctgtcacctggtttagacagttctgtatcgatcggcttgccatgattttctctccaagttatggcatttctcatgtagatcgtttcaagacacgacaagtgagtactgaagtgtaaccgggatacgcagccgttcaacaccatgttgaagggggagagagtcttgtcccttcagggtgacaacgttgtgcagatccgtacatgctatcagccttgtttggtcggtgagtgtaagattttttgtacgtcattgcgtctatcgtcccgcgtcggcgttgctgtctgcagcgcatcgtggcctggcgccgacttcactaagcccaggagtgttccgccgagtcataaattacctcttcacataacaggcacgtgtacccgacagcggtgtacaacaaaacatgcgcctttgtgcttcggcatacttcctggaaggagagagcgtcggcagttccacagtaatacaacgtgcttgtcgacgctggagagttgcaaaagaaatttgtggaagctgcgcggatgtattccacttaaagtgcaactcttccctttgtttaatttttttgtgaaggatgggaaggactgtcgtttcaaaataatgttcatgtctgtcttttgttcaaaatttgttgattgcactgattcacgaatcatcgcctcgtccgatgcctcttgtgactaggtcaccggtgtccgtatactgttccaaccgagcaacgagccacattgggctcagctcgatgctgagtcatcgtatgagtccaccaataggcgcccacgatttcagcggctctttactcagattcctgcctcgttaaagacgtactggtgcccaggaataatagttgtgaatttggtacttctcatgagaaccgcattgcctgattacgaaccccaggctgaagatattactgtagaacagcccccgtagctcagttggttagagcgtcggtcttatgagccgaaagtcgtgggttcgatccccaccgggagcatagataataaaagataacgtgaatacagtaaagtgtgcagttataggagagtttttctgaaagctaaactagttttagttttgtttaaactcccaagagtctgtataaactccttcgactcttaaaagtaggcgcgaatcaagcggtgactggcggccaagcagagagggcagcagcagccaccccgtaactattggttcggaaactgcacctgaacgttcgtttccttgagtatttttcgctgcagctagcctctcattaatttcagataatcagttttattatcttgctgatgtcctgtgtcctgcgtctcactggcgtgagacggcatcgatttcacttggctgtcatcccatagtgcagcggaagagatgttgactcagggtcgcacattccacacgggacttggagctactacgacgtgttttggaattgtttccacggtcaaatgagcagtttggattgatcgaccatctctttcagcggtattttggagagacgggaactcatccacagcgggagggattgtcttgttcgcatttgccatcacatggtctcttcgacgtccaccttagtgaagaagcattgcagttcttgtattgtccattccgtcgttttcatccagcggcggttcctagataaaaggcgaagacataattagaactctgttggagtcgcttgta

SEQ ID NO: 785 - DNA, 2352 bp, Toxoplasma gondii
  source 1..2352: mol_type = genomic DNA
atcgtctcctcctgaaacccatgcaccttcacctccttcgtttccaagttcttcgtctcggcgtcctatgtctccacgttcgctgtctcgaggttcttcgcctggacaggagggtgctaaggaagaggcggacgctccgcaggggcgtttctcgtttgcctctcctcggtcttgacttcggtgactctggcgcctgtggatgtcctcagcggaagtcgcggtatcaagagaaacgacaggagacgtctctctgtcgctcgaagaagaaaagcggacactcttcccgtttcttgctgcagaagccttcgctggacggtcgccgagagaggcggaggcgccttcacaccacccctcttcgccgggtgtatgtacacttgacggctggctgcgcggatctgaggcgtcggctcccgcggacgcgtttcgcactgtctgcgcttcggctttctgcgtggcgagcgcaagaggagactgaagagaagctgcttgcgtctccatgatttcggcttgttctggaagagcagtccccactcactgcacgtagaaacactgctgctttccacgacatcatgcagccgcagcactcgtccagaagacacgcgagagaagacgggccgagattcccttctggctcgcagacacccaacacccgtggtgtgcagtgtatgcacacctcaacgagcgagttcaaagacgcaggcgctccagcagaaggagacgaacggcgggaagccagcgaggcgagagaggccgagagccttcgccgcttctgtgtcttccgcgaggcccgtgtgcttgaaacagacagtcacgcggagaaagtcgcagacgcaaacggagcaagagacggtcacctgcagagacagtatttgatacacctgctgggtgcatgcaccggagaaactcgtcggagttcctagatttaggtccacgttgtttcctccctcgaaggttcagacgatcaagagagaagccccgaaaaaacaagctttcacgcacatggagttattcttcttcttagctgagaaggctcgagcggtggagagaaggagacggaaggcagattcccagacctgacaaggtgtctgtacactgcaggcttcggaggggaacgcattcgagagaggcagaggccgatataaggtaaaagaagcctctgcaatcactcagccttaggcacttgcgtgcatccctcccgtacctgtgtatctctgtgaagaagaggcaagaaagaagaagaaaagacacgagaggctctgaggagtaagacggggacgagatgacaagctctgcttcacagacggattcgcttcttcgcgaagcctcgaagacgccggagatgcaaaggcacaacttcttcgactcgctctcctacgtcccctttctcgagacagaaagacttgcgagagcgaggaaaactcagtcacagattgtttgctaggcgacggcggtgacgaaaacgctaaccccccttcgggtgtacacacaccctggcagacgcaggaacgcgtttcgccgggtaccgcggacagtcagacacacgacagcttatcttcaaattcgccatcgacacacagctgaatttcacactgacgaacctctagcccctgcaacagacggaaaacgcaaggcatcgcacccaggttcatctgcagcgcccagccagagcgtctgcgaagaaagcaagctactcctcgtcttgcatgcaggggcaacgcgcttcttgtcggcggcttttcctgctctgccctttccgggacttcgctggtctgcaggactttcttcccgcccaaaaagccacacacgaaagacacgaaaagctgagtgtctcgtccttatccagttctttctcctccgctgcggtgcaggtacaccgcactcggtgagtgtgtaaaaagcacccaggtgcctctctgccgcgttcccccgcttgactcaccaagacactccgcggttcctcagagcaaccgtcggattctttctgcgcagaactcaaccgtgcacaggggagaacgaaagaaagacagatgcgctcttctcctccccgttcttcttcttcctctctttctcctgaaacagagaggctggccctgtctcgctctcgcaggtgtgtgctggtgtactgacaggcgagaccagggagagccttctgcgctctctgcaagagccacgaaaaaggatcttctctcagctgcgtgaactttgttctctcaccttttctctgcattttgcagagcaatcgagaaagggccaggaaaggatcgaactgggtggccggggaagaaagaagtcgcggagactgaagaagagacagtccgttaagggaggcgtcttgtttttcaacttctgtca

SEQ ID NO: 786 - DNA, 1561 bp, Toxoplasma gondii
  source 1..1561: mol_type = genomic DNA
gaacattcataattggaatgaagtcagtgctaaaatcctctgcagacaacagggaaaagctctttctgtcgcgtggacagcgccagttctacttccagtactttggagaaggaattgcacctatctaaaagcatatctgtctacatgtatatgtacatatatatatatatatatatatatatatatatatatatatttagagatacacatagatctattacgagcatgtagatgcacgtataggctgaggtgtcgaccgcaggcgtacaactgtatcttcattcgttttgctggaaaccaggattgatatgcgttactcgtactccgtggaaggtcgactgaactgcaagcatcgatgcagatatatctatggatatagacatgcttgtaggcatgctacgtctagtcggtgcgaactgttctttctcgtttctctccggggaggagaacgcagacggtctcctctgtccgtggacggcggagctcgcgtagagatccttcgcacctggaactgtgcagagtctcactgctgcctttccccagtggaactcggaatttagttgtatttcagttcattcagtgctgaatcaccaatgacgagagtgaaataaaagttaccagctccctcttacttgtgtagcactcggccagttccacaagttcttttttctgtctcttttctcttcttccagacgccactctcccgcttcttccttttcttgcttcgcgtcctgccctgctgtttctctttattcctgtaacaccccccactctgttgttcctcccctttctttctctttctctttctctctttttctctttctctttctctctttttctctttctctttctatctctctcgctctcgcctcctttctctgccgcggcgtggaacgcggagacgttccgccgacggcgacgagggcaccggagcaagctggcgagcgccttggactgaaggagcattcttttccgaaaggacaactgtgcgttgtcgcgagagatatttttgctgtctccgaaaaagacagaaaaggcggcgaacgcccgaggggactctcttgtgcgttctcaggtgtatcgacacctctcggacagcgcgaaaagacgcaacgaagcgcatgcgtttgaaagacctccacacacagcctgcggctgcattttcttttttctccacttctctccgtctccagggagagtctttcacatttgtttccagactgtcgacgcgtttccgtcgcctcatccggctcccttcctctctttcctgtccgctgcggcccggccttcatcccacaagccagcgcggccggccgaccggaacggaaggcgtgaggaggcgacgagacgagacaagaaagttctccaaaacggggaacagccgaagccaccggatcgcgcagcagaaggaaggtcagcgggcaagctgcgtatcgcggagacaagcctggagagcacaggcagagcgggcagaagaaggaggagaaggcgaggaagaagaaggaacaagaaagcgggatcctgacgcttggaaagaaaggaggttgtttttgcctggaga

SEQ ID NO: 787 - DNA, 2631 bp, Toxoplasma gondii
  source 1..2631: mol_type = genomic DNA
cgaaatcgtgtcgaagtatcggtgagtgtccgtggtcgcgtagagagtcgtgcaaggtgggttttggtggacgatgtctctgctttcggctgattttttccggaagaatcacaaggatcaccctgcaaagaatccatctatctcttgtgtcatgaaccgcttttttcgctgaagacaaagaaccgactacgcatgaacttcgtcgttgattctcgtctttcgagcctccgcttcgacatcttctcgctccgcagtctcccgcgtcgtcgactctctcttaactcggcattacgagtttcgccgttctctctttccaccattttcttctcacttctgtcggggacaagcattgccttgtcctattcaggcagtaggtagagttgttggccagcagacgtcgtccttgttccaccacctaatcataatctcctgctccatgtagtaaggactgttcgcaacgtgtaacggtaatagagaactcggagttcgtgtcaagtcgtttcttttttcctctcttctgtcacaccgtctctcgtatttcccctgtgtcagtggccgatggtgatccgagcggcggatgtcacagagcgacgccagagctctggacgtaatactccaggagctcttcgtttagagatgttccgcgttgcttcacaactccgggaggcgagtctctgctttaaccccctacctcttgtctgtgcacatgttgtgattacttcttgcgctctgactctctctctcttccgcctctcgttctctttcgcggagctccgttctcgcctcttctcgatcgaaaaaagagtccccgtcacctttggggacgaagagtgacaccgcgcttcaacgagcagcggatggtcagcgacacacgcagagaagcgctggacccgttcctgctttgtttttcttgagttcttgtttctcgtggagttcatgttcttttctgcctttccgtgatgcacagtcggcaacgtgtacagtgtctcgggtgcttgacgtcgcgtcggcatgccggcaaaaggggagcgaacaaatttttctctcagactgcccttcacacgaagtctcagaaaagaagcaatgcccacacaagacccgtagctttctcgtgaagaaaaacaagatttactggagacgcttctacctgcgaaaaaaccggagtcttcactgaaaaaagtacacacggccaccgttcgagagagcgaacaagactttggtcgtctttttctcttctcggatgtcgttcgttcttttcttgtcttcttctctctttctcgcctttggtcgcgcattcgttctccttcctgctctcgttcttcttcttccctcttcactttagtcatggccctccactgtcgttttgttgccctgtctgtggcgtctgtctcgcatggctaccatgttcagcgccgtcctccttcttctacagctacggcaactgctctgctaaaatagcgagtaggttccttctccttctccttctcggctctccgtctctctaacgcagtgtctccattgcggtctgccctctgtgtcgctgtctcctctctcttgcgtcacacatatataggcaggtacacttgggtgcattgtgcaagcccacaaaagtgcagacgagaactgtttgctctccccttcttctttctctgtatgcctcggttgttcttcctcgaagctctgtctctgcttcgccgctcgcatcgcttgactctttcgttgcgcggtgttgggtgtgccgggagcagcgggactgcatgcgctggcggcggaacagacggcggctctgcgtcgcagaaacattctttttctctccttttcacttgacggattctgtatctaagcgcctcgttttctcccttctttcctcttctcaggtcgccggtcaaacacggtgcgtgaagacatcccatttcatgcgcatgcagagaccacaggacatgttttctcgcgtgcggatgcattttgactttttccgccgtagttttgtcttttttcctcgcatgttttcttcgcatgccatgcttggttctcccgtgacatgcacggagtcgctggatcagtcgtcgtcctgaaatcccccggcttgacgctgcgagagatatcgcgcagcgtcgcgaattccttcgctgtttaaaagattgtgctctatctactgctgctctcccgcagcttctctcgttttcactctattctctgtaggctcttcgctgcttgtcaatccgggtgtctctgttgtctcagccgttctctcctgcgacctttcctcgtccgtctgtgcctctgtagcctcaaatctacaggctcaaatagacggttagacgtcgctttttccttgtcgagaaaatcttcgtttccctgcgcgcttttctgttctgttcctcggtgtttttctctttttcgagacgcgccatgactttttttcctggtttctcagttgctcgttttcgatccttctcggttcctcgctgctcctccaccgaaacttgccttttcgcgtctgttctttctttctccactcgcacgccaagcagaatttcagccgccgcagtcttctgattgcttggcgtttcgggccatccagcgctcctcagcgccgaacactctaagcggagacggagaaggagagaa

SEQ ID NO: 788 - DNA, 4764 bp, Toxoplasma gondii
  source 1..4764: mol_type = genomic DNA
cgaaacgcgttgctcgtcgcgtaacactgcagatcctcggagagttttttgatctgcgctttcaacaagcgaatcgactcgtcttggtatgcgatgcacccctccttcaacatgttgtctcctcgccaccgcacctcttgctccgccagcgttctctccagttcttgaatcgcatcccgcgcctctgctaaggcctggaggctctcgtcgggttcctgacgttgttgcggggaaagaacgaggtgcattcctggtgaggtagcccgtgccgaaggggaagtctcgactctttgcacggtggccgcggagcctgctgaaggggcaagcaagtccggcgaaggtcgccgactcaccacagtcaccttttgctcggtccctggtggagggcgcgtgcgcaacgccgcctcctgggaggcagtgtcattgtaacacttccaccgctttgctcgttctttccagtacatagacaacggccgctgtggttcctcgccattcgacaccacccaccaactcgtgcggcgagcgggagaggcccgctgcggcccaatgacgcagacccggtgggctccatagtaggtgccgacaggtgccgcctcccgttcaacaacgtacggcgcacgcacgcagtttctgtgtcctccgaacgaactgcggcccttgggagccccgagaaaacttggaggagcggagctcggaaactgagtatcctctgtgatttctgcaggcgaacttttcacttcctcagaatgtcgtgctgctacgcgcgtgccaggcggagcggcgatgttgtctcggttgccgctcgggactagttcagtctctggaggggaagacgccgcctggttccgcacagcgccagtcacagatggctccgatctacggagcgcaggagcgccagctgctcccagaacgggttcaaaacctgcctgtgccagggcaatgcctgcaccgggatcaggacacggctgccgagcgagcggttgagacggcattccgggcaaggcactacgagtgacaagcgacggctgagcgggtgctccagcgcgaagttcatcatcgcttgaaacttcctccctggggtacgcctcagtttcttgatctaccctccaaggtgcaacctgaggggcgggcctacttgctgcgactttcggccgcaggtctgattcacgaaccggcacctcgacgacactcctggtaacagggtgtgcactaacgcgaacggcgacattagcaacagatttccctggaaggagactccgagagggcggcagtccatctgtggtcggcttttctgtctctacatcctgcggaggtctttgcagggaaaccgcactttcccgctcgctggtgaccagaatttcgggccggcattcggtgacaaccgtagactcgcgaggggcagcgcatggatccggttgattatccgtgtgtcgatggaaggaggaagcccccagtggttttgattccaacgacggagagtcctccgatggcggctcctgcagcagcgccgttgcttgcgcaccttcggactcctggccttctgccttcgctgtccctggaactagggacacgtcggccgcgtatttttgcggaaatatggacaccggcggcgggtattcagactcgctgctgtcgaacctttgagcagttgtaccagcacacggttcctccggaactcgtgacactgcgacggaggtcgcaaaagaatctctcgagagcaggtgtgacggcaggtctacgtcaccgcgatcaacgacagtgcttcgcgctggggagcccaactgagaagacgccgtaggagaaacgtctcccgaaggctcttgaggctctgcggaagaaaggtgggggtgcatggtggcggaacgtcacccaaagaattcggaatctggccttacatggaacggttgaggcacggcgacttgttgcggcgaaacgctccgtgacggaagtagaaaaataaaagatttcattcgaatacggggaaaagggcgacaaaaaagacatacataagacgaaatcgggagtaacaagggatatagttacaaattttctgtcgacgagtactgcaggatccccccctcatacgcgttctcggctgtgtttgtactgaagagaagcttgtgtcagacaaatacacgaaaaatgtcagctgcacgtgctcctcgtacaggggaaccagaccggaggcaacacgtgcgtcaaatcaatataaactgtcctaggcgttttcactttgacagcatgcaagacactctggagaaaacgctcgaaaatgaggggaacgacagaggtctcgcgtttcactcgcccgtgtttgggtttggagggtcgtccgggagcgcgcgaaacggaggcagcttgaagagcgtggccacagctcgaattctaaacagacactcgaaacgattttggacaacatgtcgcattggctccttcctacaacacatcatctttccgttgttctgcgggctgaatcgtctgcagtcgtcaccttctacggagttcgaggagcgttcgtttcctcgtaggaccttgcacaagaggcgtgaggacggttaccaagtcgaatcaagaaggaacatcagttgacctcgcaaggaacatccaggcgtcaaggagaaaaaacagtgtctttgctcagtgaaaaaaggccgatctatcgtgtttgcagcgattcaggttttttcccgaagcttccgtgcgactccgctcatgaagcggccgagtgaatgagcagaggcgatgggtggtttccagtgcggtcgcggcagtgtctttgtcgtacatcttcgagttgaagaggaagaaaaaatacagaagaagtccagcatgtttttctgaacccttcagaaaaaagtcgttactaccttcaccatgtaaatgacgaacatattcaagacatgaaagccattggctaggccccctgtggaatcccgcgccacgtcacccgagccacctgaagtcagcgcggcacgcagaacgccggtcacccgtcacctacccctgcttgttagcaaggagacagttggagtaaatgagagcgcctcctcgcgtcatccacgcacatcttctagggaaaagaacgggctgttagagagacgtcacacgcttccttgagacgaaacgaaacagcagagaaaccccggcagccttgaaggggaagccgcagagagaccactccagaaggacggtccgccgcagtggccgactcgctcttggtaaaaagccgaccggaacattcgtgaggaggagagtcacatatctctctaatgcgcacaaagcaactgggctagttcgtgtgcaaaaattcacaggacatgctaaaaattgttgtaaaacggtaccccctttcgtgcacagagcaagtagattcattttgacggtttcaacgccgtcgaaaagatcaagcgatcgactttgaagctcagaagtttaaaacgcgcttgcacggaagtcccctcggggttgatcgattcatccaaaatctagtctccgagatcacaagtcgctacatcacacagaagaatgacacatgcacttgacttagaagattccacactcatgttgtaacagaaagcaacgtcttgcaagtgcaaggcctcccgtatcgcgcctttggtcttcggcagtcgactacgtgcaatcgctgcctctgcgatcggcccgttacttctactgtgcaccgaatcattccacaaaccgccatcgagacttcttatggttgaattgcgacttacttttcacctagagtctttctgactttagataacaattttcagcaccgtagagagaattgtttgtcttgagtgtgtctcggcgcccacagcgggctcagatgtcggactcttcgtctctgcagccggaaactttgctgaaagaacgtctcctgagtgccactgcctgtcttccccgtgtaccttcctttgtggcagtctcttggattatctatcatgcgtcccgatccgcctcgattttaacgagtttcttcttcttgacgcgtcaattcctccgcgttcgtcttctgcatctgccgcacgctgccgtttgcgcgttctactcttgcgtagcgtctaccgtgcatcttttttttgctgtaacacttcgttgctgactaccccagtcgcgtccgtccccgcgtttagtgctgctgcaatcttgctttcccggtccttggtcttccgtactgggtttcttccggttgtgtgctcacccgccaccttgtaccttttgttcatcaccgtcttaggctgctcgccggttgctcatcgcagttctgagggtcagccaacgcattttttcaactgcgaagttcttctgtctggttccttcctaccctttgtcgcatgcctttacttctggttcctttttgtcaagtcaacgattcgccttcaaaaagtcccggctgctggttcaacatagctcccgctgtgttagcgtccggattttcccgtgaagtccctgcggcagcatgagccagagggaactgcaatcgtagcttgtacttctttcgcggcttaacatagacaacagttaccaccttcctgttctctgttagttatcacccttcccctagcacttcgtgacccctcgatccgtccgccacagtatgtggggaggcgggcgggatatccaggttttttctcatcctttgcaccctcaatccaagtcgacgtgtcagttgtcacctggtatacgctgtgaggcggctttcttatcgatttctgtggtaaagctgactatttgggcatagtgttatgctcaaga

SEQ ID NO: 789 - DNA, 4756 bp, Toxoplasma gondii
  source 1..4756: mol_type = genomic DNA
cagagacggcgcgtctccttttcggctgtatgtacagtctagaggttcccgcgcttgactggggcaaccccgaagacaacgaggcaccgggcggcgacgtaaagcacggggaggaaacctgctccacggctggagaaactgacgatctgtctctggacgcggtgttgaacggacccttggggaaaccgccagctgacgaagacagaaaggaaggaaactcggtgtctgattcgctggcgaaggcgtctgggcacgaggctgctgcctttctcggcttgctcatcgacctcgtctgcgccactgcctgtctgtgtccatgtctctctgcacgcgagagagagacatcacaggacgaaggagacgcagagtctctcatgctcttcactcacttcttcaggttcttcgtcttcctcttgagggcgctcgacatgttgcttcgcgatcaacttgtggggttcccggctgcgtgcgagacgagagaaagcgacgggagcgaagcggagacacgcagaggcgaagaagccgaagaaagcggaaagccagccccccgagaaaaatcagatgcactcggagagccaaggggacaaggtgaaagtcgacaaacggtggaggagtgggaaaacggcagggaccgaacgggtgcagaaccggcttctgttatcgctgtgcttgatgcgcttctttctgaagaaaaactgaagctggaaagcaggaaaggaaacgcggacgaaggccaatcggcgaaagaggggaagcacatgttcgcatcagcaaccaaacacacatcgccagattgtgagactgggaggcaaaccgagagagaacagcgagacggagtggaggcgggcgaggccgcacagggacgaggcgagcaccttgaggtgagatccgaaggaggtcaaaaccttttcagcatgcgcactacaaaactctgtcgacgaatgtggatatacgtagtgagaattgtgtgtttgcatgcttgcacatattcattggtaagttggcatatatagaagtatgcatacacatcgatctacaattatgggtgaggtggcgtactgctgccccaacggttcacctttgcgctctctgtcaactcgcagagaacactgcattttcagtttttcgtatcgaacaatttcagcgatgcgctggggcctgcagtttttctccttggatcttcttcgaaagaggcaattttttgaagggtcagtttccacagcgtggctcctctaattcgcgtgcccgcgtttcggatttcggttttcccacaaaacggcttctttctcagatccttctgacctgtctggcgatcgccctcgggatccacgaccgcgcgcgaacacgcctggcagagacgcactttggagcgcgacgagccgagcgcatgcactggctgggtgtgtatcggaggacgaaagccgaggaacaatggcgaaaaagaaacgcacagctgcctctctggcggcgccatctcgcgacgcaaggcttcgacccggaaagagaaacaggagaaggcgaagctagaagacttagcagagaccagcagggatgcctgttcttttcatctcctgttcggaatggagagcaagtggcgggcagcggccaggcacaaacagagaggggagcgcgacccgtcctactctcagatgatgatgatgatgacgaggcgctggacgcattggagaggaaagagcgagagaatgaagaacgagagtggagcgtcattctgtgcagggatgaaagtggaggacaagtcgttagagagatctccaaggaattgcttcatatcactgtaagtctgcactcgaagcgaaaacagccgcgctggtatgtgccctttaccgcctcacgtttaagttgacaggaagcagctgggagaggaagaagtagaggaagtttgaatgactatcccgaatctgccaggcagcgtctgtggttctccgatgcagcggtagcgagagagaaatccatgaattcgtggggaagagcgactgcaaagcagaagtcgagtggaagggaccttcaaggggtacgggagtcacgggattgcgtctgtttgagaaacaggctgttgctttcatgcttgttctgttttgtatctgtggtgtgattcatttgcgaaagcagctgccgcgtgctgcgaagatgctgagtcgaccaggaggagagacacgaaatgcccgcgttctatattttatcaggcgtcacttgaagaggctctctgtacctccccgttctgttttaggggagagaagaacggcagaagacaagtgccagtaccaatagggctcatcttaagaaaccggatgaccaaaacagtagcctgttgtggaaagcataaatcaccacgaagcgaaaagatggtgaaatgtctctaaagtgtaccctctggtagtgcacttcagcaaagctacgtctgtatgagaatgccaaagatcagaggcaaaatctgctgggatcgttcttctttccgtccaccttggactcgcgtttcggggaagtcgaaacatgccttggctttctttcgtgcattccgttttccttcaagtgtctctcctcattcgtctacatcttctctgtttcattctgccgtttcttagcagcctcgttcgcgttcccctctcgttttgttgatcctccatgcctcgcgacttcctccccgtgttactctctgtcctgaccccattcgcagtatatttctcgctgcttcctgagcttatcttttttctctctgtgacccttctgtagcctagaaatcgccccccgtctgacgtatcaggtggacggcctccagcaaaatttttccaaaacacgggcggtcatcatctggacatgctgagtccccatcggaacagcaactttcttatcgagccgcgacttacacaatggaaagcaccagctggacagcattgctcaagactcgctacttgtcacatttctgaaacgcgtgcccttctctgtcctcaccaaaagatctggcgcactaatttatttaactgcaaaaacgcacagagccggagtgagccaccagcgaaacgctgtttcaataaacaataaacgcttccgtctgctcagtaggcggacccacacaacgcggacgtccagttgtgtttctatctgattgtggcggtgtctgaagaagtgggaacgcagacggggtgacgcagatgttgaatcgttgattcaaggcgcagtttggttcgcttttccatttttgctggtgcctcacaggatgggtcgccgaggcagcctgctgcacttgggggtcgacaggttgctcgtgatctcaaaaagcaaatatgaatctgtcatccttgttaaatgcacgtcttgttgcttaccagttgaagactgcccgtgcaccagggaccagcagaaagtcctagcataaagctccgtacgcggggagagcctagcgcagctccgcgggcagggtgtcgatccgcagtagaaagaagcatgagctatgaagttttcgtcaagatgcgtattgcggacatttcacgcgcgtgacagatccaggaggttcctcaatctgtgcggctgagttcttaagacgccaaaagtcgctgcgcaacattcttcgggacgggcgccagccatgtgccttccacagggtagaatgtggcggcaagccaccgccagacaaagctgaaacaaaagtgtggtaggtatcggaacggcgtcgcaattgacggtagtaacgggcacatctccgggctgtagacgaggacagtctgacgaggcgcatgtacccagaacgctgtgcggcacagctgctagagtagacgccgcttccgcgatgccaacgcggtacgattctggcgatatctggaaaagacaaggcgagtcgtcgcatattcatttccaaaatccaaacggtcgcagtctcaaagacgctgccccagctagagcgtccacatattatgtggagcaggctctttctctccactgtagtgatgcgtttgtcatttaaaaaatatcacagcgtcgacagagtcgcggtgttttaggtcgggtagacgaacgtcgattccctagcgtctcgcggtgctttgatgtgcagcctaatgaaaggacggtggcccaacaacggcggcagttcctgtgtgtgtccatttctaaccggacaaaggacgttgcacgatatgttgctgacgccagccacaagccggtggcgccacgtgaaatgcacaggaaaccagtcagccttccggcggtgccgtgtccgagttgttatgttagtggaagtccattggtcatgatttgtcatttggtgcgtgtcatttctcgtgtcagtcgtccgcatttcatgattcccttgtttcgtagcacagtgacgcggaagccggagtcaggctgcgacgcgaaacaagcgtcgccggccacatccgaaaaccagtaaagagtgagtttttgcttcatcagcagctgaagtataacgagtatcgtcagttaagtaaggtgtcccagactgttttgctcacggttgcagtcgtcagcgtgccggcagtggagcggcaacgtggataagtcgactcctctgtgaagttcactgtggaattcgtggatcaacatcgttcttgtcgacggtattgctgtaaataccttgaaccagcactactacgggactagacccgccaaagtgtgtcccttccttttcaaacgaacgcgtatccatgtgttgtttgcttggttatttctgacgtgttcttcgaatgttcattcccccccccctcccgacgtgaccgga

SEQ ID NO: 790 - DNA, 4864 bp, Toxoplasma gondii
  source 1..4864: mol_type = genomic DNA
atctccgcagacatatgtatctctgtgttgggacatataaaaacgtatgtacactatatatatatagatatagatatatatatatatatgtacataaacacatataaatatatataaataaatacctaaatatatatgtatagatgagaaagagggaaactgacagaagaaagcgggtgctgcaggagtttcaactttgttgatcacgaggcctgccgagtgtttcacaaaaagttaaggatgttgttttcgtttgccgtcttcttcacctgcctttgctctccgccctgtttctttctcgtaccagttgcatgcagcggtgcaccgtccgcgccgacgtgtttgccgttgacccagagaccttgaatgactcctcccgagaagttgagggagatgccgttggcaagagcgcgagaaactccggaaggtttcagatgaaattccacaaggatttcgccagcatagacacatcggccactgttcagaccgctagctgaaggcgccgtagtcgcggcagagggcacaaacgttgacccgcctacgagatgaatgagaagtgagtagtccacgctcctgacaatttcgctgcgtccacgagcctctgagtgttcttgaacgtctgggacactcagctgcaccagcgaaggaaagagtcaccggaaacataacgctagcagtcccgtgcagaggaaagaggtggaactgactcatgtacgaagaccgagtcacgagagctacgtcgagatctggacacgagagggccagactcctggatgaaaagaatgctaggatgaaaagcgaattagccaaaaaaggagcgtcacaatatttcttaacataaattcaagccggttcactagagagtcaagcatacgtgttgaaatacgtacgtgtgcaactggagaaagtgttacgtctgccctactgtctccaactaccgggctgcctctacggccgtatatatttccatagattacatgcgttccctcatacttatatattcagggcagtagaattgcagacccagacagctggatgggtagtcatgcattgtccgctgtctatgggtttgagtttgacagttgtgtttttttaggaatgacaagtagttttgttgtgggcgctgaaaacgaagcgaggcactttatctctgccaccagtgcaactcgcgatgttccctagtctgcaactcccggagagcggaagactctttttgtgtgaatggcagctcgttacacaagcaaaaggagttcgtcgtgtttcactgacttctttgtcatgcaaccacataggctccatgcgttccttcgtcctcctcgcttctgcaatccaactgtttagccaccatctgccggcgtagagagctacgccaagcaaaccaagaaggaccgcctggatgttcccgcctccgccgccttcatggaaatcacccatttttgatttgaaaaagaagagtgacagggcacagtctggagtgaagcatcctaatacgacggagaagatctattcagctcccgttcgcatggaggaaacaccggcgaaaaacgtgttagagaagacggaaccagctgctctgaaacatcagcctgatgctgaataatatatcctctatcacaggtgatgtccgaggcggctccagtgtgcctgcttgttgaccatgaggaaaagcgtggaagatacgcgcgccctctctcgaagcgaagtgatcagactcgcggaagttgcattcgcccgaagctttttaggatttggtggaaacgcgtgtaggatacactgaatatgatttgcacgtaagccgccacacaaacctacaaactcgtgtttacacggccgttgcgtcaaaggagtgtttcttccctatggattggctgtttgctacccaattgagttccggtcgaattcatcaaagaaccacgtctatcggtgggcctgtatccgtgaaatggtactaatccaaccgcagagattcgagtgaattatcgactcaggacaacgtctttgtctcacgtggggaaaagtgctgttccaccctgcatgaatccctgcttccatgtataagcgccaagaaatcctagattcgatgcgtttgcgaaggcaagagcagcaggaaaagaggaccgatcgaattcaaccgtttccaagtactgatcagatatggtgtaccagcagcagaatctcttgagtccgcgttgcactacacacgctcctttacacttttcggtgacagtcaagaacaaaagaggggttgcacaggcacaatgtgagtctgggaaacgcggagaatgataaaacagcaagaaaaggaaccattctcaacgccaaactcggacacacctcgaagcgtccgtggaccgacggcgttcctgcgtggacgagaacgactttttaggtggatcggaagcgggagaaccaattaaaggacgaaaatcctcaaaaacaaagatttaattaggttgcccgcatgcgtcagctcgtttgccgtatgtaagttagacatgatccaaacagtgcagttcctcattctttttggtctcgcgaagacggacggcgaaaacgcactgccacttttgccctacgggacgagagcgcaaaatgtggcttagcgtcgaagcaaccaaccacatctgccttgcgcttttgctctactacggcaacattgtgttttccagtctgactgcttctgagctctccgcggcagaatctcgaacacaggtggcaaggaactacagtcacctagaagatgcctcagaagaccgttgcctctatgggttgtgtggtctgcaatctgaaaccgaagtgaatggtacatcttgcacctagagacacatttgagtttgatgagcactgaaactgaagcggtaaatcgtgctcggaagaccctctggaggtttgctggtcagtcatagctacgtagtctcatgacaggaactcgtaggttaactcgaaatgcaagtaatacgaataccatcatactgttgtgtccagctgctttatctatgatacgctgttctagatccgaagttgtaaatcgtaggtcgccagtccagtacagatccacaaaatgccgttgagctgcattagccatataccactttgttacaccaccgctccactggggaatgcctaagacaggcataggtttggacttccacatcatgcgatatgatgtagtaggacagggcactcgaccaaatttacgacagatgaaaatatcgcggatgactgtatattagcggcaaaataccgaatatggacatttaaggttttccatgctccctgtttagaaaaagaggatagataatagtaccgtaagtacataaactattaatggatttgattatgggcaatctatactgcctggcatgcattccagtcatttcattgtcggtgctatctcgggattcttttatcagtgtgtgtatagctctctactggcagccctcaagccagctgactctgcagctggaccatttaccagcttgcataccttctgtgtcaactgcagcctcagtgactcctggcaacattcattttagaaagcattctttagagaggtatgtagaccagctcttgtagccgtctcgaaaaaggaagtcaagtttttttcataaattccaagcaaacgaagagtttcttcagtgatcaaccgcgtgtcaggacaacaagaatcccacccgtttatctcgtatagactagcgtcaggtaaagaggctgcggaagtgaatatcatgaaatctgtaccgctgttgtgaataagtaatagtggcacctcggcgagtcccggccacagacaaccacttggaactcacctgctagcattcgtcttcggggacagcggttcctctgaaacaaaccgactatattccagaatatactcatatataaatatatgttcgtatatgtttgttattttctaatcaatttagtgtgtgctacaaatgcttctagggggaaggtgtccggcttcggcactgttggagcgctgccgaacagggaccaaacaccttacatctctgcgcagcaagagatgcacagttcatggtacctttatatttccaccgcaggagtacggaaacacgtttttctgtctttagagtctcgtctttgtcaacagaagtcgaggacactgacgttgacagaagcgcgtctgtcgtgttagttgtgtccgcgtttgtgctctctgcagagcgtctgtgcctcttgaaccagcaaagggttctaaacggttgcaggacggaacggcagacggaaaatgcagacggatcaccagaatggtgcactttcaacctgtcttcttgtgcccttgcgactgtcaaggctcgcctgtagacgctattccacagaacattacgcgtattcaccgtctttcaggtgtctgtgttgtcagtaaaaagagcaggccgcgttgacgtggcacagagcaggcacgatacccatgtacgatgtgtcgtcgatcttggcgctgatccagactgtaacgacctgggttgttgcggagggggtccgtcccttcgtccagcaatacaaaagtcaattgaagggggaaagcaagctcaacagttgcaaaacggaaacggaaagatactttttcttatccgtggcggcacccttgcaacacgtcccaacaggtcctatagctcagttggttagagcatccggctaataaccggaaggtcgccggttcgaccccggttgggaccactttttgcgatgaagctttttaaaaaaaccgcatttttgtctcactgcaatagcactgtctttgtttctcccaaatccacgcgcgaaattcatattttggttggtgttatatgcatcaattcctcttccctgttcccgaaaaccccccttggataacacacca

SEQ ID NO: 791 - DNA, 2590 bp, Toxoplasma gondii
  source 1..2590: mol_type = genomic DNA
cctttgttttggctctcttgacgcgctctggctccatcttttctctgcttctgctacaacgcagagactgcctttccgtttcttgggacactcgacgcgtggcggcacgtgagtcctgctttccagttctttccctcggtggttcctccccaaattcatcgtcgcggcctctttcatcggcaaaccatttgctgcatgcatcgtgtcgcctagccttttgctctccaccagactcggatggaagacacagttgccatcgctcgacgcgcgttcctgctgggctcacgtgcagcaaggtggttgccccacctgcaaagggacgacacgccacagcggcaacaaaacatctcatgcagtgcgcaaaacgaattgaatgtcaagtccctcagaaacaaatagcaaacgttagatggcatcatacgtgaggagcagggtccaggacctcgtctacctgccaactggggtttagctcgaaaacgagacccaattttcaagtcggcagcacttacgcgtttgaaaagttgaagttgcagcgcatgcagcggcttgccgggcggccgctccggctcctggcagcggctcccatcctggcaaaggcacccacatcccctggggggttcctgacacccgtttcgctccttatccgcctgtctgcgtcccgcgatttcagggcgactctctcctttcagaggcaagtttgtttgaaatggaaacgcactgagtttccagagatgataggtctccaatgcgaggcctgatcactcttcaacgtactccggcaaattcagccgttctcacattgggatggctttatcgtttatatgaatcaacagcccgctacctgaagaatgtgttcctgtcggagaaaaaaaggagctgaacgaatcggacgtcctgttttggtaagcagtgcaacagctaagtcagcggtaagatcctcacggggtgtcagcctcctagttcaaaaactcgtcaagacatcggtaccttagtgccactgagatgggcgcgcacaaccgccttcctgcaggggctttactggaagagtcttttggttggtgcatctccactagaagttccatccaatggcaaacaatgagtgaaaggccacgcatgcagcaaaaagcacggatccgccagcggtgacggatgagccggtcagtaggaacgatgcagaacggacgacgccggtccgattccgtggttcagtggcgctacagtcgtcagtctgcctgcagaaaaaggttttcgttcactgaaagcgcatcaatccgcaaaactcccggtgagttgtgggcaaaattttgtagaaaatgtaggcagtatccacagaatcgagacccagatgcagtggcacaccttgttttcaggtgtatatacaacaagtacttcagtgcacacgtcaaaagagttgtgcattgtaagcgtggatactcgagtgtggtaatgcacgcgccatcgggtgtgtattccgtcgggctgtcgacaagaatcaccgtcggctagccgagtgtgtgttgacgtggatgcaatgcgtgtagcccgcagaagcctgtagtagacagttcacctgaatacatcaccgtcgaacttgaactagaaagaggctgcggtccatcaaacgtgaggagtcgacagatacacacaccgactgggtctgcagattggatgcggtgaaaaacgacgggaccaaagcgtttgtgtgtcagcctcagtctgcgtgcttgggcccgtgagcgaaagcagggggtgcgagccgcgttgaggggtttgaagtcggtgagacgaatttttcagagatgaaatgctcgcttaggaactcgaccgtcttgattggggctcgctggatcctcatttcaccctgcgcatgcaactgcatgcagctcggaagaaaaacgctttctcgtgctgagatagagctcgctgcacacagccgaaagtcttgtggtttcttcctacagagaatacagctgaaccgtcctctctacagcttctcgtcctgtagcgactcagttgctccaagaaagttagttgcacgacactctcgctcgtggagtttctcactcgcgtgccgcctcactctcgggctgtcgcgatttgctgtgctcaaactcttcataaacttctttgtctgaaccagttgaacacttgcctagcacgtgctcgctacggctttttgtgtttgacaccatttgaagaggtacggcccggacgaaggtgcaacaagaactcggaagaactgtcgttttgcgtcgcgtgtcttcggactgttctcccgggcggccttccagaacgctcttgatcgtcttgctggcaactttggtgttccgtgtttttcttgcttgcgtctttcaaataccgtgtagtttcgtcatgaatgtcgtaaacatcgattcactctaactctgtcgctgcctctgacccttccacgcatgcgagatccccttgtgagccgacctcgtacgggtgttccctgaatctccccttctccaagtattcccacttgcttttgtttcatctcggtcgtcccctgtagctttttcttcaagtcttttctttcattccactccacgttccaggttggactcaa

SEQ ID NO: 792 - DNA, 5055 bp, Toxoplasma gondii
  source 1..5055: mol_type = genomic DNA
gagagaaaacgaggaactgggtacgaatggctccgccagattttacacaagcatatatatatatatatatacatatacatcgatacatatatctacacatatattatctacttatatacacatatattatctaaatatacatacatatatatcaacattagatacatacacatatatatgtacatatgtgtatacacacatataaatatatatatatatatatatatgcatatatatgcgtatacatgtatgtgagtacacgaaggataaacgactagaggaagagaacgccgtcagagtcaaagagtatcaaaggtggttgactggagatgctttctttgttattttcagtggggtattctgagacggaagacatgccttcgaaagagagcctgcttctcaggtttgtcgtgaacatttactcaagagaagacgctgaaaattcgatcacaagctgccggtcaaatgtggtctccttgaaagacacttcatttcacgctggtcttttgagctagtcttttgaacctttatcggactcggcgctcgaatggttgtcaagctgggcaagaaacccagagagcggttgggagagaacttctagttcgatcggattgtcgaacgccgctctgaaagggaggtcgcaggccctttgcggagcgtctctgtgttcagaagataaagcagacacgaacgacgagaaggcgcgaaacgcacggagcggtcgaggcgcgaccctcgcctctcaacaaacgtgaagcgtcctcgctatgatttccctttgctctgaacaccttgtaggtggcgattaaagagccttctctcgaagatatagaggtgaaaaggcctttctggcagtgaggcgtggattgtttcagaagtctcatcgcaggtgtacactcggtctctgaaggggcttttctgccaacgcgagactttagacagtctactggtgggtcggcaccggggagaaaaaagggtcgagaggagcaagaaaacatcagaacgcattgacagagaagagagaggaaggaaaacccacggcagaagccaagatgaggactgtgtagccggtgtggatcgagaaagaaacgcacagagagaacccgacaggtccctcgcactgcagagggacggcggagctaagagcaaacagcggagattcctcagaagaccgcaacgacaacaaagaaagttaagaaatggaagaaaagttgtctggctggcgtccggatgcgaatgcggtaagcagggaaagtcctgctggagacaggaacggtagctgggacggtcccggcggaaaagtggaatttttaaacagctgattccccgaaaaattccttttttgcgccgctttgcggcagacaataatgctcatttgaactataataaagaaagtagatgcattttacgagatcttggcgcgtgcactgctgttgcaaatgggggctggcaccaagcgcacggagcgcgagggcaccccccagcttctgcgaagctccgagagagtgttcagggcgtggtattgtggcgacagagaggaattccttctctattccactccatgttgacacaggccggcagttaggaggccattcgctcctcagagaagggaactcgatgcggcaaaggctaacgagcaaccgagaacgttggtggagaagtcaaaaatctgtagggttccagttgacaaaattccaacatctaacgagacaagctggttgacggttttggacgaaattactttccacagcgcataacgagcctcaaaattacgttcaagatttaccgcgatgtgagaaacgttcgaaagaagtctgtcaagctggaaatgtgttcgtttcatgatatgcattaggaaaactcaaacctgttccttgtgactggagtttcacacgctgtgcgtagtaacaccgaggaagccacttcgtatctgcgtagagtgacgggacacaaacccaacctgctatagtcagcaatatcttggaggagtgtttcttcgcagagagttgtcaatctagcatgcgaaatggaagtgttccatgaagtctacctggaagaaggggcttgacacgaatgtcgcaagtgcacacttagaagtcgcagcagtacctgcgagcaccggaccgttgtcgagttctcgacattttctggaggaggcaaaggggataccgcactctgcttcatctgttgctcatcaggagtgatcaaagtgagctttgtatcgggtttctcggcggctagtgtgaggctgaagccgagaacgcaaggaaaacgaacaatgattgatttgggtcaaacgcggaaaaaacagttctgcatcaccaacggttcagtttcagcaaaacagggaagccaacgatgagggtgctgcctgatctaagacacctaaaatttacaaggcatctctttgtggtacttccttggtaacatggtttactttcgaccggacaaacactactagtgaacaggagtggagaggggcacgatgggtgtgtcgcgctgtctgtccacgagaaaaaccactcatgtgtctttgtttcctgcagagacggacagttttacgtggcagggaaaaggatctacctcagagtcaataagacgcgacatgtctttcatccgtgggcgcttggcccaagccgtagcgtcccggtagtgaacgcggtatgtgctgctgatttttcgcccgggtggcctacgattttccatgtgtctttcaacgcgaaaaaggccgtggaatcagtcgcttctcttgggaacctgcaaaacaaaaaaaaataacggaacagccccacagtgaagaaacactagaaaagggcgcgcacggaattgaaccatgaacctgccgatctgcagtcggccgctctaccattgagctacacaccctgtcgaccagctaacgagttagcttgcttctttccagaagaccgcgacagaggtgaggcagtctcatcctgtaactggcaaaccagacaacaaattaacccacagaagtccgattctcaagcgtctgagaagggcgcgcacggaattgaaccatgaacctgccgatctgcagtcggccgctctaccattgagctacacaccctgtcgaccagctaacgagttagcttgcttctttccagaagatcgagacagaggtatggcatccgctcatcctgtaactggcaaaccggacaacaaattaacccgcagaacccccattctcaaacgtctgagaagggcgcgcacggaattgaaccatgaacctgccgatctgcagtcggccgctctaccattgagctacacaccctgtcgacgagctaacgagttagccacgcgaagtgcatcttcagcttaaattggtaattcattgatataattatcgtccgcacgtactttaagcagatgcagggacacgaacggaacgaacgtgcgcatctatgggtttcaaaacttcatatcgccggatacaatgatcacgtatgctgtgaaaggaaaaaccaaacgcttttttgactcacactcagtaaaacaccgcagaaatcccggtgagtcggcacacattcggtctgggtcaccgggatgcctgctgtatcagaaaagacgccaagcatgcttcatggaatcggacgggtcgcccggcccctctcgcactcatgtcgagaaggtgtgggccagacaaatccgtagactcatcgctctcgcgcactcattcacgagtaatgtgaagcacatttctttcggctgtacacaaggaactcggcaccgcgacgaaatttctaaaggatgtggagttgttacgcatctaaccaggaaatttgcttacaagcagctgtttgcttcgctcccgtgggctttagtaagttaaaattaaaacgtatccgagtgtcatgttcacctggacgtccaaagaaccagcagagatgctcgtatactttccactatcttcgcaggatatgagcaggttcggcttcggatcgttgcagcagtctaaaagaaaaagtcgcgcgccagaagggtcagactgggtgggtttttgagctgtgttttgacagaaaccggacaagcgggtctgtttctcgtagaaggacatcgaataccacccccggctccctttccggtctgcatcagcagattgtggctgaagggtcgacttgcagttgccattgagtgttgcttgtagactcgttcatcaggaattgcgaactctcgcaaatgtcgaaatttgatgttttaggaagggatttgacaacgtaatcacgatatctgaaacgcaaactcttcagctgcatctgcctgtacttgctagcacaacggagagtctcctgtgatataccgtggtcgattcatctagtcgtaacttccaatcgactagtcaccctgatgtgagccgggcctagctcgaggcgtcgacgcagtcgctcctgagtgcaatcattcacctcgatcatttctaatacagaaagcttctgcaattgtacaccaccacttccattctggaacctagattatcgcgatgttccatttcccgcgttttcatcgagaaaagacaccctgttccaatgtaaaccgcaactattagatgggatccgatcggaaaggatttcaattataggtaccaccggccgcataaggtcttccaccctttggccagccagcagaagtcgagctgcactgaatccggggggtttcttggttgtctgttcgccgaattcgttttggttgctgggtacacggcggctcttcagtttcaggatttgaagggccggatatctttctgacgaccgcgcgcagttggcatctgtgaggaggtgacatgacagaggaacagaaaactgtcaacggtcagcgagcctttcctgtgactttgctggccccccaagaacgataagaaccacaggcattccccgctcggggcgtggcacactcgaagctcgagactgtgctcgaagaaagcccaccgcaggtgtggagtttcgctcctttctgacactcgcgagtcgttttattggattgttgaaaaactagcgacaaaacagattccaaattacctccagtgtcgagcagcctgctgca

SEQ ID NO: 793 - DNA, 4322 bp, Toxoplasma gondii
  source 1..4322: mol_type = genomic DNA
tcttttgttacgagcagggaaactggaaggccagtggatcacctttgttgctggcttattactagtctccgaggcggtactgaaactgttttgtcactatgttgctatacatggacggatcgaagaagatccaagcctgtgcgatcaagacgtctaagtacaatgccttcgcatatcgccgaacgtcaaatagcagtctttgacttgtcgcaaaaggtcaacaccacggacgagcaacacggcgtggcatcgaccacactgcgagatgcgttcagttagagacagaaactccaggtttgcactgaggtccatgagataaatgttcgaggacatgcaaggcgcctcttcctgcatactcatcatgcatgctgcagctgctctacagcagccgcacagtttgtggcttgtgatgtgcttcgtcgacctgaacacagagggaagggacagaacatattatactgtttccaatacacagacaaaacttcgtgacaagtgagacaaagacccgttgcggctgtcagtaatgcacatcttcagaagtggcatttccaaggttccaagaaaaatgcacatatttgcgcctgctccgaatcaaactacgtcgtggcaaatctggtgtaatatagttcctctagcttccgcctgctccgcttccgtacatctatttgcaaccctgtaatgcatcaaacaatcactggcggtatattacagtctctaaaaagttgcgtgcacgtgcacgtattgtatatgcatgggtttttgatagtgcttgtcgttactgttgttttgcccattttatcgctgtcagaaaccggcttattgcacaaggccttctgaacctgacaggcccacataactaacgttggaccgtgatgcctaggcggtacttcttgggagtaatcgtacaattgtgcgtttcattgtgtgaagaatgcaccgtgattattctaacatctgtggatttgttcgtgaccccatcaacagtcgttcgagccggtgaggcaaacggttgtgtgccgcttctaggagccagaaaggaccaagccattacaagttttgcgaacagtacaagggggctttagatccattgcagctgcccgatcacccggattccgtaccgtcacaagccacgtctgtgaccgtgtattttttttctgctcgagaaactcaacagcagacacgccttgcatcgtggtcacgacgctccgttcacaggctttcagcaacacaaagagaatcaggtgtccatacactcgtcagattttgctgctcccaggcatcacaggttcgtccttctggtgcttaagggtgccgcaacgacagagtgttactcttgtactctcgtatcgattttgaagatgcgattcaccgcgattttgattttgagcgtctcctttatggcgtatggccgcagtcaaaatatatcacccggcaaccatgtgaagcacgacaagcaagcggctcagcgtttccgggtaagaggcgcgctttcaacagtgtgggtactcattctaatactgaaaatggatgcaggcaatggtggggagaatcaggagcgtaagcagtctcattggatatctttatctttctgagacaatccccttcgcacgatcaggcaacaccgctcacggtcaacagtccacggcaagtgcaaaaagtgtcagacatccaggctggagagtcgctagccacttcaacagaagcggcagcgaggattcacaagtcaccagagtgtaaggtaggaacctgtggtggcagtgcagccgcagtttttttaaatcctccaccagcatagtggcttacacagtgccaccgtcccgcaggtgagagtggaaaccgcgtcacatgtcacggaacctgtcgtatgaccccatgtgtcttcccagttccggaaggcgaggttcactcaggctcccgcggtaaggtttccttccatccaaaacataaaattcggtaacattatccgtctcagattgctcctacgtccggtcctgagattagtgcgcgacgtgttaaaagacacaaggtaggagacttccgtcaacgattcagggaagtatcctatttctcttttcaagttaccacctaagactatgggagacctagaggacgaagaaattgctgccgaactgggttcgaacgtcactagacgaaagcatatcgcggcgccagagtttgtgtatgcggcacccggcgctgaagaagtcctttctgctccagcttcgccaagaacctccgcggttccgtctcctgcaacagttgccccgtctgaagctgattcacaaggggtaataactcaaaactttagcagcacgatttttttacgagctctacctctagggtctcgtgataaatgtgataacaggtgaataccttctacggcaatggtaaatcgtccctgttccacaaaaaactccaacggaaaaccaggccaagccccccaaccagcgacagtggaggcgcagcccacatcagcggcggtaaaacaaaactcttcgtcagcgagactcctcaatgcttaacaacacgaacagatgccagaagccatgcctgcgcctgagacccctccaccttccccagagattcctgatcgcgcggcggaacagggtcctgtctcgtttgctccatcgtccccagtaagccctaccgttaccctaacagcgatttctatgaactcctttcccaggctgacctcacacctattgtggaggccatccggcaactagagggcaaagtttccctggcagcgcctgtcgcacctgcgatagcgcaacaaaaggtggcctctccagccgagcctgcggcggtgccagtgaatatagaaaacaataactgcggttgtggaggtgataaaaagtccaaagtttacaaaaatcagcacacagcttttgggtgaatgcaggagactcctcggactccacatgaggggacgctgcagggcaatcggtaacaattcttttccaggcagcaacgtcgaaggtggtcaacgtaaaggggctcccaacatttgtgttatccactgcattctctcatcagtcgaagaaacactgttgatcctcatcactgggaaatgtgtgttgctggcgcgtgaccaggccggcttccattttgagctcaacctcattcacgagtgtagcggcaactgactgaattaccaatacggtgtattcattatttggactgcaatgttgctccttcacgcattacagttcttgcatgtcgaagtactgcgtggccttcgccccacaacgacttagatccggaaacgatcatcgcgagagtctcatggagttcagcgcttcagctagtattgcccttctaatgcagaccaaatatcatactgagcccaccagtagctgcgtcggtgggagcgttgcctttcacagcatcggaaatccacacttcccctgtcgtatgcatgtgcttatgtgccccctagacggtgcctaaggggatcgaatagagatgatctcccagtccagttagtgaggttgacgacaaattttcgatacaagtgttgatctcaatgctctttggcaagatatcacacaacgcatagccactggtgaacccgggatttcgttgaaagggaaaaaacaaaaacattcggggtctctgatggacgtgaagtgactgcacgcaacctatgctaaaagagaacgtggttcccattttgtagtctaaccgagctgtaggcgccgaatcatcccgagaccttaaacagactgatagctaagagccagatgtttgatctactttcgcgtacgattgatgctgcatctgctaccgcatgcagagttcttgattcggctcatctcgattcactgtaccagtgacgaaattcctcaggtcacattcacttttcttggcggcttctcgctccctcgtttgtctttcttcgagaaatgcatcttagaatgacaaagcgatgtccccttcgtcgtcacggtggcttgatcatggcttttctccacatttttcccaatttttgactcgatgaaggcgcatgcaaaccgggaatccgacacttaactcagcttactggtgtagatgttccgttgaaaaaaccttccgggaagtcataagtgctgcatactcttgttttgcagtgctagagtaggggtgtgaagcctaaagtgacctactggcgaaacacatgcaagggaaagctccttttttccatccttctgccgcatgttaggtagcgcaggatccctcagtcctggtgaggcgttccgcaccagctgtttcttttaggataagcgcttattcttccgctttattctgggtgctgccccttcggattcattcgctcttctcca

SEQ ID NO: 794 - DNA, 1789 bp, Toxoplasma gondii
  source 1..1789: mol_type = genomic DNA
aagaaggagatagaaggtgagcagaggacgcgcccaaggtccagacgcctctctgagaccagcgggcagcgcggcgagaagaagaaagagaggacgcagcaaaaaggcatccagagcgagaagaagcaagtggaagagaagaagcgagacgagagggcgcggacgcaaaactggaagaagaaagagacgccgcagagtctgtgtggggaagttgtctcgcgggagcgacaagcgaaggcgcccctgacgcagataacgcccgagaaaaaggaaaggaaacacgaatcacgtatgttgaagccattatcgagacaaaaaagcaacaaggctgaagacttcagacgatacagatctggatttgcaacagtccaaatccagacttctcttgttcaacgagggtacacaaaatgccgccgcacaactctgggagatggccgccgggcaaaatctctggggcagacgacgtggaaaagagagagaacgaagcgaacgccacaagcgaaggagaagaagaaagtgaaagaagaagtggacctgtccgcgtttttgctttgacggcagcgagagatcggtcaaagagagaggccccgcgcttgcttccgctgcgagagaagaacctctggagaaacctctctttttcctctctgttttccttgtcttttgaatccctcagtttgccttgtctcctcctttcgcatgggatctctgaactgcggaaggcgcctggcccgagaagctccagcgaatttcgcagggagacgacggcgactgcagactgctgccaagcgacgactagggcagagaactgcgagagagaaaggggaaggctggaggaaagcaaaaagacaaagaccgagaagaaatcaagagaaaagcacgaaaactctccgtgagagacgggaggagaacagcgtccgtctgcctctcgcgtcgcggaaatgcttgctgagagaggaacgccgcgtccggaggtcgtcggtttccaagcctctccttttgcctctgaagcgtttcaaaaaaatctcgagcaatctgagagacacaggaaaggcaacgaatgcgttttgactctcggaaagccgtcgccgaggccgaaaaggagactgcatgcatgcgaaggagccccaggctcagtgaacaaccccactgtctccagcgagacactggttcgcgaaaacgagcggctggagggcgacgcgggcctttctcttctcgatctttcctctcttctctctttctccaccgaaacgctgcgtgaaagaggtctcacggggtgttcagaggaaggctgtttccccaaccaactcctacacagagaatgagagaaacagctgcgagagacggaacagaaagagacagcgacgaggagacatggcacgaagtgaacgatcgtgagcgaggagacaagcgagagaaaataagcgaggaaaagctggaaaggcctccttcgtctctgctctcgcgatggtcagaggtgaaagcgaggcaaagaaacagacgagagcgagaagggaactctacatgccagtgtgcttttcgttgacggagtttgtctctgtctcgagggacctccgttcttctcgataaacctgtaccaagagatcttctccattgagctcgtgctatcgcctctcttcaccttctcttcagcattcgttcgcgagtccgtggctggagatccgcggtgtctctcgcatactttgcactttcctctcctcgtttcgtttcttctctcctctttcacaccatcaatattctctctccgcaccattcgctcctcaagacacca

SEQ ID NO: 795 - DNA, 4741 bp, Toxoplasma gondii
  source 1..4741: mol_type = genomic DNA
actgaaaatgcatcaacggaagagacacaaaaggacgcctgctttgccaggaagaaccataaaaattcgaatgagagaaacgttgtgaagggaactgggcgcaaaccagcaaggatgaaacgaaaaagcctacggggagtggacaaggcacaaaggagacgatgaacccacgcaacgcattgacatagatgtcgcagtattgtgacctgtggggaggaaagtggttgagccgaggcagtgttgaaaatgaacttgcaggtaaacagagagtcgctgttgctacttgatacaggcgggcagagacccgtgggagagttcgatgaataaccagacgtaggcgcatgtgcccgcagattcgcagagataacaaactggaattaaccggtgaatggatcaactcgcaaagaaactgagtgaagagtgacaaatagtgtctaatcgaaataggcacatggagaaaatgttcataactcaaccagaaagttcccaatatgtgtagatgaaaggtgcctgggtagaatggactccaaagaacgttcatgaaatgacgtacgaggctcgaaggttgtagcacacggagacgccatggttgcgtccgatttcgtcctgaaattctctacggtaggtccgctgttgacagacgatggaagaggggaagaggctgaaccgtttggagtacgcaggaaagagagccctcttgaaacgacagacagtcgcgaagaaaagcgggcagatggtcgatacttcagcagccgtggcgctgcactctttgacgccgaaatgacagctaaggaggccgatgatcgcgctgaatacctgggcagaacccactgggacgaagaaaccaacccttgtgaagaaggaaaagaagtcctttggtctcctgggattctaaaaaacttcaactggtgagcttgagaggaccggaagcgaaactcagggattaaacagatggcagcggttgccgggttgcgaaacgacgttcgtggcagcagcagaaccatgaggggttttttcccttagacgatctgtcaaaagcagcgaggaatcaagaaacaaaggactcgcggcaggaaacgaagaagagtgtaaaatgaggaaaagtgtcgattcggccaatcggccgttgagtgtgacatgcaagacaactagtgcttgcgtttccagcgcatgctgccagtcgacggacatatacggcaacgccggcacagccagcaccgagaaacacgaagaaaatggtgcgtagaaaaaattagcgaaagaacttctcaaatcctgagcagacgatcaaaccagaagtgtccagcccaaaagagaagcggattctgtggaggttggctggtcaacggccgcgtttcgacacatccaactctgagggtacccttttcaggtttggttcttgtgatgcgaacaacaacaagctcaggagaaaggctttagatccgctcatagaagcgattgaatacaaaggaaagcttcttagtccttcgataaaatgacaaagcgtgctatgtggggcggtacctccgtgcatgcgacagtctggcgcatccgaaagagacacactacacataagaatctgtctgtttgtatagtcttctctatgtgtgtaggaagtcggcacacattttttgcagggctgtacctttttctgtgtgatgaaaaaagtatgtgccacgtggcttctcgcacaaacgctgaaacacaggaactcctgtgaagtcacacgtgaagcgcctaccacaatgcggcgtggcaagccgacaaatacggacgtgaaagggcgaattgttgcaagaaatagtcggcaatatttagtgtggactgataaagacgggaatccgtgccaaactagcccaaatgcaaaggacgcaaatgacaggtgtgtttgctgccaaaagcctcgcagcacaacagctgtagactttgtgaatcagctcgacccgcccgtacaaaggacagttcatgatatcgctgaagaactctggtggacagaagatctccagtattctataggtcctcaatagttgttcggcttttcatagtgttgcgaaaccgccatacgacgtgcttgttgacctcaaacgacaaaaggggttgtagaatatcgcggtaccgccagagttcgaatgtcttgcctcccacgactacgcgtccagacgcctagtgctaagtggaacgggaacagtttacagatactgcacatatgaaccggtaatgataaagtgccctgtagtaaaaccaagggaacggaaaggctgtcattttcttcgggacaaaagcgcctataaaactagagatgacaatcagtcagacgcatctctgattaatgcgtcttaggctggaactaaccgacagaaagaaataactcggaaaagtgctttggctctttggagttggtatgtcagtggcggatatgatgcattttgtgcaggtcatcagtatcgtgcaagggttacatgcgaggaaacggtgattgttaactgtatcgcacgacgtcgtccccagttaactggtgctcggctcgcaggagactgccatgacggtgagggaaaaatgagcgcttaccaggcaaaaaccttcaaacggtcctcagcgctgcagcatcatcattttcgcaagcccataaatttaacaagcacgtcttccaaacgaaagcacgacggcggcaaccatagagcaatgtgcacacaagctatcgtgggttggcaacgatgtgagacggttcgttcgaatactggcttcgtcttcgcgcacataacgtgtctccgaggagtcaaaaccgctcccaccgctgacgaggcaagatcgacggtttattgattggggggtggttggttctttcctccgtacgcccgataacggatgtaatgtcaaggattcaaaagcgccaggaggaaactgctccggagttgccttggctggccaatcaaaaagcgtcagtccctgattcttgtcgattccgttcgcagagtccggatgccatggacgcatggcggccgacaatgctcgtagcggataatggaacacggggtcaagtgtcccacggggtatgtacacctcagcatagtggattgatcgacaatttttaaccctttctaaatcagaactacgtcaactaccgtcttgaataaccgtacgattcatgaagtgaatcacagaaccccggatctcaagaactcttttcacgggcacttctaaaatgcctgtttctgccgcagagggaacacctccctcgaacatcttttctgccatacggcagcagcgtggttagcccccgggatccaaccatcaagacggtgacgtacgacgaccagcaaaaacgctcccgctgcccttctcctggagaagcccgccatgtttctctcaagcggctggcatcctctcggacggtcgtgtccggtgcttccgtcccccaaagcgactgcctctgaccaacaggcacaggttccctcattcgtctgccgtgtcgacgaaggggaactcaatttggagccggcggccgcgccaaccgaccgcgtcgcctgtagaggtacgacacgtgacgccacggtgtgccgccacgatgcgcatcaaggggacatttgctcgacgccgactgcggcaagcgaggacatcggctcggagtgtgattggactgatgacgacgcagcagttgttccgtcgctgtggagcggtttcgacgacgaagcgcttattctacaatcaacgagtgccgccatcgcccccctctcgcgtaaaggcacaggcaatgaaagcgcgaccaaatgtgtgcccttgctgctctcctgagaaccggtagtccttccctcctcgctcagtcgaatcgacgaagaggggaactccatacggagacggagagcctgtgcaggtgtggactacagtgcatatgcgcaccgcgagaagcgacgacccttgaggagaaaacagctgacgcacgatgtctttgctggaaactggatgcgggaagcgaggtgatcgactcggagttggagaatgccgattgcgaagcagtggtcgtccgcctgcttcccgggctctgtcgatgatgtcgcacaggggcctcctaaagcgtcgcgtgctgtgcggcaagtgtcaaaagcgctctccgaggtcaccctctgattgtctcagatctgaagtggatagagtcaagcgacgagtttgactgtgagtccgaaatatcatcgaagaggcagtgcttgtttccttgttttttagccgagttggcacagtattggagttggacaggggcggtgacctcgtttatgaaagtcagcgggcgaagcagacaatgaagaagacgcgtggtcagaaacagggtccgaaggagacgcaaacggacctccgaggaatggcaaggtcttcactcaagccgacgaagatggccagagtttcgaaggagaccttactagtgcgaaccgcgtcgcgtcgacgcaggcagtcgaagacttctctggagatgaatgggagattccagaggagacttcgccagcagagaggatgtcggcgaggacaccaacccctcccggcggaacaccgggagactgctgcggagatggaaatgaggaaaaaatcttcggtcgattcgcagccctccacgcgaaggagcaagccgtgtgttaacctctgactcaggtgcccagagacatgcaggcgcctcctttggagcagtcggtccaagcgccgaagctgccgcagcggtcctgaagccaacctccagccaagctaccaccggaaa

SEQ ID NO: 796 - DNA, 3665 bp, Toxoplasma gondii
  source 1..3665: mol_type = genomic DNA
ttctctgcgatatcacagtattgacgtgttttggtcctctttcatcggcattctccgtcgccagcaacatagacacgattccagttctgctgtccatatggtaccttttcagtcagtcgcctccttggcttgactcagcaaggggcggctgagacggcaccttttccatcacctccaaaatgttttccaacagctgaatttcatttgcgtttttcgacaactcagcccagtgttcttgcatgaccacctcgttcaaaatcaagatgacctctgcctggcatattgcttcgtcattgttctttacaatctgcgcgttctggtccaacatggtcttcatcttccttactgcgcactcccatagtcggctggcgtcttcgaccttcttaaggtcatcctcaattaaacgggacacatcccgaaaaacacaggcagcccctccaacaaatcgcagcgcctcgcttgcctccgccatggtgtccttagtatggtcgcttctgtctggcacacgttcgcaaatctcttcgcgcattttgatgcgatgtctaacccgtgcaaacttcgaaccttccaccaggaatgaatgcacgtagtgaaattcaattctgaacaccttcgaagcagataggcggtctgcctaaggaaaactgctctataactgcgtcacctccggtttccacaactcggattggtcttccctcacacataccacgtgcttctggctccgaaaaagatttggatctcccctcattcaacagaactgttgcatgagcgtagaagagtgactggaatacgctgcttgtcttaacgtgaccaagccctctcgtaagggcagatatctaccacgggaagtcgttctctaatgcaagcgtctgttcttggccacccctatcagcatcggttttcacccaccacacaaaaatttctgcgagcctcctctcttgcttaaaattcacgagaccgaagggaaaaatcatgcactacgggacgtctcgcaaggaacgcaagaaggtagaaaggaaactggtcgcatcgctgaacttccctcgtcgcaaacccaggctacgtcattctggacatgcacaagggacagagtgtgggcttgcacagcagaacgatcgactgcggcttatcacaaaaaagtattccaagcatacaatatggtgaaattatctgttgtaatctaccaccagcgccaatccacaaacaagtcgaagcgccacgtggaagacgctgagggcgccaagcttcttcccatggttgatgggaagaggaaaaacgttaaagccacaatgcgaatggaacttgtcacagcctttgcacactttccgttcacgaaaaccaaacaccaaacggcaaccacgccattcctatacactatagcattggatggtgtggtggaacagagtcttgaaaaacgcgactgtgataaacgcttcccactgtggcaggtgtccccgtaggacaggcaccggtgtcgcccgcagctggggtggacacggtagtgccgctatgatcgtgactgaatcgtcgcggagtttaccttgcgtctctattgcgaaagtcttttaggagtgccttgagggtgctagcgaagctccatcttcccacgagactacgtaacagtccgtatcggctgctgagtttccgattagttttccatctggtatcttcagatgccagtacacaagatccactctgcttagcttgcgatgcagtgtggtttgcaaattacgaagtggctgccgtgtttgcagcggcagccgcacggctggcactgagccttatgccctctcgcttgtcagatctaacacgtgacggaagttgaaggaagggaaccaggagagacgttacgaggttccaccatgtacacgcttgtagtggttggttttgtaagggcagtatgcagtgggtactagtcggactgtgtgaggtccgttggcacggagcgctcacttgctgcagcacgacacaggcttgtggtagttctcgtgtgacgtgccgggagagcgggagggctaccttctttacttcttcacttgtataaaagacattccgacgttgcctgatccacacacgcgcttacatgtcaagaaacagggggtcacctggcatagttaaacttgcactcggggcgaatgtagtttctctcacgacagtcactgtgtccgaatcacactgtaagtttctctttggtcacgagttcatcggcctagtggacactggattgcttgaagtaaggtacattccttttaagcagtcagaaatccacttgcaagcgaattttgttgtaacgcgcgagagtcttcttttggtgctatgatgttgcagtgttaaggcggagggagtcggtattcggggaattccacaatgtcggccatctttaccggcgagacgtgtggtccagttccaatgcacatcagcactttcatcgcacgcccccgtcaacacactaaccgcaagctacagctttcagtttagaccccttcagtatctaaacagggtcagaaacctgatgttcagctgcatgaagtttcgggtgggggggaattatgctggaggaggatgtaagttcagttcgatggaaaggaagagcaggcgaaattcggctccggctacaaataacaattttcgcagaaacggtggtgcactacgctgcgatcgtatgggagagaaccgtgcaacacccaacactgtcattagctttacctctcttcttgtgaccgtacccgatcgctggcgtgcagaaggcggacagacaaggggggatgagagatggcaacgtcagctacacacacacacacacaattttctagaggcatttttggttcatagagtgctgacgttatttcgaattgaaggaaacaccgcccgtgtggcctcagatagggatggaatagatccagacgagacatgatacgataccggggcgcgtccctgctcccgaatccaaaatacggcagaaatgttgttttttattcataatgctgggttgcatccaacagcaacagtgaccgcggcatggcgatgaaactctcgtaaaaggttgaacgtattgcagctgcacgttgtacgtgggggggcttatggtgacgaaacagcttttgtagcgtcataacagcacaggcgaaacacgctaaccaaaaacaagccgggttttctcagtgatgcattcacggatcgaatattcatttcgtgtagcaaactcaccagtgcacctttttgcatactccacggctcaaaatttgttgagctttttggctgttctaaatcattgctaaagtgcctctgagacgttttcgtctttgtggtcggtgacgcatcagctgccgcctccattacgacactttcctgcgtctggccaccggatgcatggcagttgaaaagcagttgtcctttgtatgaacgcgaatcacccgccttgatgcttattatttcaaccatagcatggaagaagccgtactttgggggctgggtggaattacatcgcctaccagtgacacgtgaaccgatatgccggtttcaacataacgttatcctggttactcttccatagaagagcctactgtgtaaagtgttggcccaaaagagtagcgattaacgctcttcatggaactgtacactgaatagagacaacatatagtagttcggttggtgttgggcatcaa

SEQ ID NO: 797 - DNA, 2138 bp, Toxoplasma gondii
  source 1..2138: mol_type = genomic DNA
gtgacatccaacgaatgaaataagtgttgatggcgctactgtctgctgacaactgcgcgtgacaaattcgggaggctttgcgagaagggaactgcggcaccctatcaatagtccatgttgtaggttggcttgatgcgctaaccggtgtggatgaagtcgggcacacgcccagtgattcggatcgttatcggcttgtcttacagcaatagtatctgtgaacgaatggccggttgttttccgccttgtggtgtaccatccggaaactgcatgtctggaggtgcaagccagaaaggcatgtctttatgatagagcacattcggcttccgacgtcatttaatgtcacatagtcttcagcacatttgtgcgtccgcccaacggcgtgtaaggtgccccttgggaaggctttagggtctgggagtcgtcagctgtttttctttcctcactctccgaggacggtaaaacataataaatgcagtggttcgatatgcagccatgaacgagatgatacacctttgaacgtcaggatcaaacgaggaacacaccaggtgacgcattgttagtacctggcgcatgcgttgaaacttgcgtcctgtgtgcctacagcgacattcgaagcgggacgtgcccggtgttccccctcagttgtttcttcgttcttctgctctcagctacggccgcctggttggccttgctgactcgtatgcacttgctcgagcgataatgatgagaccgaatcaatctctacggcttttgtggtgttcatgcaagagcgctgagaatacccgtggtactggcagccccttcttgcgcgtagaggacggaagacggaacaccgtgagttatccttgttttcatgcaagagacaatgaaggtgcggtggtaagaaaagggttgacacaaccatgccagtagcgcggttacatatcgaagggctaatgatggacgttgcaaggtcaaaagacggcgtgcttattgctccagtggcacagttggaatccgtggcgtatcgggaggtgttcccgggaagactgaattagttcacttgagcgaaggacctgttcattttctgcaccagctgagaaaaaatccttgctgcgtcgatgtgcaaaactaaaacagtcttcgttaaaaaccgtccgagtgttcgttcgtcaggagtgtagcgaccgcactgtgtcgtctgtcgcgcgttttgacgggcagctgttgacagaaaaaaaatcatttcactacatcggtcgacgaatttaaacaaaagatatgtaggaactttggctccacatatcgccaattttgaatgtttttaatcgtacttttccggaaattgtgctattttattgtcgagtttctcaaagatatttacgtcgtgctgctgatacgttatagttcttagtgacatcactttttgcatgggcataagcaacaccaatttcgcagcagaaatgtaagtccaattctgaaataaatttattatattaccacggtagtcagcggcggatgaccttatttacactccgctgtgagaaagttcatcatcaactcgcaatggttgccgcgagttggaggctttcgaccagatgcaccgaaacagattcacaaacacagaactgctctaaatatgctttcgtgtatccctatcccattggccgtgagctggcttccctaccgtgttgactgggactcgttgtaacgcttaggctgactggatcgatgagtgaggtcgcgtttccacacgaagacacgtccgggtgtaccatcttctgcagctccctccggcatataccagcttgtgtactgcaaggagaaatttaacacgacattatttgcaaaagaggagagggttccatagatgtcggtatggtggtgaccagcatcttattagtgagactgacgacgatgggagctgatctgcttctatgacgaggtagtccatcaaaggcaaaaatctcagtacttccttcggcgccgtggcacagttgcactccctgtaggacgcgccgcgagtggctaccactgtgccgctgttttggcccccgacctcatggtgctggtggaggaatcatgctcgaaagtaattctgtcagacgcctgacacttgcccatctttgcgtaatcgtgtcaagtgagactctcagaga

SEQ ID NO: 798 - DNA, 2289 bp, Toxoplasma gondii
  source 1..2289: mol_type = genomic DNA
ctgcgtcgttcgatgaaagaaacgcggcatgcccatgtctgcttcctcgcttcctctcttctcccgcgcttcctctcgtctttcctctccacttgcgcggcgcgtagagccgccatacgcactcccgagagcagaagacatgctcccgtgtgaggaccgcctctgaggagcccccgaacctcccgtcgtctccggagaagcgtctccttccgcttcttctttccctgtcccgtcatcttctccttctcccggctccctctcttctccgccgtccctaccttcggttgtttccatcttttcttcctcttgtgtgtatccgtccagtcggtttcggcgactctgctcgagccgcagcagcgccgcgggcgccagctgtcggcgcagagcggcgaagggggctaggatatcggcgcgtcgtgtctcaggaaaagcgaaactctgaggagaggatcctcgccttctcaccgatgccttccgcttctgcagagaggacgcaaacgaagagaacgacgccagttgatcttgtcctcctccagcaacgctaccgattccaggaatgagtccgaggcgccggcgcacagagaaattcctgagaaaccaagcgcctcttccaggctggggaatatcagaagactcgagaattcgctggccaccttgatttcttctttcctctttcctcggtctctctctcccttcgcctgtccaggggtccttggcttctccgttctccatccatctacatctctcttcttgcctcatgttgaactttccttctctctcttcttgtctcatgttgaactttccttctctctcttcttgcctcatgttgaactttccttctctctcttcttccctcaccttgaaccttccttccctgtcttcctcctctcccctgttctccagccaattgccccccgccgccatgatgagaggcgacggccaagagcagaggaggacgtccccgtttgctgagcgaacgacctctgacacaaggctacaccgttgtatagtctccctttacgctttcctttctctccgatttctgaggcgcagcttctctcgtctcctccctcgtcctttgcgcttccctctcaaggcgccaacgtcgacactcgtcctcgtctggagcttttcgagctgctgtcgcaggacgcggacagaggacagagaagcgcctggctggtaaccttgattccttctctttcttccctcgcttcgtccccgtgtcagaccacaacagtgcaactggagtttccgcgcttccactgaggagagtctcgctaaaaggagaagcgctcaaaacgggtgcggagagacaacggatgttgcagaaacgcattctgcatgcaagctggcaaaaatgcgagaaagaggaaggctccacgggcagaagcagaaaggcacggttagttttacaaaaaggaaaactgaaactctcgaatttccccgtcgagcgtctcgcctttcgtcggtacctgcatgtgcgacgacagttctttggcgggtgacgcagcaagacaagccaagggagaaaaaggcgcaaccagatgcagacagcgtcgccggcaaagacgagaacatgaaaggttgctactgacttggaggcagaaggatctcttcgcttctcgttttttttccttgtgctccgctcgttcaaattcactccagcggctttctacacggaacacactccacgttgcattctctcgctgcttctgtccgctgctgctgctgcattttccaccttctcacccctcagcctccatacagaattaaatgtagtcgcttgtatatcagagcgagtcgagttataaataggtgtacacttcggcatgcattgctcctgccctctctcccgtccctttctttgaaatgaacttcccttctcgccgttagtacgatttcaaactgcgaaaaaccactccgttcatgaaaatcacaagaacagtcactgattgtctctatgaaacctgatcaattcacctagccaacacgatccggcggtttgggaacatttcccttatcattgggcttcgcgcctctctcttccaagttttctcatcaatctcttcaaaacacgtcggtactttgtcagtaactctccttccttatcctcgccttcctactgcttcctcctcttcctttctcttccggctggtttccttcgccggtctctttcgttttctagactgcctttccttctctcttgtctcggattgggtgggtccccttctttctccgtccggcattttctgcgtttcctcgtttccccgatccttctcgccagca

SEQ ID NO: 799 - DNA, 3159 bp, Toxoplasma gondii
  source 1..3159: mol_type = genomic DNA
ttccaagtgtacaatggctgcgtctcagtagtaagactgactacagttcatgggggggggggggaggattgttgttattctcgtgtaacttcgtttatggaaacacgggcagcacttccggggtggtcttcgtggcaggcggagctgacaatgtgcgtggggcagtgcgtcacgcttgcttgactgaagtgccactggtggtatacacgacttttgggcgttgcttcgttttcagggcggtgaattattcaattcggtgcaacggcaggcgtttttcagcgaaggcaagaccgtggaagactttttgcagcgacgcagagcaagacggagaaagggggcggacgaagatgacatcctcgcgacaaatgccgagcaacgctgagagctgaaagagtcgcgagctgccaagacatttttacatgtcgcatgccaagcctctggcgtgacggatacacatcatgctttagaatagaacacaccagatttgtctcaggaatttggctagggctgcgcagaatatgcaacccagtaccagtcaactgagttaatcattgccccggagtcagtgcccaagacagagccgcggcgagcagactttctgtggcgggggccgagcctaccgcagtgaatccctgacacagcaccctgctaggggattttcgttttttaccaacacatcaacgtggagggtggaaatctcatgcaaccgggcgagaacggtacagtcgagataaagtgctgcgaaaggtttccaacctacacgttttttggagacttgtggtggttacaggtgtgctgtgaaccacagagaaagcggccgtagtggtaaaaccctaaatgtagcactgtcggcagctcttatcttcggtcaaggatgaccgcgaaaaaacagacttccgcggcagggacgatgcaacatttttagccaacggaatagcatgtactgttgaagttagcactcattcgctaggggtatcaactgtaggaatctacaacaaaggacgaaaaccaatcaaacggcacctgacaggtggagacgtctacccggagtgccagacagcactgacgcagacgatgatcgggaggatgcgggaacaggaccaaatttcgcaatactatgtggaagataactatgtggcccaatcaaacgcctcaggaagaagaatctgctgcatgcgaagacaagcgggaaggcaaaacgaggatatacccagaagaaggcggggaaaggcagcgtctgtgctttcgtagcgctatagtacctacgcttctgagtgtgattccagctgcgagatacagacaccgaagttcttcatggcaaattctaggatatgtattactggagatgagcacatgctcgctcgtaatcctcggatatgtgctaccatggggacaaatgagtttctcgggtgctacattttttatgaatgctgtcatgcctcttcagcttctggtggcactgtctggcgccggttcaggcgtccagttccgccctggtttagcgtgcgttataccttttctgctagccaagaagactgagcatatttcgtcagtccttcattacctcgcactcagtgacgctccacacatgtcgtctcgggagaaaaaaggatgctgtgctacgggccaaacgtgactttatggtgtcgcttattccacagcaagcagtagaggactgggcagctccccgaaaccgtttcccgatcctctctgatacacgaacccgccaacaactaggtggcatcaccctgttcacattgacctcatgttttcttctgtcttttccgtagtacgagtggacagctgatatgcttcccattcgcgcaacgctttactgagaccacagtgacttcgtgcccctgtcatacaaaagtagaaagagtggacattcagcgcaattgactttgcttgtgtcgaccgtgtacgaagaaaacgagttacatgtgtgccgcgtcaaggcgagtctgtaggacctcgcatagttggttctcctggctgcgatcctgctgagcatgagattcagtcgctaccctgatgatgaagcaggcaaatacacttctgtgagtgataaaagacgttgaacaaaaacgatcgtgttctagctatcaagagacgttcgttgtcgaaagctgttcagccccttctccgctcagttgactgtagccgaacccttgcgagtcatgtagtggaagtctcgggagcgtgcttgaccgatctatcgattgataccagtttatagggacaaagaacgactatgcgttgtcctgtttacgcgacctgcttatctagtgatcaggaatcgtgtctcgtcaaaagctctctgacagttttcgcatattaaacaaaggagcagggaggtagttggtgcgtcgccaaattcttgcgacgggcttgagaaaagattacacgcagttttcaggtgacaaaacaacacccctcgatacgccgaggacagccggtcagtccctcgtttccattgtgtttgttgcttagaagcaaaaacggcttcagctttcaacaacgcggcggtgggcagttggcgtctctttttgtgacgccagaaactcgttggtggtgaatagcttgtcggggacctatgggtcgcgtcgaaccagcggcgggtctgagacgctaaacaaatagagacagttgaaatgttggcttttgaatttctgggccatctttatgcaagtatgctttttccagttttcccaagaggcgcattttgcagctggctgtgttgtatctgcttgtgttaaaaataatgcagttcagaaactgatgtttgtgcggtcccgctcgtagaacgctcttcgggaacttttgcagttgacgtcttctcccgtccatttatttaccgtatggtcagtggcgaaatgtccacacagttttttcagattcatttggaagtttgtgggcgttcatttgttacctttacagaaaaggtaacaaccctgacctcctgttagcgacaccgttccgggcagtcacgcacccaccactgttcgctagatttgcatttggtttctaccccccattccgcatttgcagtgtcagcagtttggcctcctttcacaatcgctcacctcctatctcggggccgtgcgacgttctccggagctttgttgtcccttccttagaggaacgacagccacctga

SEQ ID NO: 800 - DNA, 1827 bp, Toxoplasma gondii
  source 1..1827: mol_type = genomic DNA
caacaaagtgcgtgaagtggtttaatgagtggagacaatgcgcctgggatcaggagaagatggtgaaaggatacaactacatcgaagacagaagggcccggaagcacaagccatacattggagcgcccgatctgcagtactcttagatcgtgtgtttctcatgaccagactgttgtttcgttttttgtgtttcggacatccgtcctctcctgcacagtgtttcgttctctatcagcctgctccaccggagaaacttggggaaaagccagtttcagctgaattgtcgtggagaggcgcgaaggttcggaaggcgcgctgcaataacaaggatccacaagagagagttcaaataggaatgatccgtgcatagctagtccattgtatgtttgctcccactggctccatggtataatgtggctcacgtccatgtgaacccacgctgctttcaccggggcgaaatcttcagtcgattttcctgcctaccccgacacgggtgcccacagtgggacacggtccgttaagcagctgacagaaaaaacatatgagaactgggtccaactgtacgagttcggattaaggtctcttcctgtgagtatgtgaacactgtacgcgtttcggcgtcgtctccaggaaactatgttttacttctttccagattacaacgaaatcttatcacgccggtctccaaagatcatctaggacgagcacattagaaattgttgcggtgtactgctgtagaaagattcttagtgttttttggtgtcgcttccgaagaagtggtcggtattgcaagtaacaacagcttctctccattctgttaatgccatctacccgtcgtattggcgaaatcgattcaaaatagatttttgtgtgaccacatccaaaagtaggcgctacgatacaacgcaacatgcctaacaagtcttcacgataggcgggtgaatgtttcgcgttgtcaatgctttgttcacagtttaggtttctgccggttttttgctttcgcaagagaaggccatagggagacgaaactccatactcttaaaactgctgttaatcattcacaatgtgaagacggcggggagatatggcattcctgcaaccctccgccgtgtctgtagcaggagtgtagccagaacacgcgcaacgagcacagagtatttgaccatcattgtgtttgtaaaatatctgatagcgtgcaggatgttgcaatttggagtctcggagtgttttcgatattcccaaagctacgaaagacgaatctcggcgctagtctcacgtttcgtggtagttgttcactttcgtgtctcgcactgcaaatcctgtcaggcgtagtttccgcagtagagaaaccaccgtagcacctaatccaagttcgtttcaagcagagtcccgtcggagcacgattaagcgcgttcactgccatctgttctagctcctcgaaccagccggcaatttggcaaacagcggcttgttcaacgatcacagcgatcgcttaagcgctgtgtggtgctgcctattcgctaagtgctcgcaaccagatgggtcgacacagaacgtcttgtgctcaatcagtggggcgatcatgcttgctttgcttcgtcagagagcctgttatgcgtaagacgatgcagtggtgtgtgtttggaaattatgggcagctaaaaagcaactcggaaaagcgatttgaattactagctctgttggcagtaacaccggtcgcacctgcagtttccctctttataggccgattgcaaatgagtagtctatcctgatttctgccgagttgacgcgagaggaaagtgcaacctaattttctgttcgttacta

SEQ ID NO: 801 - DNA, 1362 bp, Toxoplasma gondii
  source 1..1362: mol_type = genomic DNA
gccacatatccaacaagcatatgaacgacgtatatgaacgaaacacgaagcaatcgagtgagacgaccaaacgtgacatggaaacatcttgaagcgtccacgtgcttcctgggccctgagaccattttgattcgaacggggctggggaacttgccactgaaaccgtgccacgtctgcagcgagcgacccccgcaaactatgtttgccttcgctgacgtcggcgccatgtgcgaaacgggaaacgcagcgcaggaacagcatcacaatgcggcaaatcacggaactgccagagagaggcttcacgacgctgaggaggaaccgttccccgagtcaacccagacaattctggtactggcaactgtcaagcacatcggcatgcattcacacagaacgcgtcgttgatagacaccggcaatgttacacagtagagcggaagaaacctgagcagtggaaacaggcagcgtttcaacacgagtaggcgctgagcatgcaacctcgcaaccgctgtccacctgccgtctcccgaaacaggtcgccgcacacgccagaacctccgcgacaaaaaaacacaactgaacaacgggacaagagaaaatgctgcagtgtatgtacactctgtatcggcccgacgcagttgagggggtatgctaattgccgtcggccccgcatttctgacttcgtattgcccccagcagtcatccgctccagtcgcccgacaaaggtgcatcgccgaagtcctgggagagagatgcaccgcttacaggggccacagacacactcaataagctacagctccgaaagccatgcagttctacgcgacctgtcccgcctacgctgttgtgccgcaaccagaaaatgcagacgctgatgtcacgaaccgaaccaaggcaaattccaaccagaacacgcggtctcgatccaaaaaaacgggagcacccgacaactaaatccagttcagatccattggtagataaaaacaaaccagacggctgcgaatgctcgtgaattgccggagtctcttgtccccacaaaaaggggttctctgttgccgtcaattttgctgtcgaagccaccaaactgcgaaacaagtctgacgccactcacttgtaggctcccattttgtcgatccggaagagctcccgcaacaagagaagagaatctgccttcttttcactggattaaaaactcagggaagagagaagtaaccgcgagcctcgcggggcttctttccaaaacagtgggtcgtcctcccctcccagaaaaattggacacgctggcgcccgcggcaaccggaatataagccgattcgctttcctacttgcgcgcctttggaggtcccagctacgactacgcaaccgtgca

SEQ ID NO: 802 - DNA, 1787 bp, Toxoplasma gondii
  source 1..1787: mol_type = genomic DNA
gtgtcgtgagtgaaggaagataggcggcgatttttccaaagatatgaaattgaaaagcccgattttcgaaagaggcagggcaaacggttctgtccaggtagctgcatgcatcgacccaggaggctcccccttgctacgggaagtgagaacaaggttaaattatggccgtatgtggatctacgttgacacttctcggttagaggagttcaactctgatcgagcttacctccctcaggaagatgccatgcctcagtggaaagaagcgttacgcagaagacgcaaaaaaggacccttgacatcgccaggtaaccaccgaagctcgaattccgaaacagccttccgcccattgctgtcgctttcacccttttgagtggcattcgcagatgcacgtctacttcatcaatgtgtaaaacatctatttacctccgtatacatatgtgcgcatctggagtgagtttcagcgggcgcagacacgaatccacatgcatgcacagggcgtagtcgttcgcggcatcgggggaagaatgcgagtcatgaaatccgtctgccctccatttcacttctccctactttccatatgctcaaaagtgggtaactgacaaacattcgttcacatacgaatagacgtacacatacacacgcataagcatacatgtatacggatgtatacaaatatacctatatatatacattggcaggggagggtcatatgtccacgtgcctgtttgaagcttgtcgagtaaactaagaagagaaaaactggaacaaaagagcgaagtacaccaagcgccgaaacggttacttggcgtggttgagaagtcggcaggtgccgacgcgcaggagttagcttgggcgttccacctacgggacacagattctacttgcgacggggaaaacgcgcagagatttgcgttcgcattttcttttcaagcatcgaggttacacacggttacactttcacaaattttgaaggaaaccacggaaatacccatgataacagtttgcgcgtatcagtggacgccgactgcggaccggcagagacaagcggagacaagcgtctaggttcgtggacgcagtggaggatccgcaggttgtttgaaaacaggggaatttaaccgattttttcgtgtgcaaaggcagtctcttagggcacgctacagaagcgaacgaaagcaaaagcgtggtcgtcgtaccgcgctttagccgctgtgtcacggcggaaatctgacgcatgcagaaacggagacaccacgcaacggagggcggggtagcgaattgagtctctggctcgcaacgaggaagcactgttagtcgtctctagacgagaattatgtaccgacacaacgacacaacgatttcgatttgcattgacatttacacacccagttactggagggtattttgactacagaatgaaacagcgtctgcgcacgacgaaggacagcaaattcgtaggaggggaattgttgattttcagagcgattttaaggcgacaattatgcacaccttgtgaaaagacagtggaaatttctttcaaatccagtaaaagcgtctactaccatcggcacactcactcaagtaggcgttctgttgccagcctgaaaacagggctaaaaaggtatcaagggatcctcttggcgacgttaaaactttcacgcggtgcttcgttctctgtgcggatgtgagtgtctttaatgccttatgatattgaaattaagccttctgagctgttttccgcggttcagtgagcggcggtgtacagcaatcgtcaagaactcggccgtcta

SEQ ID NO: 803 - DNA, 2885 bp, Toxoplasma gondii
  source 1..2885: mol_type = genomic DNA
ccgagcgaaacggagagtgttgttgttgtcttctcgtgttcacgtttttcgattcatcggtggtttgtggttaacccgagctcttttttctgctcgacacgacgttgagaaacacaccagatgtgttcctctagatttgttaccacgcgatgctgttgggtgcaggccgagaactgccagacacatgtggatgtgaaaacgatcgttgcggttgtccagttcaattcttcatcagttcgtccctctaccggcaaaggctcactcgcagaaaaacctcgggcatggacagatgatcagtctgccgcgtggtcatacacgccggaccgtctgcccatgaaggcggttcttgacagagcagaagagagcgacgcatgtgggtgttaattatggataaatcgtattccggtacccctgcggatttagagctccgtggtaggtcacaatatgagtagcgaatttccaaggcgccccaggcgtgtgccgctgcaacgtttgcgcacatcgcattgcaaagtaggtcaccacagttctgaatgcgtattccacgttgcacagggggcctttcgaggtcttctgttcgtggtgttggcattgccatccgtgctggaacgcccacagtgacagcgcggacgatgtgtgacaggaggtgctgtgtttcgataaggtacagtggcagtagcttcttttcaggccgtgtaaaacgcgttaccgaagtacatttacaattcaacgagggcaaacaaaggtgctcccaatagacggtttactatactatcaatcagaaagacgaggggagcatgttccactttacgagtagagatggccatcaatgtgttcctgcccataacttacagcaacacacacggggtacatcagagaatgcctacactgcagtgagtcgtcagtgattcactgctgcttgacatctcgttctttgtgcccctaaacctagtgagaatgccggcgaacacggcaacgcttgggggtgaagttcctgcccgtttgtggcaaaatgtccacgggctttgaaaaacgttaacgaacttgtttcacgtagttgtcacaaggtacaatgaggctttctgggggaacaactctgtagcaagaacctgcacctgtcttcacttgacttgggctaccgctcgcttgtctgctgggctgcccagcggctcgattgcttaatggaagaggggctttgctgtctatgatttcgagactgaatgccactgttaagctgtacctttaagggtggtatgctgcttcaagatccatgtcgcccatttgaggaagcatcccttttccaaggtagtcgaagaactcgtttctcagtgcctgtccggccccgttttttctccggtagtgtatacacccaacaaaacacgggggaaaccgttctgttctcccgtgttcacagccacctccgagactgcgtgttccgagaagcattcaaggcaagtgcatttgtggattcgcacgacacgacattatttttgattatgtttgcatgacacgccggcgaccatacggctcaaacagactataagtcttttcatattctactaacctagaaaggtgacctttggtggggcggtgaaggagatccagagaaagcctcacaaattctaggccttgttatgtttctgacagtatagcaccatgtttttcgataacgtctatcaactcgcctgcctaccacaaaagcgttgcaagtgtgtgtttgggggctggaaaaactgtaccgcagacgatgtggatatatacagagtgaacggcgacaacagcaaccggtgaagagccaatacgcctcaactgtcggtgtttcgatgaagctagagccaaactgacgcacatcaccgtactcgctcccaaaccctgggagtttgtgtatgtgggtactggcgggcaccgaaaaccttccttggaagagtgcggcctgcggcactccacacagtcatggctcgccgtctacgaaaaggcagccttgccgcattgtgtctaagcgaagaagcttttcgtgcgtctcgagtgtcgagtaatcccatattgtagaagccaatgcttttcgttgatctgaggacgtctcccgggcgtcgctttctaccaggcggacattattctcgtcgcccatgcaaaaaacgcatcgcaacccctgtaaacacggacgcttttaggccgttgccgctttgatgtatacggtgctagtgaacgatatttataagccacagagcattgttttattgcaaaacgttttccgcagtacctgggtcccctagtaacccttttctgtgtccgaatggagcaagctgggcgagctggacgagtctcccgtgcgttttagttgcatgccttccagcacggcctcatattccaaggtttggaggcttcctctttccttgatgtttagacagagtcccggctttttttaatttcacgttttgttccgtgtgtctttaaaaaacagttgagtcgtcaactcctccggtcgtcttgcggagccaagtgaagacactcgaaaaagcggacgctttttctatgttttggtaactacgaattcgcgtccggaggaaagaacacacactctttcctcctctatcggcagctcctgcatcaagatatctgctactcttcaccgctcgcgtctttcggcgagagatgcatttatcgccgtcgcccgctacagaaggcggacactgtaaacggcgaggcgagcacagtcgaaatttggttttttgttgaagtccggatactttcgggaatctcttcacctttccatttcttctcgggtgggcgcagagcttcgcctaacgcgcttcgcaatccgcaaacgcaccagagtccgccagcagctaactcgaggagttttcccgtggttgaacgtgagaaaa

SEQ ID NO: 804 - DNA, 1604 bp, Toxoplasma gondii
  source 1..1604: mol_type = genomic DNA
gaagaagaacttcatgtaaggaattcctaaacggctgtttcagatgcctgccccgtgagaagggactggctctacgtctctcgggtggtcgcatcagttcgctgttaatcggaattcacagtgtcgttgaagtagcgcagtggacgagcagagtctgaaacttcgtgatctgtcagttccgctgttatgctgctccattcttgatttagagttcgacaaaagtcaacactgcagacaaaggacgcgaggggcttcctcctcacccgacatccacgaaagtggactctggaccggccggcagcgtttcgccgcctttctccagtagctcgtctctccccacagcattcgccagaggcagagatgacgaatgcgacggcggagaagagggagactgaggagacaaagaagaaaaaggagaacgattggaggggggaggactgaaagctgcatggttgtcaagctcgtgtggctccgcctgtctcagtctccttttctctgcttcttgcgtcaggcgcgccgcagcagcctcgacgcgccgcagaagttcgccgtctcctacttggccggattccgaggcgaaggagcaagagggcaaagagagagcagagcaaaccgcagagaagccaggggaagcatgcggagaagcaggaaaagaaaagagaggaaacagacgagcagggggctgtcgcggaagccgaggagagacacctgggccaggccatgaacaagcagcagcagaagaagccaaatgggaagaagacgaggaagcgggcaaagcagaggcagataaacgcgaggaagataaacgagaggaagataagcgagaggaagataagcgagagggagggaaggaggaagataaacgagaggacgaggaggggagatgtaagaaggacgctttcgtgtgaggaaggcgagacagaagcggcaaaccgcgagaagaagacagtcggcgacccgccattgcgattcgacgactgagcagacgagcgcgaaagaaagaagaaagtgagggagagaaggtggagcgataggtcgcaagaaatgcaagaaatcaaagtgtggaggagggacagggttgaattgatgacgggagaacttgcgttgaagactttcagcagaaccgtattgaccgacgtgtctctcctctctcggatacagctctgcagcagagatgcttgagttccacgcaagcagttctcttcactgcgtttagctacgcaagggcagataaaaagctttgccgctcctttctctctctgctgcctctcagtccctctctttggcggcaaagaacgagagcgttaaaaccgcgcagccaagaacagaccaacagacacggcagctggacgacgactgcttttcgccgcgaagcgaaaaaggctgctgcatgcagagaggttttctggggcgcctgagggtgtctgtgcactccgcgaggcaggaaggaggcaggccctctccggcctgcatggttgtttctgcttttcaggttttctttgttctctttgcgtagtcgcttttttgctgctgttttggcgtcccctcttggtgcatcggggaatgccacgaaaaatgcccaacaggaacataagtgcggtcag

SEQ ID NO: 805 - DNA, 1304 bp, Toxoplasma gondii
  source 1..1304: mol_type = genomic DNA
ctttcgtttctccttcctcctacgtgtgtttgtctggcttcgttcgtcgctccctctcagtcgttttctccttcccccgcgtttctcttcttctgtcctcacctccccttttgtccagagcgttgacgtctgcaccctcgaggacgagacctcggacctcctcgacagcgcccttgcgcacagccttcctgagtttctccatcttcggcttccggccttccagcagagcgacgcgaaggaagacagaggcgcgcggactgcaaagagaaaacgagaaccgggagacggagtccgcgctttcggaggcacacggcgaaggccaagaagtcacggagacgcgcagagaagcggagaagagagaaatgaagtggaaaaacgcgaccgcgaggaaaagagagaaagggagcgcaaaagccgtgtttttcgaagacgcgttgtctctgtctcttccgtctgccccgcgacgcgcacagcgacgggagggaagggaggcggaacggaggaggaaggagaagagaaaaaaagaaacgaggacagacaaatggaaagaggaagaaaacagaaagaaaagggagagaggaagcaagagaacctagaaagaagacaagcccaggagaggcactgggaactgccgtatcgcgtcggctgcttgcagtccgaggcctctgagaggaacggccagcacagaaacgaaccgagaaagaaagcaggaaaaagagaagaaagaaaagagagaaagagagcaagtgaaagaagaaagcagacacagggcggggtctcgacgaagacacacacggacagctcggccgccgtctaggagcgaattggagagggaggggaaaaacgagaaagaccaagccaaaaacgcgacgtggacgcactctgttttgaaggatttgtgtgtaaaggctctttcaataaaagacgggcagaaagagaggaaagtgactatttgtcgaactcgtagcctgcggtctcgtggcgtcttgtctcgctgtcctccgagcagttgcatgcacattctgcatgcccgagagtgtctccttggaacccagagggatctcttcttcacatttcgtacaacaagttgttttctctcctcagatgttgccgcagagaagtcagagagcagagaaaatgtgactctgtgttcttctctcaacacacagggaggccgctgcagtacagggcctctgctcttgtcggtgtcttctgagaaatcctctttccctcgcttccttgcttttttctccgctttcacttcaccttattttccgtggtactttcgaggtcgcgttgatgca

SEQ ID NO: 806 - DNA, 3041 bp, Toxoplasma gondii
  source 1..3041: mol_type = genomic DNA
cactcggctgacaatctcgtacgccttgaggacgtttctagaggaaaaaaaactctctccgtccttccctgtacccccagcgctttcgccttctctcagtcgagcgcgaatctgcaacagcaagaggccgagggtgacttcaaattcctcaagggcttcaactggcatctgtccaaggcctcgcttcaacttggggagagccacctcagagccgtcgcctccctggggtgttccaagagccgtcagaccatcaaaaagaagcagcaagtctggagtcgtgtagttgtgcaggttcgcgcaaatcgcggcaagtagtctctgaactgcatgcatatggtgtgggtggtgttgcactggccagtcgtccaaggaagcgacaaagagagaaaaaggcggccgttttttcagtgcaactcgcgccgccgtgggtgcatgcgcgcgatacgccgggtcgggttttgtggaagtatctccggtccggagacagctgcggtcttcctctgtcacctgtccatctgaagagtcgctgaagggcgaagcgaaattcatcgacggacgcacaactgccccagcaagaaggcggtcaacaacccgaaagtctgagacgcccagacgcttgcacacgacgggaagggcgagaaggtcctggcctctgaaaaaaggtttcgtcacgagaaggtgaagcacgcgcaggagcgaacgccaagagacatacgggagcccggcgaaatacccaaacaactcgccttgtctttgcagcttcagcgactggcgccgaaactctcgaggggagagctgggaagttccacaaacgggcactttcctggcagaacgagacagcgacaacgtggaggcaagtgtggtgaggcgacggcggaaaagaaagcggtgagggccgtcccagtgggttggagacccgtggtgctgggcggggatacagacagagtcaggatccgtgaaggagcacttcgacagttcgttagactgtcgaatcgaggccgcagaagacgtggggaaagagattattcccgaagggaagtgtgcgaagccgcaggttgtcatggatggaggtaaatccgcgtttccgtgaaagcccactcgcgaggaaacgcagtcctcgacaccttgcgaacgcgctacgttgggccgtgtgcgggtgttcctcggtagacacggagagtcccgttgtgtcaggtacgggcgatcgaaaggggcgccacatcgtgagcaaacagaccgcgatgctgtctgctgtttaccgccaaaaccatcgagatttgcccctcgaaacggcgcttgttgatggagcccgcccggcgcatgagacacgcggaggccgggggcgcctccattggtcgccaagcagaagcatggtttgtgcagacagtctgtgaaacagctaggtcgaaccccacgcatgcttgtatcgccgtgattttcaaagtgcaacagatacttcagtcgactacggaaccaggggtcgcgcgcccgccggcgacgctgacatgtgtatagcaataaactcgctcacgtaagcctcgttaccccctcggtttttcgtccacggaactacagtgatatgttcagaacctcaattggaagacacactgaaatcctggcatccacccttgtctctatctgcttggacacaatccgtaggcacttgtgaaaggagcctcattcgcgcgcatgcagcggaaaatttgatcgctgccctccatcactgccgtttaagccgtttaatgcatggcacacgggtggcgcccgctgttgcagctgctccctacgatacgagagactgctcaggcgtgacgttccaaagaggattgtgaagagctcggaaagacaaggcacggcttctccaagcagcaaagtctcagtctgcaccgccttcgtgttctgttgctgaagtacatcttttttaaggtctcggccttgtggcgcttgcctcgccgtatacgactaacgccacattatgggcgacttgcataggactcccagcgagttcccaatttctgagtaacacataaacgggagaggaatcctcgaaacttgctaaatcaggttgtagctttacatctagggtataactctgagcgtgaaccgcggaagcagacgcagcctacagctgcctacgcgtggctaagctggtgttcaacgatagtggtgcctgcccttcccactgttgtgccgggaaagggtggtatttttcagcagaacaaactgtggcgcccaataccaattctagtcttcagacgagaggctcaactgtagccctcttcggctgtaggacgaggacgatttggtcggaaccgtcccggcgcatttactacgtgtctcccaccccattcgggcgacaggtggttaaccgggtgtaaaccttctgtgggctgtgagcggggggggggggtctgcgcctgttgcaaggtgagctttttccccactgtctctcgtggttctggtgtttgctgcacgcgcggcggcatggctacggacgggttgagaagcagaagcagaaacggcggcagcggttcctgcgactctcgtagcaccagcgtcgtagtcccctcatcctgtggcgggcaaccccatcgaggctgggcacatgatggcaaatcatttgtttggtgctttctcattttccgacgaatttgcgttccttttttctatcgtgcacgttttccagaatccgtttgtttgagtcggtgcctggcgtgcgctgtatctcggaggcaggtgtgggctatgctgcataggccggaacaagacgtcggaagcgacaaaattgtttctcttatccggtgcctcccgtttctcgtgtgggacagctcgtttcgtgagtttccttgtccacagagacagctgttcttttattacttcggcatctgcgcaccgtccgacgcgcgcagactgatcccctcggtgtcgagtatttcagtctcctctggtcttcggagaagtgctctcagcggtctctcgagaagctcttgggatcaagtttcctcatcgccttcacttctctagatacaccaaatccacca

SEQ ID NO: 807 - DNA, 3420 bp, Toxoplasma gondii
  source 1..3420: mol_type = genomic DNA
gtggctatgtggcgagcgctgtccgatatctgtcggtgtactttttcacctgtcttggacagtgacagttgctcgacagccggtgcggctacgtggtcacctctgctgttttcatgtttcctctctcttcccgatgccgcgttactgttgcccgcacattcctgatccactgcccgttgtcctggcgatttgcgtctccctgtgcatttcatatcccctatgccatcgtcctccgaggacgatgtcgttaggtccgatccttcctgtacactccatatgttctcattaatttcccctattggatccttcctcttcaaatgtgaatgctctgaatagtcatcacacacaagcgtgcccgtttcctccctggctacagcctcacggtgcggcagagtcccgtgtgcaccctctgtttcttcctcagaaagggcagagaaaaaacgtcttttctgcgctggtttcgcttcataaccacgggaaacatcgtcttgcgccgacgtgcaccctgccgctccttcgaagccactgcttctcgcagccgtcacgtcttcacacagcgtcttgggcggaacagaaaattccggcctctctacggccttcacaccgtccatggtgatccgatttttgtgtttgactaaagtccgcgttgacaactgagtgctgccagagctctacggcttgcactacatcttacacatgcaatggtaagagcactggaacaaactgtaatctcacttcatagccagcaaaaagccactttactgccttcgcgtgggtccaccttcgcgagatctcgactgcggtggttcccaatccgcagctcacggtcaccgagcgtcaagtccacgaaatctacgccacgtgcagaaataatagggcaaacaccttcctcaccgtatttttcacccagaaccgctctaaacggtgcaagattcctctcgaaaacgtcgaaatccatgcagagagccacctcattcgagatgcgaccttatccacggcttgtggccgaagggacaagtcgggagcactacgacttttgacacaaacataacgacgatcagcactttgaagtgacagatggacacacaaaagtttgaagggtgtacagccaactggtaagagtaaaaatgaacattcgcggactgcagcgctggccccaagaatttgtcacgttcgagataaaaacgacacagcgacacgcacgtttttgaatgtgtaacccgggggctactagagacgagatagccacggcagaaaaccagcaaaactagcagtgagaaagttgcaaccaagtgtgctaacggagattcgcccgtgcagggagcgagcccttattcctgaggcggcaagagttgtcttctgttttttgctgtcattaccacattcgtttccacattatttccacagaacataagaactaataactgaagggtagatctgcctagctaagaacaagttttccacgagaagcctccaataaaacccaggtcttccatcctcttcgatgctgcgtttttcctctgagcatgcaattcgcaacgggtctcgacggtagctcgccgcctctataaaccacttggacccgggcaaatctcgaaaccagcggagaagagtttgagtatatcagtcaacatcacaggagtgtaatgaaatgggaaacatgggagcgttaacccgacaaaaatgagttggaattccttttacaggagacggctcgacgtccggctgcctctgaatgtgccgagctatagcgatgtcgcctcaacgcagccatgtatcgatgttctcaacgtgcagtaaggggcgaggcagatatgtcagctgaaagcacgaaccactttccttctttttagactttcatgaaatggtggtatctttttgcttatggcgacatatgtcctcttctccctctgcacttttgcaaaggccagcgccttcccacattcgaaggatgaactctgtgaactgatgcaggaggcattacagacttttcactttgtagttatctttggggattcctatgaatgtatactaagcccaaagcagccaggtgcaagcagaaccgcttgagagaggacagcggcgggcatttggagctgctctgcgtttgcttgcatctccgttactctagccaaacgcgcgtggtgctttgcaaacatcactctaagtacacacactatcgtgaccttcccccttcgagtgggccgcgacgtaaaaacaactacaggtcttggaagtcctaatgcaaaactaagagggaccccagcatctgacacacgttgttgctgaaccccccaccagctaacgcccacaccgactgcagaaacgaagtgccaagcaacaaaaagctagatgtggatgtcatgcttcttccccccttttgatcttcgatatcgactcctacgcgcgggcgtgttctctttcgcttgctacaccaggcccctactgaaaatccattcctgatacgatggggcagctggattaacaggtgttcgcaggtggctaaccgagacaagggacgcacaggtttcgaagcatgcggctaggtgacagaatatgatgcattagaagctttatggtaacttttcttcaatcgcgaaaacgcgtaaaggttgcggtctaggcgcagttccgacgctaccgtgtgatgtacacggccggctggtatggccacgagttaaaacagtctccctcaacacaccagagcgcttcacataatagcgctaggaaggactggaggacatccgtttttgtgttcttccgcaaccgtcttagtgcttttcgaccacctcttcgtatagaagtcatggaaaatgcactgacactaagatgcaagttcgagttcttttgtccgattttgcatcgtcgcgatgcagctgccagtatgtttcatgatgaaatgaaccggcagtgattgatcccaacttcccaggcgaactgaaacgacgcaattcaaggaaacaactgttcgtaagcgcaattgtttggaagacacaaaaagcagatgttaaatttcttcaacgcaacaattccgcgtctacgcttcaaacctggaaccagcatgacgaacgaaattgcagtttctgtaagaacacatactactaagctcttactgtgaagaccgatgccgatggcttcgcctgctgtcaccaacacaaaggtcctgctgatgctcctgagatacgtccagaacgaggccggggacacacggcttcaaccccatgaaattagagacgcgtcctcttaacccaccagaggctcgcgactcttcgctgtggcgtctcagttaatatacgaagcgagcaaacggcgtcctgttgatttgtgagattgactctccggattgaacacgtctttctttattttctaagggatttcgtgaaccaaacgcggtgaagtagttcctcaatgggtttatta

SEQ ID NO: 808 - DNA, 5030 bp, Toxoplasma gondii
  source 1..5030: mol_type = genomic DNA
attcttctcgtccctttccctcgcgtttctagacgtgtactgctacgcccgcgacagttgcagagtggactcgttgtagttttactgtccacctgcaggggcctggggcaaaccagttgcgcttcgtttgagaattgaagtagtttttcgatctaaatctcgatacgaattcaacgagtgatacagaaaacctaggggttaggctacctgatgaaatgccggaggcagtacatcctagtatgtgtactgttggaccagacagttttcctagttgacgacttgtgtcacagcctagaaaaggcagtctttcttttctggaggtacggggaacgttcgcactagactgtgcagacaccttgtgacacagtatgaagtggggtgatgagacaaccagagagacagagtcatggcatttgtacaccttgctagtaaatgttgggttttcaagtacacgctgcttggaactcgacgcagaacttctcgagttccagtccccaggcagtagcaggcgggctgctgctggttccgcagtccacagatggatttggaaagtttcctgagagtgggttcgtgcactttcatggcgtttgcttcactccgatcaagcgagtttagctggaacactaaggaagaagtctctgtcacaaacgctaggggtgtcttttgtaaatatttttttacagtatatacgtcaggctgtcgccatcatttgctacaacgatacctctctcagagcgctacgtgcggtagttcagcatcctcccctagtacggctgctccacaccatttcgattccgcgctttatatttaaggattattgttgcaaatcgtgttgtgtctctgccttttgcgaagttctgttcgtcacgcgtaaggcaaatggacaatagcggatgggcttccaaatgatccttgataccacaacaaggccgaaaactcgggggcaaggacatacttgtccgtctcacaatacttcacacatgatgcgaagggaaacatcgatatatgggtatatatatatatatgtaatcatggagaggaggcaagagcaacacaaagtgcgtcaccgtcgactctcacgagaaacgaaaaacctctgaaaacgcagacattttccggcctcaagcggtctctttgtcgatctgccaaagacgttgttttgttgagtcaaccttgccgcagttcgcaacttgcctccttccttgtcggtgctctttgggcgtactgaagtctttgtcaagcggaagcacatgtgtgactgccagcaccaacgagttgcacaagctgcagacgcattcaaggatctaaggtgcagacagtgggtactgagctgcggagttttgaatatgcaaaccacgctcttgactggagcttccaacattgtgtggagtatttttattcgaagagacgtgtacagtcacaaacgaaaaagtactgtttcccgcacatgctggcattgagcgttgtaagcgacgagaaaaagcgaacaccttgcgcactcctatctccacagaaagttaaacatcaatatatgtagagatgcagagggaaatacatacagagaagtacattggtgtgtctcgtccttctgtgctggaggttcttcgatggccaccaacgcagtttaaaagacggaaaagagaggtaagaaaacagtggcgagtgcgatgccgaacgtggcttgtggtccagctgcatgaaacacgagtgtgagagctggcccggctgtttcagattcggttgtggtgccagttctcgatccgcgagcttgtttgttgtaggccacgagacagaagttgacggcctttcgcgggagttgctccattggcggagtgacgaatttgtagattttcttcacccctgcctccgcctcagcgggctggggagctacctggctccagagttgggcagtcgcctccgggaagagcgaacccatggaaatagtttggtctgtctgacagtgggagtcatcgaacgggagcgctgtcgtgtcccaggaggccgggttgaattcgagcccgtttgctgtcttatcgaccagagcgaaactctgtccaccgagcagggaaacttcttgcgtgcggggtttggtgattccctcgggctcaactatcaggaagtagcttgccggcggagaagccccgtctggccatacgcggtttgagcaggcaagcaaggcaggagaaaaggcagccagaaagatgcacacagacaaaaacctttgtcggccaacgccgcagcaaagcggacggagcagcggacgtgtcatcttggtgcacgttgtaaggctgagacatccgtgagttacctaaacaacgtgcaagcgcgggaaatccggaaacccgcaagccaacgagggagtttgcagaaggtgagaacggtttcgctctgtgaggagttcatatgtttgctcgaggcaacgacagtggcggtgagccgaatggtgctctattacatctgaaggcgcttgtggttctctgttcgtcacgacggataggaacaacagtgacaactgatctacagttggagaaacagtgggaaggcgcagtgcccacaagtgcgtttgcgcctaatacacctgtcccttttttgcgcgcgtgtggaactcagaaaaggtgactatttcgaatcttggtgagcccactaagataatgtgcagacatccacaagccgccgtttgagagtccctcctgtgctgcggtgtgggcccgtagggtcagagatgagaaaagtttctcgcaagtgttcacctttcgcgaatgttttggctgtttctttgtttcgttttgaactcgcagagactcaagaaaagccaagcctttgcacatgcggcaaacacgatatcatctcgtgtagcggcgcaagagtaccgactcgggcaaaaaagtcacagaccagccgctactgatagaaggcgagaactatgaggccagtgctggaatggttgcagcaaagtgaaaaaattgatttttttatgaaaacgttcgcaacgtttggtgaagaatataatgcactcaccaagttgtaaagcctggatgcagaggtgtgattattgcacactcacagtaagtggcaacgctgcaggcgtctcgaaaaggagtgacttcgcggataacaagtcgctcgatcagtgatatatggaaactgccaagtcgcctgtttgctctaattcaaagaaccgcttcagtcgacgtgcttacagccaccggagtcgcaactgcccccgcgactcccacacagagaacaactaaagatctattcatcccggcattcgtccactgtcaagcgacctaactgctgacgtttttgcacactgagtcacccaaagatgtcaaatgtagtgtgaacgcgggacgccctacggtttcgttgttgaatgaatacagtgaaaacgcagtacgagcttcgcgcggctttgcttctgcgccgtcgaatcaacgtactgatgagttactggaggaccgtgctgcgggaacgtatccccgagtggcatttttaaatccgaccacggacacacttcctacgaagtacgaagaaaactgcaggagaaggggggcgagggcaaggaaattgcgtgcagataaactaggggaacgcaacagcgaaaactactgaaagaaggaagtgatgagttgttgaaactctctattcttttctgtgcctaaagcatattaaaacgaaacacaaccggccgagagcatgtctgcgggtgccatattcgccttatgcaagtttctgcctgttaaagccatcttgcgtccacgaggagagtgccggaacttagcatcgatggtgcctcaagtcctgctctgggcaggagaccagctgcgtggcgttgcctttcgctgtctgagtccacctctgcaggatactgttaaactgaaagtcaaccgctttgttcatgcaagggagctcctgtgctctggacctcatgtatctgctgtgggatgtatagctttcgagttgatgacgaacgaaaggtacccataaatattcatattgcaagaagtctcgcatcgagacggaacctccagcgtccatgcacacaaatcaggaggggggacaggcttcactgattatctcggaaatacgttcgtctaagacaaatgtgtagcagctaccagtgctacggcgcaacgcacgatgcttgtcacaaaccttgcgccaaacgcacacctgacaaacatcgccgcggaaatcccctggttcttcgagaaccagtgactcttttgccggcagaatgcactgcgaggtcttcacgatagagtcgctggctgaggaaggggtgccacagtgcgataagtgtgtgtacggtcatgactccgggtgtacatacagctgcgaggaaaacttgaagtacaattgcgttttctgtatcggttggactgtctgagaaaagctcgcggactgtggcgctgcttttgcgctcacatcttacctttttacacagttgcgcgtattcgtggaaagcagagaaggcagggagtcatggacagacaagggggatgtttgttatgccgttggctttctttgaagcacatgtccctgtactacccctctactccacagctcctcgaggagacacgacggatgggatatctcgagccgcacgcaaagatggtgtctccgtagccgcaaagcgatttccggtgaggagctgcaggctctccagctaggcacggcgcggaaaagccgtccgtcgctttgttgtcttgtcgctggagcgcgggtgctgccagaggcttatttgttactaaaccacacagaaaggcaggaacataggagaaagtttggagagggcttttctctggtgagccagacgcgtttcatctgcaggtgccgcagtctgtcggggtcacctgcgcggttgcgtttccatcttcgttactggcctttgcatccgacaaagtgaggcctcgctctcgtcttgccggtaaagaaattttctggcattctgcacactaccgcacatgttttttgtgcaattctgcagggggcgtccgaaaatgaagaaagtcaccggcaaaaaa

SEQ ID NO: 809 - DNA, 2183 bp, Toxoplasma gondii
  source 1..2183: mol_type = genomic DNA
gcatgcgcgcagaacagtgaagagatctcagttgttacagaggaaggtcgctgcggatggcgaggaaaacaccgcacaatctaaaatgtcatgggggtcgcgttcacctatatgttcaagttcctgcgaaaacgccagaggctcttcgcaactgtgtctctaagggaccgcacacagtccgtcactgcggactattacatacgccttcctctcatatccgaaattcacttttctcccgctctcctcccgacaatttgccgtcgtctcgaggaattgcctcgaacagcgaaaggcatgtagtgcattcgttgacaggacgtcttttcctcggagagcgtagatctgtccgtgcgctttcgaaacagaagaaacgcagaaagacagagccccgtctttccacggaagacattgaggacgttcttcaactgaactgttggggggatgcagaaaaaaaaagctctgcacatctgataggagggctgcaatacctggaaacgtgaggggtctggccgcaaggagtaaagtgacggctatcgattttcgatcgatgttcagcgtttccagttgagatgcttaacctagatttcacagtccacgtcaactgtgggcacagtgtcggctgctaccgcaaggctaaataaacagtgcggcggtgcttagcctgaaagcctctcacttcacacagatgcgctggaacgtcgagttccgtttcaaagccttcctcacttttgttgaagccacaaaaagcaaggaatgttcgccttccgcggcaaaggctttacccgcaaatccgagtatcacagggacgacaaacattgaagtaaagcgtgaaagggactggtctcttgtcgtccctgtcggagatacgcgtagaaactggcagcgacgcacagcccctgccgtctttttccttttccagcctcggatctttcacctcttctttgtgtctgaacagaaacaacttcgagagatcgacgctcttctatctcagcttttcttcggttctgcgcactggccaagaaatgcgctggagttgccacccaggaaactcggttttcttcaacaaaaatatcaacttttttgacgctccgcttgcagcgcccgaacatacagcagaagctagattcactgctgcacctgataggagtcccgcacaggtgtgtgagggatttcttttgttccagttcaaacgcaaagaacgcgaattgagcttgttctctgccttgtcgaggatttagcaacgagctcgaacctcggatgctttgctcacggctggactcgcggagagtcgcgacggtcgctttcctttctgacggttttctccaaaaatgaaaatgatagagtggagatctcgagtgtacagttttgcggcgttgacgatctgcgaaaaatcagatggtctcgacgcatgcgcttgcacacgcgtaaattcatctcaaaacgccgaactatagaaacatgttcggtggttgcttggcgagtcgattcgcttcccgaatttaaacctttttttctcctctcagagagaaaatcctctttgttttcgcgtcaggttcggtctgtttttctgcgttctcttcttcgatcgcgaggcacccgttctcaggcttcgcgctcggcagcaagcgcctcggttccttccaggaaatgcacaagacagcaaatggcttttgtgtgtgctgctatctttttcgttcctagtttgctttgcatctgcgttttcttctctctcgcgcctccaccgtctcctctcttgttcccttttcttggcgcctctcgctgcatgcaagcatctggctgtctctctctgccgccctcgtctccatctcactgtatttcccctctctcctctccttgctagctttcttcggagaaacagttgttccgaaaagaacgccagagactttcttgcatgctctgtcgctcctctcgtctacagctttcttcggagtagccttaaagaaaggaaaagaagagaaacgtttacctgtgttccttctcctctcatttcgcgcgttctttggcggtattttatgtctttcaaaaaaacatcttttgcgtccagcctctctcctctcgtttggagctgtctttgagaaggaaatgctccgcataactcataagagggtaaagtcagtgtgaggcagacggtggtctctgacgcaaacctcagtgttttgcca

SEQ ID NO: 810 - DNA, 1533 bp, Toxoplasma gondii
  source 1..1533: mol_type = genomic DNA
cagctcgagtatctgtcaaatattcttgcacgcacgtctaacctgacacaaaatgcatacatttacatatacatatatatgtatacatatatatacatatatatatatatacatatatatatacatatatatatgcatctatgtatacatatatgtatatacccgcgtgtgtagggatcgaatatcaatgcccgcctgcgcgcatgcacaaaacagcatttgtgcatgtttcggactcacaggggaactggacggccgtcaagcgggaggcgacgtcttcgagatcatgctcttcaccgaggtgtgggaggtgacgcaagcctcgccagcgatgaaggagatcacggatctctgaaggcgacagtttgtaagaagttccattgtcgatttcgtccatatcagggacttctttgaacgacgctgccaacatttctctcccaacttgacctccttccttcagccatgcctctgttctcttcgcctttcacgcgtctctcctcttttcctcttttcttctcgctcttctgccggtttctgtgtgatggacgatcgcggaggcgcggggacgacaactgaaatgaggattaaaaggaagaatattcagtacagaggcgacgcgagaagaggaaggtgaaagcggtgaacagcaaggatgacgagcttatgttagttgcgagaagaaaatagaagtgccaagaggtacgaagcggatgacaggaggcggacgaaggccacagcggagcgagcgaggaggcgagaacgagaatggcaagcgaaaaagaggacagttccgcaagacaggcagactcggtttacagtcaccgaaatccttctgtgtgtctcatttccttggagtggatgtccgttgaaggctgagatcctgcaaaaaaatggacgacggcttgctgctctccggccacaggagatcacaaccacgttctgacagacagagaaagctaagcgcgagcgtaatcgagagaaagagagatcgaaaggaaaagaaagagacacagttcctctcttggcttcatttagtgggacgaaggaggacaagggtttctctgagtgctgagaatcgccaattccgccgcaaagacgctctcaaatgaggacccgccgcggctgtttttcgccgttgatgtagcatgcatgcgtgtgaatgcgtgtgagtgagtccggagaacagaaaaaactgtcagggtctcaaaggagaaacggtgacggaggaaatgtctcatattcatctgcaatttctctgtacagaggtgtacagactgcccttctttttggcaagcaactcgtgcatgcatctctgagcagaaaacacgaaactccttttcactatcgaccacgcacgtgcacgcatatccacagtgaattaaaaataaaaattgttacagatggtcagttaattgtaggggtacgtatctggaaatatattatatacatagacagacagagagagggagaggtacacagatgtctgtagaagagagggacgttgtactgcatgaacaggcgcatcgcgagaca

SEQ ID NO: 811 - DNA, 2059 bp, Toxoplasma gondii
  source 1..2059: mol_type = genomic DNA
gaagagaacggtggagaaagtcatcgagtggactgactgcagtgtctggcgtgaagggtgaatggagcgtggctaaatcgattaccgttgatgtatatataatgttctttcgcattcggcagaaagcatgggaaagcatcacgcagcgtcttggcaatcacggaaaaggacactacagtgacgggggccaccggaagtggcgagtgggtttcaacactatgttgtatgccgtcaacaatatcttgcagaatggggagaggctcgcggcagtgaggacgcttgccgcactgaatcggcaacgaagagagtgtgtgcactgtatctttcttctaaaccgtgcaggctcagtcgatgtggactttcctcccatgtgcatcgttcttttttccttttgggaggaaacgaggatgccctggttttttttttcgcgatgaagcaagacgtgcaaactcgagcgtggatctctgttcaagaaaaacttgcacggaatacgagttgagacaccaagacttgctctgagagcggccccgctaaaaatccacgaatcatcgcggtccgagaagggcgccgttgagcgagtctctgtttcacggcggagacgtggcgtccagagaacacataattggcgaaaggagaatctggaattttgtacagaaccttgtgttaagtcctccactgtttttacgagtaggcattcttcagctgtttctccaaagatctcaacgagaaaccggggcatcgaggcctggcggacggagcgaaatggagagaaaaaggttttgagcacggagcggcacctccgggtgagtctcaaaagacgtaattttgatcctctacggctaattctcttgtggtaaaagagctctttttttcaaactctgcaagacgcaaaactcagagagcgcgattcaacaaagtcccacacaacccgagggtgcagtcacctgtggcaacgtcttctcctgagttgcagcgatcgccagcgcatgttagttcgaaaaagcgccaacaagtggagtgtacaagctgcacaaataccctaacattctctttggtagtcgcttctttacgtcaagaggtgcgacacgagtacctgctgcccagaaaaagccgcgaaggaattctgtctcaaagaagactactacccctacgagagttctggccatagctatcctacgcccggtttagcaaaggagtcctttcaacagcaggtgaaagaaaatgccgttcgtctttctgggacgacaacggggtagggtattccctcccggcggactgggacgtacagagttgcttgggaggaaaagttcctcgtgtggatgccgaaatctgctcgcagaatccgcttaaatgaagggtctcgtaagcaaccgctcccttctcgaaaataatgagactctgagcgagtccgttttcctctcctttccactcagcaaactcaggtttgagaaacgctgccggcgatgcatgtgtgcatgcgtcggttgccggaaggaaaacccgtgctaaaaagactctaagcgagacgcccaaaatgttttctgaggtaggaacattttctgtcttttcttccttcccttctttcttctctacgggaacagggcagaaacccttctgagaagcgaccagttcgtagccgcctcgtgtctcgaaaactattgagtaacatcgtcgtctcgacgtctttcttccgcaagccccggttcgatgctccttgcctaaagcttcaacttttctctccgctgttgtggcctttgtctcaagctgaacgccctgcaggttcgtgtcgcttcagcaggactgtttcttggtcgacgcagggcggtggttcgcatcttcagcgcagccgcctccaccatcccagcactcgtccacgcaattgtaacgagacagggaagagtctgcggagttttgtgcgagagacgtgacggcgttttttcgctcgagacatccgagggtgtcgggaccggctccgcacactctgcggctctgtaaaacacggggagaaaaaccttttcaccactcgttttcaggcgtacacttctctttctgttcacca

SEQ ID NO: 812 - DNA, 2662 bp, Toxoplasma gondii
  source 1..2662: mol_type = genomic DNA
cctgcatcgtgactaccatacaattcttgtggctggtcagtttcaccgcgagaattctctgatgcgtccgtggcttttgacacagtgtcagcgcacctgctcgaactgccactgcgaacagttgctgctgtactggatcctgcatagcattgtcgaacgcggaaggccgtggacccggtcgcaggattataactcggaaaaagttgcgccgaaaagacacgccgcatccgtccagaagttccatccgttctagactgcgattcgtagagattgccaacggaaaaaacacttctgttgcatgggcgaacaatgacttggtcggcaggacgcggcggacagtcgctttcgtttggagccatcgggcgatgagccgtctcagacgagcgccgagagaacggtttccaccgaaaccacggggagaacaggctggacgagccggtaagagacgttgatgcagcggttacggcgtccgacagcgagccgtccagcctgagcccacctgccaatctgatttgccgggctgtggcatcatgttcggtggcggggttctgtccagcggcggcaagctgcggagaaggaaaggccatcgtcgcaacacacacgaaagaaagcagccgcctcctgaagtaccaacatttcgggctcgataatctactttccgaagcgtgcaaaaaagtgccccgtacaagcccgcccccagtgggcgccgagtccgaccgaagtcgtgagtactgaaacctagcggaatgccttttcctcgtatattcttccaggtgaacgtctccacgaccgggaagctcgctgcccgtcggaacttcactgaaaatccgacagatacgaggtgaggggaggctgcgaactgcctggaaaactggaaattaggggcggcagacctgttaccacacacaactgccttcaacgagtgttacggcgaaggaaatttcctctggcacgatgccagcctgcgagagatcgaaacaccagacacacttgaagaaaatgacttgaagattcggcaaggcgacgcagctattccaattcacgaagcgtaggtacaccataaacctgaccgactcgctaccgtgtgggcaacccgctacttgtgccgcggaatgcgtccatggaaggcttcaagaagacgaatcacaaagatatggcgcctcgaaactgcgatcatcctgaaacggatgcctgtacacatactttagtgcatcaccacaaaccaaaagctaacaacagcctgcgttccccaaacacactcagttcactagcactcgtagatacaccattcatcattggcgaacgatgtatacctcccatagccaccacttatcccggaagtgtatacagaagaaaaccccgtggtactttcccctacagttcctcttccagaagcgcacatagacacttcacagttaaataacagggccatcgtctgtcatgcaaccaactagcgcggtgcgaatgcatcgtactacagggtaattccttggattcggcaaacgctgttcacaaggactctgcaatacgctgtgcactgctggtctagattgtaaatcgacgaaaaacaacggcaccataccacatcgttgtatacagaaagttcatatgaacgaattcggagtgaatggaaccatcaattcgtagacgccctaaacaggggcttcgagtcgaatgaacgcgacaaaggtaggcagcccccccagaacgaagctggaacgaacccttgccactttttcacagcaggcttgatctaagttctcactggtgtagaaacggctaatggccgtgccggtttcgagccgagagtggccttcacctcgcctttccagtctcgtgtttggaaacttcttctcaccaccgcatattgtcaggttcaaaaaaccaacacagccgatgtcggcacagacgtcgataggatccccgttggatgcaagacgaagcactgtcgggtgcacagctcgacctgccgtagtacaattgaggctcgccagatagcaggaaagtacgccccttgttacatcattattctcatacactacctcgggaacgaacatctatctcgaataaaaaaatccaaaagggacagaataaattcagccaagctaacggcggtagcggtaaatttggcacagggccccgcagtgtacgcgtctccaagccagtcagcgacacacttgctctacaggacgcctgtgagaggttcgccacgcgcggcttccaaggcgggctgcgtctcttgcaacgcaacaccaagcagcattcagtgccctcgttgcactgccgtcgacgtttccgtctttcgttcccagcaccgctgaatgggagcacaacatgcatgcacggctgcaacggaactgcagcaatgagcttatatgcggggcaagggcgatcaaggtttacggcatccacgccgtgtgtccgtatgctttgaacactacctgtgtggaaagttcagcgggagctgtgaacccgcagagaggttgcaggcattgggccacaggaggggtatccaacgtttttggccatatttgaggacgtgtttaatccattctggatttcggacggtttgaagaagctgcggacgtcaagaaagggggaacgttgcacttctttgcagtgtgcgcctcgtcgcggaagtgtgtcgaagaagcaggaacta

SEQ ID NO: 813 - DNA, 1980 bp, Toxoplasma gondii
  source 1..1980: mol_type = genomic DNA
ccgttttcattccactcgccactgttgaggcctgctttgcagcaggtgccaatgtgcgactcaacaagaccagcgagttaccaaaaacggcactgcagggcggatgttcgcagataaccttcgcatcggcttcactcaggttgtgaacaacctcgcaaagcacacccaggaatcgcgcaacagcagcttctgcgacagcagcaggggcagtcctcacgcgcttgaaagcctgctgcgccgcctgacagaaggacgtcagcacgggcaaagcgttgcctgaatctgtcactggcgagcctgctgcgacatgcgcttcggtcactaaagcagtgcgcacaacagacaggacttgctgaagctgagaagaggcggccttggtgatatcaggggtggtggcgacgttcatgagtaccgcactggttaggaggttgataatggagggatctcgaatgactggcagccccccctcagaatcgccttcggcagatctcgactggagaattgaaaggacgacatctaaggagttagccagttcatccagataactgccaccccgagctgcgagggacgaggattgcagcgcatcactcagcgagacggagtcttctgctgcaagcggagtgtccgccggaggaccagccccgttatgagcctcctcggacccacagcctgcactcattgtggaagcgccagtaatccgccacgtcagaggggtcgaaatgattgaactgctcggtaactctcaaagccactacggcagagacgagaccggcggaaaaatcgacacacaggtggccaccgctcaggggggcgattggcttcttctgagatttcgtaggggctggttctaggcgcagtcggatgagacgctgactcgcatttgttgcgcgaatgaagaaaggggtaccagaacggcaagaggcctcgctcgagtccaggaagaacgtggctgaggggcgagccaagtagtgagccacaacaatgacagcgaacagcaacacaagaatcgtgttcggttagacagtccttgagaacagactacaataaaacaaaagtggcgacgaactgcaggtagcctgccaacgggcaaacgtacgtacacacgagcgcgtatcaaagtggacagtttttttcgcatgctaggacagcgttttccgtcggctgcggccaataacgtgtgacctaacactcataaacagttgtcgtaaacgatcccacgcatgcgtcctgatcttgtgctgctcaggtttgaaactttaccattcaaccttgcgctgtgactttgcgcgtgctggcagccgtaacacatttcgtctgtctggcgctcgcgtgtctgtctcaaatgacgttcatcactctctctttgcgtattccccttgtgtaccttgattctttgactgtgttgttccaacttaagcatctctcgcatacgaagtgcctctgtttctgctctgccatgtcttgagggtacatgcacggctcctatgagacttggtgcaaggcagtggtggaatgacacacggagccccccaaggcgcgcgttgtctcgtctgcgtgaactcattgcttgttctcggcaactgtagcccagcccgcttcgcttcttcagcaccagtgcacatccaattactgacatgcacgttatgtgaaaataccgtgcaacttttctaccagtagcatctgctccaccagttagcagatttccagcgtagcaagtagggcaggttatcatcaggtgaaggtagcgaggtcgatccctgcttctccttcagagtagctgtccgcagtctcgtcgcccccctctcgagcctcgtgcataatcctcgtcatatgtcgcctagacgggcaccagatcagtagcatccctttccaagcagtgccacagggaaaccccagccgtctgacggtgcctgaaccggatttccaggaactacatccagctgaagtctcttgtagagtcactcagttgcttttacagga

SEQ ID NO: 814 - DNA, 4960 bp, Toxoplasma gondii
  source 1..4960: mol_type = genomic DNA
gcagatcccagtggcctccagcttctttgtgtctctggaaagacaaggtgggcgccaggcggtttgcagcgccgccttcgcatcctctctctcccctctattccccgttgtgtttcctctctctgtctttgcgcagtacaacagacgcttgcaccttccccttccacgcacgcgccctgtcgccaagtacagagcctgttcgttccccctctgggagctctggagaggcaggcggagccagcacagaggtcttttccggcggcttccaagtttcgccaaagtcgtcgaccgtgttttccctggacgcggagattcgcagacttactttctttcttgccggacgtctcgctgccgtcgatgcctcctctcaagctctcgtcgctgcggtttcgcgcgacgtcttccgagccggcacggtcgctcacggcgtcgatggaagttcgcacaagaggcggagttggagaaacagaagctcgcgaaatgacccacttggggtgtgaagccgcagatccaggagcagcctgcagcgcaggcatggctgaagcggctcgatgagaacgcatgctgtcgtccgacgccttctgcgcatgcaggcgcggacctccccctacactcgcgctccgaggcgcagcgtagtgcactgctgaaaacggagacgaagccgcagcggagagatacggagagacgctctgcggcgctgaaaacaccaagggagaacggtgctcctccggagtcgacatggtgcgggagagaggaaaaaaaggaaaaacgaaaaaagaaaagaagagggaaaaacgaaaacgcgaacgaaaaggaaaagagaaaaaaaaggaaaaaaaggagaaagaagacaagcggggcaaagggagaggggaggaggagagaaaaaatgtgaggtgtgaagacgaacgcgaagcgaggcgtgtgtatgcaaagatgatggatctgtgaagagagaaaaaacgagaaaagaagcaaagacggcaagctgtgggggatacacctcgtgatggtgacaggcaaacgacaaagacacggagggaggacgacaaaaacaaagtgcgttttggcttggagaaagaagttccagcaactgaaggaagagccgcaggtcccaaagaacgcggcgaaagaaatgacgcaacgagagaaagaaagaggctcgtgctcttcaaacacagcgtcctcagctttctctctgttgtgactggaaatgcatccgaagaagactccgcaaggctcggcactctcgaaagaaggaaccttgtcactacgagtagtgatggtacagcggaagtccagatctgaggcctggaaaccaaattcccgaggccttcagtgtcgcatgaggacgtagaactcgacgctgtgggccaagttgagtcgttttcagatacgcagaggacagctggaggagagggcaagaaaaacggggagaacgacgttcaagagaacgaagaggaagtaaggaagtcgccgagtcacgagagcttcagctgcttcggagtcctgagcatgacattccgagcaacagctgcaacaaaaaggacggacagaactgattccggaagccaagtagcgggtcgttctgtgttgcagagtgttctcgtctcaacaaaggaaagaaaaaagagagtttcgagagcgaagagctgaaattgccgcgggcaaagaagccagccagtcgagtccagggaaaaagctcgcgcgcaagtagcggtcggatttttcaggtatgcataccctctcgagaaggcgtccagctttttcgcctccgacaaaatttcgtgtgtgtcaagaaaatagagttttccaccttttccgcgatgtacgctgcgctttgtttcgcgaaaataaaacgggggggaaaagaaagggtcgtcaccgcgccagacaacgcgcctgtcttgcaaggagaaaaccgctcgctgggcggggcactcagaaggcgcttttcgcgttctttgcctcagttctcagatgttttccggtgaaaaaaatcgacgctcgctccactcacgtatctcaggcttctgcaaaagcaaaggcctcggcaggctcgtctacgcaggcaaatgctagcttttaaggttcggaacacagacgtccacagactgcctatggagagccgcggcaagacacgacaccagctgttttctcgctggataaaagatctcgctgagaaagaaacgacgcactgctcctcagtcctcgcctacataaaagcgttcgtgccgttgaagttcgctgaaatggaaagaggctgattttcttctgggggacccagatgcagtgccggagtgacaggacgaagaccccagtacttggttttcctcgaaacgaaagagagagcgaaggcgttgtctctcactgcagttgaaagcgtacttcaatcgaaagtcgacacaaggacaagtgagaaggaggacgcaagtgaaagagcgtggaggaacgaattctccttgtcgttctgtctcgcggaagaacactacagcttcccgcgcgtcttccagaactctcggtgcatacgtttttcaattgcaacgatcgaaacataaacagagaacgtaaaaaaaccaaaaaggatacgcacataaaggtctacgtctgcatatttcgggcatatatgcattcatccaaacaaggcatatacatacataaatatatatatatatatagatatatatagatagatatagatatgggtgtggaagagacagcgtagtaagtttgacaggtgtgaaagagctgcacttttgagagtcgagaaaagaatgtacaagctgcatgctcgagtctgtctgagttgagagctatggcagtcggtttcctcgacgaggtgacaacaaagtcccggtcaagctgagggccgtgtgggtgcacaagagggaggaaagagtttctccgtcaattctctctgggtcgattggaaaaacgagggaatgcaggctgtgtctttcgtcttctctctctgtttgtcatcttttctctccttctctgttcctgattggcctgctctgtctgccactcggagatccccgtcagtctctgtgtctcttgttccctatttttctccctcgaagcgtttgccattcctgcagaggagagagaggcgattctctgtggagttcaaagtacgccattcaaaaaccggagtttcacagcggttgtctcctgccttcttgatctaggattgctgatttccgcatcaggtcctggcaacgctgcaaatttgaggctgcgaattcgccggtgcattccactccgaaccgtccaagacgagacaccaaaaaagtgaaatgttaggccagggtgaacgaggacttctcgtttccctctcgttgtcagatgtactcgggaaatcctttcttcagcgccaagcatgcaaaaatggtatccatccttcgcgacagatccgtcatctgagctctttagttgcagtgttttcatgagacgatgcggctttgataaacgggcaggcgtactttgaaaactacttcaaatcttgacagtcgtgtactccactgcgttgcttcggtgtgcgagacatgacaagtgactgttactctttggcgctaattgcccgttgcgcgaccgctctgctactccgcaagaaatcgcaaaaacgagccttgagaggactgtgatcttctgtaagaaggagacagcgcgacagaagaagcggctcatttctaccagttctttcctataaaaaaacgcagatttgaaaaaagtcaacttttctcttctagatggcgccgagcaaggcaagtgaggcgcatctaatcgtcggttttccagatctctctcgagaaaacgtttgaacagccaacatgaggacgcctcacttatgagtcttccctcacccaagaaaaggatgttttcgtttctcgttgtcctcgaagttccacacccactcccaaagcctgttcgcaccagagtgagggcgcccctccagcggcttatatacggtttttcctccgcttggagtcgtcgcgtttttcagtcctaaaggtgtaaaacatcaacggccgtctgcgttcagacgagagacagcaggaattcacttgcctccgacaaagaggggaacaacgatcgacactcaagagagagcaaagaacaggaaccagaaggagagagagagaacatgaggaagagaggggagagaagagaaaagagagaagagaaaagagagatggcacaggagaaggagaagaaagaaatgtgagaggagagaacagagagaaaagagagtgacaacagacgaggagtgagagaagggtgagaggagagagagagagaaggcgagagaggtaggaaagaaaggcagacgagaaagtagacggaggcgagggaggagcgtttctgtgctgcatgcgcgaaaaacctaaaacgaaaagttttcatcaccgcagaaagtcaagaagtcgagagaagaatcaacgattgatcggggcaccgctgaaagacgaaactgcagcggcaaacgcaagcaaatacgtcgacagaaaatacgcagagccagaggtcaggactcgcctgagttttcttgttttttgtgagagcaagaattctctcgcgagtgccagagaggcgatgcatgcaccggtttctccatcgagcagtcgagagcgatttacgcgagacagagaaaaccgctgaagccagtttttttcgctttttttattcgccgttgattctccatctctccttccgtctcgctggttcacctttgcggggaggacgatccttcgcgtcaaatctgcaagccacgagggagacttctctgttccgcgggtgtcagcttgtgtatgtacagctgaactcagttctggaggttgtcgcttgcccccggtcgttgctttcttctctgtcctcaacttgttttctttcgcgctagacttcgccttctccgctttgcctctcgtcctcgatctcttcacttcttctgttttcaaga

SEQ ID NO: 815 - DNA, 1459 bp, Toxoplasma gondii
  source 1..1459: mol_type = genomic DNA
ttttatgagacttctctctgtgctgccgcctcgatggaggaggacaacactttttttctccggcggaactgcggttcatccacgcagagacaccggctcttgggcggacgttgttttcgccgttttcgctggtttcccattcatttgtcgacaatgtgtttcgaccgcattcaccgataccatttgtgcatggagcaaagcgactaggcgcctccgcgtctccagagaaccttgtgtgtagtgatcgtgaacacagaggttcggtttccagctgtccgacatctgttgggtgactgacttcatgctgtgcaataatgcattcagcgacatagtgttggttcgctggtaacatctaagtccttcattgtggcggaaaatattcatatcgcgtcggcatgacacgtccagaacaaggtgcatacatgcagactgacacagaagaattttgcagatcgattccttgtcgacacacggcaggcactgcatacctcgagacgatggcactgagaagcgcctcttgggatcacggaaaagtcctagtggagatagaccgtctgcagactgtggtgttcccttcatgctacgcagacctgcgtcacaacgcttcaggaatactgttggcctgagtcgaagaccgtcactgtactggatatagagaggctgagcaaattatttgcgtgcataacagcctgacgatggtttattgcagtatatctgcggtcgctggtcagcccgacatttgtataggaaagtcctttatcaggctggaacgcttttcctgttttcgtcatccgtgaccggaccgggcagctgaacagggagtgaaagaattttatggcagattatccttcagatctacctaccttgtccacactgtcatgaaagccgacgtcgtcagcattttactagttcatatccgatcgcttggtagctgagggtttgaaatgtgtgcatttagactatacaacacagtttgccgtgttcgtccactctcaatactggaaacggatagtggtcggatttcatgtgtcattcgtacttgtaacacatcggaataaaatttagtcgattcatgctccaggacattatcggagctcttcaaaggggctggcccacacgctgcctcagccccacatgtggaagacgttcatttttcgagtatttcgttgaggcggaaagcgagtcccgcccacaccgcttgtcgaaaagaggcctgccggagttgtcatcgctatcgaggaactccgatatcgttgttatccgcccttattctcttcaccccactcaacacagctggagaggaggcaaaaatggaccttgcatcgaaagaaaaagcccttgaaaagcaaacgacacggcacgacgccattcgcgtagagaacattagaaaggagagacactatgcaaaggagtggctcaaacggtggggtttcctgactcaaggagagcagcgagagga

SEQ ID NO: 816 - DNA, 4235 bp, Toxoplasma gondii
  source 1..4235: mol_type = genomic DNA
agaagaaactgcctgtgctgcctctatagatacacgcgtagaagctcaagtgcgcaatgctgcgactctgcgtggaatttgctcagtcctgttcactcatgacatcatgtacgacatcggcgttctgttccatgaaaaacttcgtcgacacggtgtcaggactggcatttacattgcccctggtgagtttcgcagacccacagtgtccacgacttgaatcccatagacagagatttccaagagcaaaaccgtttgtcgaacttgtagtttctactgcccagcagaaaaagccaagcaaacatgagttcaggtaagatgttggagcccaacacattcaccccgtgatttgtggacaggcgcatgcaccatgcgcgttttcttcctctcgtttggactttggtgagcgtaaacgacagaagattgggtgcgggtcttctctcacggttcatgcgcgcgatatacagtaagccatacaaaatacgcgcagaacacaagggatgtagagaaatctttatggcgtagggtactgaagtcctccatgccaaaaacacaatcctaggtgcagccttttacgcagaattactgaccaagcggtcgataggccaccccattcgactgcttaagactagcttggcaggcctcccgtaagtgaaaattcacagatgtacattcccagctgtgccagttacactacagtcaagtcgagtatcgacccaacacaccgagtgtagagagcacaactgaccacgagtatttccagactatcaaacctaatactcattcaccgaattaaataaaataaacttgtattgttggttcgcttcagcgcccaagactgagagcactgcagtggaattgcttgtgtggccaagtcagtgttgactctcgggtatacatgcatcggaacagcagtcgcgtattgtgcggtgacattctcagtcaatgcaccgcacctagacacagtgaaactcaccctttcctcaacccaaaagtggttctttggcctgcattcacaagtccgatgctcgaaactgcaatgttgacacacagtcgtcctacttaagtggagacaagcaaaaactatctctcgaagtagtcgcactaacagcctggcaagaccggtgatgtgctcgaaacgatgtctacgtagagttgctgctgtacaagagggaagggcccgcatcgtttgagaaagcacatgagactcgtgtgaccaggatagagcgatgagggcaccgggcgaactttcaagtgctgagttgctgatttgccaggtcttttccgacaagaatttcttgtggagtgcgcctgcgccggtggcgtgcccaccctcgataggaaatcctcacacggaaggcctgcttcggagtattttagctcagaccgcgccagccagtaaacgcctgtagcactcctgcttcattcctttttcctattccgcgtttgatacatacgactctccagagctgttcctgaatgcgctgtctttaacaagcacacacactggctatcgcagacagtcatgcgtaccaccggcaagcattgacggaggagtgacgggtgttggggttcggtgtggaaggccgctacgtcggttgctttcgactgagaggggaccttacttgtgggggagggaattctaacctcttattgggtatttgggcttccgtcacgtcacattcaaatgcacaagtgcaaatagttcgttgttgtgtcgttttaattcaggtttccacggcttcttcggtagcgaccggtggagtcgttttggggtgccgtcggtagagtgggctgccgacaggatcatggacaattggtaaagtcgacggatgtgttctgtcgaaactcagtggcgcagactctacattttggccgatcttttgaaacgactttgaaaaacgttctcaaacgatagcttcagggaattcggtattcgcgcccccgaaacggcgtagcggtgtacttccaatgacttgtgcctttgcagccatcggagactttgagcacccccgcagacaggctttctatacagtgtgcaatcattcgtctgcactcatacatcattcaaggaggaaacctggcagaaagtactctagataagcgctaacagaacggtcttgcgctccggcgtgacgcatgagcctggcctctatctagtacgaaacacacgagtctgtttgataccagtacaccttggaatactttttatgtgtgaacgtaggaactgtttagcaactttcaacgtgattccacactatgagtcaaatttgaggcgaaatcgggaacgaataggcatcagtcgcactccacgacgggtatattctgattccgtagtgcggttgccaattcgagcgtgtttgtcgcccttgaatcagccggggacgtgctcctttcacggcaggtccctacacctcaatctcttcgaaaagagcctcctacgtacctgatgatggtgtttaaggaacctaagggttgcttgtgatggattgtcgcaccggatgccagctcgctgctcccaagaattccgtaaatcacacaacgatccatattactttctctgggaacgctttggatagctcgcagtgctcgaacagggtgctgtagcatgcaacatcctagctacccatcctgctgctacttctttgacctgatgcgggacgatggcagatgcagaagattcttctgaagcatgtgtaaacgctagagtagctcccgcaatgacttggagcacaaagagaactgcagcttggtgagtggaagcagccctaaagagattttcgtgtgcgtgctgcactgaacttgttcgcatctctgtttgcttccacgatgctcacttgtacgcacaagcagtcgagctttgatggcgaacacccgcgcataagagtgggaattggaactgttgcatctcctcaacaccactatctatctatcggtcgagtaagttaatagtgttttctggcgtgtgatgcacacgtgatcacgttttcgccccgaacaaccgaccaccggagtcggagattatcaccgtcgtcgaacacagcatcagcaaggaaactcgccttctgtgccttgaaaagccatgccctggaggatgtcctgcctctcgacgaaaaaaacgtgacgttgttactggtttttgccaaaccaatggaaggaaagaatttctgtggcatgtttgcgggtcgcctgcgcgtgcccgtcgattcgatcagggttgagccgtagtcgtgtgcaagctcgtgtcaacttttttgtgtgtcccggagcgaatgagtttccagcgcttgcttctcccgctactcgttctgcaaacgaactgggtgaatcatattgacaaggaggtttgtgtttcgaggggattccgcacccagtttagaaaaatgaaccgttttctggggagagtccggaacgggaggacccaggcaccgccccggccggtggtggattgtgcacgagagtcggtcactggtgtgtggctgcttcggaacggtcgtaaaggtccttcgacggcactcgacgggacggctctttctcccgaggtggagttcgagacgacgcaaaaaccgcccttccatgcacacaagagaagattctgtccactgtgtttccagcaacccgtgttaaggggcagcagtggagtctccagttcggtcgtgcccggactagctagttggccttcaagggacttcttcttgtcagcggacggccgcaaaagttaccctgttcttcaaatccttttcgagagagggttttgaggggcttagaatggagtgtgtggccgctcttcgggaagggaatcgacctcggtgaaaaggaggcggaggaaatagtgactcctcgttctttttccctggctcgcggcctctgactttttgcgtgcacgccaactggttttcaccttttcctcccgttcctctccacgttgagtctgcatcaccgggaaactgtctgtgtgccttcaagcgcgcatgcccgcgtccaaatgagaggcaactgcctggtttctttcgactacccgtgtgtttcttcgtgccacgcctctcagttgctgacccaccacaccctagcgagtccgttgttctgaatcacctcgtttctccctgccgccgcattgcccagatacaaagcggagaaccacacttctcgtttctttcagggagaagatctgaagggatctgacgctcaagtgactcaaacctgcgtttcccgcaaccctctttcggccgtgacaacca

SEQ ID NO: 817 - DNA, 2138 bp, Toxoplasma gondii
  source 1..2138: mol_type = genomic DNA
cacaagatatttcggaagtccataaactcgcacaaaactgtgtaggcccttggatagcagaaactcgacggccttgctttgccactgcatgcctagagaggctgaaatccgaaagatgtctgtcattctcgtggtgcggaggctgcttcgtggtggtgggttggctttgcgtctgtcttctttcgcgccctgccgaggttttttgaaagagggagttttgcggccaaattttcaacctagctagtgtttatctccagtcagatgttctttgtagttatcctgctggctgactgctctctggttcgatacttgtcacgttccgcagcctaatgtggcgaaagtgcatccatttgattattcatgcacagagggcaggacggcctcaaagaggtgtcccgtttccgcagtttgtctcgatgtttatgtgttgagggcgtcatttcctgattcactctctgtttacagcagtgttaggaagaccgaacgttcgatagaagacccgcagttggctctttcgctaggctatgggcgttttttgtcacacgcaacgtgaattcttatcgtggaaaccagcgtatttgaggattctgtgtaacatccgtcaggtatcgcactgctctcagagtgttgttgtccaatgaagcaaacgtttctcctgccaacatgagaaatctggttactcttgacactcttcggagcgcctggttttttcctacacaagacagtctgtcactgctgcgtcttacagtctctccggcttcatctcttgatgtggactctcccgtctgggccaaacaaagcatctcggaagaaaagcactgtctgactgctgcctgaagcagacttcgagtgtagttctaaccaacagcaacatgcaccatgaatgtcatagcagcaaaccggtgaggagggctgccaccggaactgctcatcatcccttgagctcccgagtgggataaaccgtggaaattcgcaagaccaccctataggcaacatctagaggaaaacctgacaacacgaactctgaggaggtacttttgtggagtgaaccctgcgtccgtcgaaaagccagcatgtcagctgcttccaagaccgttccagagttcccaacgggacactattcatggccaagttggtctcccgtcggcttccggaaacggggagaggcagatgcatttaaaagaccaaccacgagtttcagcggggcctcgaaagctaaattttaggcgtttgcacttggtggactgtaggcgagaagcaaaagggaaagagaaagaacgagagacccgcactcttgacggattaagattctggtattcgaagctcgagtctcagatagtaatcctagatcaattaggggtgacatgtgggcactcacctagtaattgagagacactcacagacccaaagctgtaacatggtgatctcaagcgtctggcatctcgcagcaagaggtaccgccgacagcagcggcgggctggcgtgtgacatgacggctgcattgttttttccttgggaattctttgcttccgccatcaaagcggtaaaagcgcttcgttgtaaatcactaccattcctcgtgacatcgtttctttccagcatttcagcttgctcgtgcgccacactttgcgctgactttccctcgtctcccatgtgtccacggcgttcgctggcgcaccgaacccccctgtgccgcctcgcggaatttcgtttcctttctcgtttggctctgctttctttttaccgtcttttttgaagtctcgattcaccttgtgttccggataggaagtgcgttggcaagaagttcggtttctcctgcttgtgcgacggagactccaggggtgccgcttttcgcctcctttctgtgtctcgcggggggcggcgccgcttcaatcgaaatttcgttttctgagaattctttcgcggccgcaaaccggcacgcgttttctgagagctggtggttcttggtgtctctgtctcgggactttctgtctttttctcgtctcctctgctcacggcgaggccctcggcatgtacatggcgccaccgcgagccccggggaaagtccacgcatctccagttggagagggagatttctgttcagttcgcgtttacacagtcctgcagaggaaccagga

SEQ ID NO: 818 - DNA, 2465 bp, Toxoplasma gondii
  source 1..2465: mol_type = genomic DNA
acattcatgcatctcttcaacacacacagttccacatacacatctgcgtacacatgtttcatgtatatatatatatatatatgtatatttatatatatatctatatgaatagaatagaggaaatacgtacatacatatttatacacgtacacgcatacgcatacagagagggaactctgtgtctatgttaagacgaggaacactccccccccctctggagataggttacgaaagaggcctcagtcgaaattcgtgtagatctggaagatgatattccacaagtttttccccgttctctctgtctcgtccgcttctgtctctccatgtcccgttcgtcttctctcctccacacccagacgcgttctttctcttctgctgtccctcctccgctgtctgtgtggtgcggtgtacatacacattccggcacatcaatgcacggggcgagtccggttcccttcgtttcgcgttttccagagagaggcgaagttcctgactgtttggaggagacggtggagtgccctttctgcctgagagaagcgttggcagctgtcgatgcactcgaaggcttcttcgcgcatgcagacgcagagcccgcgacagaccgcgccgcggcagacgccggaaaggtctcgttttgcggtcgacaagaggcgccgtccacagaggcctgagaggcggcgggaactccagaagaaggcgtcattttggaatcgacgacgaaaaaaggaggggggtatggggagaggacagggaagaggatggagcagaggacagggaagagagaaaatccttcagaggcgtgagggcagatctgacgtcgaatctttgttggggcacccccagcgaattcaggagagattcaagcgacggaagagacgagagcggggtgtacagacgcaggagacacaagggcgacggacaaaaggaaacaggaaggggtgttgcgctcttgagagagaagatgcagaggaaaggagacaagacaagcagaaaataaaggacgaaggaagcgcgaaagggaagaagagaagagaaaaggaaaacaacgaagaaagaagagagaacaccgcgctgacaaaggagggggagaagagaagagcttcgtcgccttctcccccccagagagaagagacgttcaggcggatgtctactcaggaggccgttttacggtacgaaattccttccgttcacaaccaagaaagtgacgagtcttgatcttcacacttttgaccgcaaggcagaagacgacggagcctaacgtcgtgttttcctccggagtcgactccgagaaactccgcattctggagacgccgcgcccgcctcaaagaaaaaacaaacgaaagagatcgtttcgtgaaactgtatgaaagttgctgatgtcttcctctctgcttctctctcccttctctcgcgtctgcccttgcatgcgttcacagccgttcgggagattgtgcctcctggacatctcggcgacagctttgagagacaaggtcggagaatgttctttgttgaaacgagttctttcggttgacgcgttttcttctcagagagagcaacgaaactgcggcgaaggaagatcttttttctgagtctcgccgcttggcctcgccttgtcgcttgcgccgtctcaaaagaacagcttcttagtctctgccggaagggccggtcgacacaccagtggggtgtccccgttctcctttcgggcgtgttgggctccaaaagggctcagcaagaagtcagagaaaaaggcttggtttccttacgaaaaccgtcctctccgacttctttttcctcgacttccggcaccagttcgtctccgctccgctgcgcgcagcgcccggcggcggtcgacccaggaaattgttccagatccctttctctcagccaacgctgaagcactcagtcctctccgctcttcactccacgcgctcgcatatatatatatatatccctatatctatatatttatgcatatatatatatacatatatacgtatgtatatttaattttatgcatcctgcgtctacgccgttacgtccccaagtattctgcgtgctggattttacgtccaacacgatctacacttacgcatatacacgtatgcatacttgcagagacgtgtatgtatacacagggtttgtatgtgaatctgcatcttcaatgatattgagaggcatgcagttgcttcagtgtgtctgtgtgtgtgtctcgcaagcgacttgcctgcgttgtctccctgtcaatttttgcgaagagctggacgaaaacgcgttctctgaagcattctcttgactcctatcctgatttttcggaggaaccttggacccccactctctttttttcaaggtcgctgggtccccaaattctctctccgtcttcaacagagtcgccgccttccacttgctgcacagacagctcgtttcaacgtttcctgcagccgtctccctctccttcactgagagaa

SEQ ID NO: 819 - DNA, 2810 bp, Toxoplasma gondii
  source 1..2810: mol_type = genomic DNA
tctcttggtctagccttccacctattacaaacatctcaagtatccgcagttcatttggacagcaggagctactgcagcttccccagtcccgcacagtattcagaacttttcaaatacgccgggacgagtagctgggcagtaggataagccaaccagcaaagaggaagctttcgattcaggcaccgcacgcaaaaaagacagactgactctacacggttttctctgtcttttgtcatcaggctgttcagcgtccacaggatatatgcataaagcattctgtccctgaagcatcccagcccagctatagaacaccgcggtggtcagttttctctgcgggtctagatacacgctgcaaacaaagaatgttcaaggagaagcaagtatcgctgcttttctgcgaaatataggagctaacagacgtatccgtattccgtgtatcacatccattagacacgacgtttccaaaatatagatgttgcttggccgccagaaaacatcttgcaaaagagaaaagacactacttttcagtcaaaaaacttcagaacggaaagggcgcagcgtttacaaatagcgtcattcaggatcgtatacaaaatgttggtggagaggccagtctgcatatccggtgaatctggtggacgcggccccgcgtttgctcgtggtgacaaccaggtaaacgattcacgatgtactggctggcatgattcgaccgcccaacagtggagtttgaagacgtgtcgaacaccttgtttgagaaaaaaggaagtaaaagatatcctacctccgcaatgcaagcacaaggtttccaaagttaacttgaaatcttcagccagagacaccgtagcctacctcgattgcggcgaaacgacacagtgtttaccagtggtcggcggcatcgctcgcctgccttcccccgcgtttctggaatccctgtactctgggtgaaaactagcgttcttctctacgagctactgccatcttcacatattcgtcccgcagaagaacgagcaagaacttggttcttctttccccgccatacccctccatcaccgtgtagcacatgggaggcccatgtactttttcccttctgccctcgacgaccacatgaactatttgagggtatctgcgtcttttaagacagctctctatgtagcataaatccttgctctttctcatttcacacttgagagagggatgtgtaaccgtttccgtatctggtgaattcgtgctgctcacgtgtgcctcgagtgtgccacgcgatctagttcgtagtgcctacggccaggttgatcgacgaataaaatatacccctgccttgctgccacctccctgcttatgaagataatgcaattttcagctaatgtctagtgattaatggccatttccttcttgctggagggatgagaagacacgctgacgactcaaaacgaggttctacatgctcttacatgctcatccagctcctcgtctacatgcaaattcttcttaccatgagatacagaggcttcaggaacgctgcatatgcacctgagctgagcgttagggttcaactgaagagcactcccgacagcccaaaccactggagattcctcttgcatttccgtgtgctgtcctctcaacctctgctgtttcacgatggcactcccgttttcacggatcggggctcgtgcccggtcccgcgtttgtctgtttataaccagccagcaagtgttaccgcgcccgctctggagtcagcccgttcccacgttccatccagctctttcacggctgtctgcttcctcagggtttggactttcctttcgcagcgacagctgctttcctgccgcccaatgtttccgcgacaatccgctcgtttcccggcgacgggcaacagcagtggcatgggaaaagatggccaaacccattcgagagccacctcttgtacgcggttgagtcctttttaccgcgaatggttgagtccctttgcccccttcccctttattctctacagcgcgaaacccctgctgttgtccgcaaagatatctaccgaattaatagtgcctcttgttcaccagagatgtccggccacacccacctgcttcgcaggtgtcttcttgagcgcgggaacagcttccctccacattgcatgcgatgggttgagttgtggcgtaggtctgcatctaggaatcgccgcgtcttctgcctttccagcgacttccaagtctgctgaacgtctctctttggtctccaggtttgtgtctgtgcatattttggtctgtttctgtcaacggacttgcgtctccgactgcgcagcaacggggtcggcgaaccttctgtaacgcgaagcacatctcgcggtggactttgtcgcttgaatccggtaagaaccccccagatttgaccatcgttcagtcgctcgtttcgttttcgtctctttattcgtttccgaagcgtatcatctcaattctccacataaggccttttcatttcgctagagcctagtcgacccagcagccgagttccgggacttccgccggcggcggggtcctttcctccccgcgatgggtttctgagtccaggcagttcccactaccgcgtcgcgccttttgtttgtgtcggcctgagtgccacgaatctcgcctgtgtctcgcgtcccgcgggagtcaagctctcccctgccaattcaccaagcgtcctctctgctctccgacgacgctccccgcaccaactcgccggcctcccgagacgcgaggcgccgcttcgaggctcatgccgcacagcgccatgtccctcttcttccttcccttctgttggactcaacagctgcacga

SEQ ID NO: 820 - DNA, 3102 bp, Toxoplasma gondii
  source 1..3102: mol_type = genomic DNA
ctctgcgagagggtcgaagttcagtctctcttctggaagagagaacgcgcgaagaagcgacggaagctcaccaacgctgaggcttgcagacgagagagtggagagtctctccggcacgcaggctgaggctttgcgggagacactcgcagccttcgtctgatcgggtgtgaaggcaaaagaggaggagactggacttcctgttgcaccttcttgcttctgttcccttcgcgcggatccaggagatccaagagaaaacgcggaaagagctcgcgcaacaaacgacgaggcgcgcgagggtgcaggagcagaggtgactctcctcattctgtcaacgaaggaagagcgagagagggcgccgaggccttcttccccgggcatcggagctcccgcagcgctgtcgtccatcttgagaaggtgagaaaaccttcagaacgtcgggtggtacttggatccggaaacgtgtctgtggagtgtcagaagatttttgaggggaccttcttggaggcttgcccgttctgtgactcgggagtctttcgtcgccttccgctttcgacggcaagcagcttttcggcgtctagacagcaaaaggtggacacaaacggagagtactgaagcgtggaaagaaagagttccctggagagcaggtcggaaacgaacacagtcacggcaaaaaacgggaggaagggggacgagcacacgtggaggaggcagacagacgaccagcgacaggggcgctgagagcctccgagggaaactgcgtggcaaactgcagaaaaatgctgatcttgtgtttccttgcttctctcctttctttctgccgggcaggagcaaggaaagaggaaactctgccttttgaaaaaacgacgctcttctctcgagtatactctctatcccttttcccggagggaacgaggttttcgctagcttctgcacgagttctcagaattcaagcgtttcatgcaggcaaagacgctgcactttttctttgtgagaaatatgctgaagtgatttttgaaaatccaagcactcgccagaaacttttgctttcagatccaccacgcgacgacttagcgctcgcgggacggcttgggctctcgttcgatcacagccacttctttgctcaaaagaaggagcgaaaacgctgtggttaaatatcaacaaggattgacagaacgcctgccattacagcgtcttctacctgcaactatcaatatgtaaatgtacgtatggccagacacatctccgttgagatgcaaaattcagaacggctgagcgtcgaaggcgtcaagcgcgacacgaaatctgacatttgtcttcttcaccagttgaattttaaactctcagtcgcgttgaaatcgttcgccgagtcgcttttcgtggttctcctcagtgcaaaagggagcatggacctccaggaagttatcgctcgacttggctgtcgccgctgtgccgccggcagaagacatactttacacgacgctggacatcaaagctcacgggtactgacacagcagctcgcaaatgcatctttgactgaatcgacgcaaagtcatataggcagcctgcaacaatcaaatagacatttcttcggccgcgactcgccacttgggaggaaacgacgaacgtgtcaaatgaggcaagccccaggagcaaagattgggcctttatgaaaagccacttcctcctcggatgtggacgtctctgcagaccatgaagaaacttagtgcagagactggatattcggtgagttgttgggtcggggcgctttctttggagaatctgtcgttttctgcgaagatcgaccgcaaacgctggcaaacgcgcgagcaccgtcacttccccgctctcgctgcccagcgctgtctcgaaactccttcgatcttcgctcttgatgagctgagcgtcgcagaccgtgacgtaccctgcaagacggaggccctgctttccgggtgctgttcttttgacggcttctgccttctcctgacagtactggaacggacatcctctaaggaatctgtttcggagaaaatgttaatcgcaagactcgctgcgccacggccgcaaattgccgtgtcgaaacccacgtgtcttgcagctatgccaattcgtgccacccggtggaccacatgcagctgaatccggaggcacagaaaactcgtttttcaaggcgagattccctcaattcacaattcgttgggttttatgtgctggtccgcgcgcttcactcgcgaaaaaccgcacgaacccgtcaaattgtcgactccacagtctacgatctagagatgcgcgtgcgtcaatcgcaagcaacaggtgagtgagctcgagagcgcagaggcaagttcgccgaaggaaaaaaagtcaggcatgttggagaagaaaagatctgagttttcccaggctttctggtccttccatgtcaaacccggcggccaccttcacgcagaacactacaacgcgttccgtgtcagtcgtgggggagcccgcttttgcctagagtgaggattctccgatatttgaccggagaagtcatcaagacacggacgaaaaggtccgacagcactcgttcatgtcgagagcgcctattcgaaaagtgtcacttcgttctgaacggcaataggacctcccactggttcgtcgctccaggtctttctgcctcgacttcgcgtctcgagcctggttcggttgtcttcccctctcgcttttccggtgcgcatatctctcgaatctgccgttcgctcgctcttacgttcggttcgtgatgaacctacctctctctcctcgtcagacaccactcgtggaggctgcttgtgcctcgtacctgtggtggccgttttcggccccgttgccgcggttagctacaattgatccgtgtctcagttcgttcccttcgctgttccgtgcatttcttcctctcttcgcatcttccttattcgaactcgcctccgattcgcctcgtggtggtgtggcttcctctgcatcgcgctttcagcttccctgtgccctcgcagatcgtcttctctgttggccgtcttgttcgatttcaaactatcgctgtggcaaagcaacctcgaactcaagtatccgcagtggtgacctgcaaga

SEQ ID NO: 821 - DNA, 2827 bp, Toxoplasma gondii
  source 1..2827: mol_type = genomic DNA
aaaaagagagctgccggcgttgtacggagagcacgggaacctcgttgcacgaatctatctcgatggttccaaagtcgttttccggggaacgagcgcgacctcccaactccgagtaccgtcatgttctctatcactaactcacagtgtctgtgttccgcaatttcggaagtggccttggtggacggtgtaccctccattcagcactagctcgatggaaagaaagataggccggctggactcgagctgtggaggagcaggcgggggcgagtgcgagaagcgaagaagcaagagttcacagaatcttcctcgttaaaagggagacgagtctctccacgcagttggacagcgagtaggcagagtcagtgctaaaagaagcagcaaggcaacgcgaggggggcatcgggggggaggggggaaagctggatacacattttagagacagaatcccagagagctctccccgctggttcggcaaaacgtcgcaacaagtcggtgtctctccacgttgatgccgtgcttcgttcctgattctttgcccgagaagtttgacttcctcgcgctcgaaaatccccttttcagtcggactcgactctggaactggcaagtttcgaagcagtgtcggaagcaactaaggcagagcactgccccagacagtttgagagtcccgtatttctccttcattcacaaagagagctaattcgacctttacttttcgctgtggcaaatcgagtgtccactcaagaaagaggcgcaggaggagctcctggagcaaggaacaactcagaccctcacgagaggcgtacagacagtcgagagggggggaagaacggatggaaaactggagggatttgaaggcgttcctaggaactcggaacgatggcgaatgtgcgagacagaggttctttgttcttgtctgaaggcgagtgcaaggatccgcggtcttcgggattcgacgcgaaatccagcttggcaacgaaaacaccatcttctacgacgattcgaagcggccagccactcgcactgcagttcttccagtttcagggcgcctcaagcatttcaacctcctgtccgagtaaaaacagcttttctaactatatacatatatatgtatatgcatatcaatccatagacacagatatgaatctatccgtctctcaatctctacacacacacatttatagatatacatatggatatgtagagatagagatatctataggtatagatatactgatcattcaaaaagggtgccacgcgtatagaagagatgtctcttgacgtttctgtcgccttctccaacctctgtttagatatatgcacacgtttacttgtacatctaagagtttgtgtgaggtgcagtgtctttttccattcttgcgtggaggcagcactgctttacgtggtgccggggagattcgtccctcgtttttttcatacagacgtacgcacctgtcggattctgagtcgcttgagatcttcgtcgactttttcctttcaaagtgtatttccagcttcgttccgtagttctactaagttcagttagtcgttttctctctcttgttctccagacaccggtcgacaccttcctgttctgccgtagctccgatattcggttcgcgttttctctgttctacgcatctctctgttctctgacacgcagcttcctcctgcttttccatacttgtctttcttttttttctgcggagaaggcgtcgcttccttcctcacctcttcctcttcaggagcctccgccgtcggtagactttctcttcttcactcctatacacgtcgcacccccgttgaggcggcgaaagtttttctcggagacttagaaacaactaatttccctcgttcgaattgtccgcaaatgcctgaaaaagattttcttcaagtgccttttttccgccgagaactgttctgccatcgacagctgttttccactcaaagcagaaaccgagaaggcagccttgccgggtgtcgctacaacacctgcagcaggctgcttcgcacgaaccgtcttctcggtgtctttgcgtttcttcctcaaaaaagtggatttcctctctcgccgagaagcaggctccgacacccactctccgtcttgggagtgcaactcgcttttcttctgaattcggcgctgcttcgagagttttcggtccaaatctcctttcctctcctcgctctgtcgcacgaaaaggtcgacgcaaggcgagagaaaacgaccagctttgagagaggacaacgtcgcgcagctcccaaagaaaagcgaagagttctcttcttccaggggtctctctaacggcatctttctcgaaaaaagacaaagtccgcgtttctccaggctcaatcgtcatccgcctgtctttctcacgtgtcttctttctcatccggccgttctccgcgtcgtccttttcttctggcttcttcttcaaaactctttttgtctcgacagattcctcttcctcctccctggtcctcctttctcactgccggatctcatcctctctccgtctattctccctcgtcgcccactgtgtgtcttctcttaacctctcagtctcctctcctcttattgtcctcctcttctttctcctattccctccctctcctatttttctcctcctctttttcctctccttctgctcccctttttcttcctctgcttcgtctccttctcttttcttcctcgtttcttccttttcccccctcttttcctctctttctcttctccttcctctcgcttcttcctcatctttctcttctccttcctctcgcttcttcctgatctttcttctccagagaggagtgtcctgagcgcgcggtacga

SEQ ID NO: 822 - DNA, 4190 bp, Toxoplasma gondii
  source 1..4190: mol_type = genomic DNA
tggaaacagcgtttatcttatgggcggcactttttatttaagtgacaccggcgcttacctcctcggcctccgaagctgagcagtatttttcgatcagtttactggttgatgtaaactagaactgtcgtgattggaaatgcttcatcagatgggcgaaacacatcgttccatactgtgttgaattgacgcctaaacgaggatcatgtatgtcatgaacgagtggtcaggggcatgcattctggattatcatcttctagcaaaaaacagcgacgtgacgactttcaacgaactttttttctacaggtgtgttttgcgtccccgatacgtgcgttagttgttccatgcagtacgcagttccatttcttcgcacttgacaaaaggcttcgctccccacgcggttttcacgagttattcaaccacagaaaacattgcatctggagaaggtgcgattgtgaggagtggcgaagtagttggcatctgtcacatcctgcgggattaactcccggcggcaattatatgtgtgttcgaccatttcttagcagtcaagtgtactaacggcagcaaggcttgcgaagcaaagcctgatacctggagagcatctaagggttgcttcccgagtcacgtcatgcagtgatcacttcgtagcggtagtaactttcgaagacgagttgcaatcatgtggagcgccaactcattgataccaatttgttcactgcaccacgtgggatcactacgcgactcacgtacaatgttgcgaacatggtgaagaaagcaccatttctcagtgtttggcccgagcaaatccaatttgcaagttgtctctatcgaaaactgtatagtaacagcggaggaatacctgaagcggagagagagcattcgacagccgtcgaacggtgctggtgaaaggacccaacctgtcctagtgtccagccgtcgagtgcctgtaagagtgattgagtttcacaagtccaggtgctaaatagttgggcgagcttacatcttcttctgcagcgtcatccatagctatgccaagcatacactcgcggcttccatcatcttcaaggaattcaaggacgtagtcgtccgggctcagtcgcacctctactacagaatcacctcctgttccgtttcctgtagatgttgccttctctgagtggcagcagaaacaccttaccatgctgcggattacccaggaactgcagaatctgggaaaagaccgttcagtttgtcattgtaaacaccaacaattctatgcgcggcattaccaaatcaggaagtctctttttgtcgtcgcaggaagaaactgagatgtcactgagctcattctccataacggtctgtatggtggggatttcaagctgaattcgaggatcatgatttggtgtgtgggacctactgcaggcgcgtatatgaggtaggtgccggtgtcaacaatcgactttttcccatctgcaggatcccaccagtgtcacaggtgaaagatgcatggtaacagtggatcaaccgacccgtttgagttactgcggtttgcccgttttctagctgtttcgtcacagtggcaagcgagctggtggatcggggttctttatgaacaccgataactttaactaacagcatcatttcgtgaacgaggggcctatgcatttcccgttaaggtttcgaacctgtccagtaactgtctgaagggtccacaggaatccaactatttgtatcaagacatggtcaaaaatcggtgttgggctgaaggcgctactttacgtgcctgaattcctccgtggggtattctttctttgacaagtcagcgccaccaaaagtcatggaaccgcctggaagaaaccagcgcattatcggttgtgtttacaaggaagttttaaagcacactttaccgtccgcgttgaggtagtaagcaaactggttctaaacaacaggcagaaatagattctgttgctctggtgaaaactggcagctgcgtaccccaagatgtttggattctagggccttcgtttggacgatatggtcaaggctacccaggaactgttaacactctggtcaatcgatttttggggaatcgaacgtacaacggaactactcccctactggagatctcgtggttcttgaatccaagaccaacgatgccatcctataccaagatgataggccagtcagtccggcgaccatgatgagacagtgtccatacccaggcaagatctctcagtagaggaatgtccaccagcgtctgtggcggtgaacggacagtgacgaactgcgcgccaagtttgtgactgatagttccttacgccgaacccaatgttcgtatgcggtacagaaatgccattgccgaggtgcaccgtgtcgtagcctacttatgcaactgaacagacgcggattctaacgacaggcaaattctgcttaccgtcgtagccttggagtgtgccactcaggtacacgacattcatgaggcttggcttgccgttttgattaaacctcggctgaaatgatgcgcttctcctatacttcgtgtgaccaatgcactgcatggacagactgattatgagtagttcaaaagatttatggctgggttacaaagttgcaagtacgctgaccaggtctcatctggcacccagaactcgcacgatccagtgtcgaacagaactttgaatgccctctcaggttcacttcctatacttatttctccatagtaagtggctggaaacgaggatcatctgactgttgtctttgtgtccatgattccgtcacggcgtacctagtttttttgacgcaataacttggtcgtgtaacggaatctccgacaccgacgatagcgggtgctgcctaagttgaaggaactcaggtatcgttttcattcgattagccatctttcgcagctggtgaagctgcttgacatgctctttctcatagatagtgtctattttggacaaaggtatagagacgttgctgtgttggatcttcgccgccgttgagtgcagcgctgtaccccacagcgacgcgagaactgtaagctgccagactttcataatggtagtcactttagcagcgattccacttttatccgggggacaaaaacttgagagcagaccatgctcccagctggccacgttcctccctttgttgctggcgtcattacaccgggggacggttgagttttccttgttggatgagtcaggagatacgggagcgactgacactctcaaaattggtttcgccgcacaagttgttctaaccgatgttgttgcctcctcacactgtgtgagtcacaatggccggccatggattgctcgtaaccgaccccttaacgatgcggtcctcagttgccgagctcgcttcactatttgcagtgctaattgcatgcctcgcatgcgacgatggatttttctcagtggaagaagacattgtctacgtccagcggttgccaacatagtgttctccagcactgcaactctccgacctcctttgtcaacgtcttctgaatttggcggtaatactggaggtgatcagtctgcttggcaagatgggagttgctgccgtgctagggagccgttcctgtttcgccagcttggttcttgtatcttgattcccactcgtagtggcggcagtgaaaaatatgtgttgaaaccagcgatgtagttgtgttgtgactgttgctagaattggttaacgcacacttttcaggttacaagcgtttttggacagcagattttgaccagttcaagactcgactgtgacttgtgttcgcaagacgatgttccccgtcgtccaggtggctttgtgcaccctagatgagcaagatttactgtcgttttgtctttccgctgtgttttatttaccacttcacaatgttttgagcgtgccttccacggagatggttagtttcgccgtttgcggggtgcgggcctggcaaagcgcgtgcagcgtgtatgctgatgaaaaagatttttcccacgttagcaagcgactgccatttttcttcacccattgtcgccagttcagttgaacctattttttcagtttgtgcaataccggtgagccactagcttatgcttgagggagaccgtcaagatttcatctagacaggttcttgcatccactgttgcgcgccgcgacaaggccatgcttcacaggtcgctggcagtgcctacgcattttcctcgtattcaacaaaacgcatacaa

SEQ ID NO: 823 - DNA, 2071 bp, Toxoplasma gondii
  source 1..2071: mol_type = genomic DNA
ggaggaattgtaagcagggttcccggtagacaactctttagtccaagggatatcggtaggaccgcgtgaaccagcaggcacatgcgagcgagctcacggttcaatgtttgccagttgtacgccttcttgtcaatagagtttgccgagctgaacagaaattgaacggtgaccgcccgccttatcgttcctcgaaaagccgttcggcccttctctgagtgttactacgtaccataagtatatcagtgtgcaacagattagattgttacctgtaattgtgcagctcagccattttgggaagacatgaattcaccaactcggccattagaactgcaagagacgcgcacaccgggggcgtcatcatcggcacagtaaaacagcatgcggaactcaatcagtggtagattgcaaactgatcctctttatgagtccaccgccaacgtccgcagtgctcaggaaatgaagcactgccggatagcaagctttgtcttccggtcgaaacctcaccaccatcagaaaagtcgcggctgatatttcgtttcggcctggagagaggaatagtatccacccagtgatacaactcagctaactcttcgtctcccggaagcggcggagccaaagggacgcaacctgacagggaagaaggaaattcgcatgggcaccctagggaaatctagttgtgcgttccggggcaatacaactcatatttcgtaatcgactgatccgtagtctccgtcgcctgttcgtcccacagaaaaccaagggcatgtgaaacctacgtgaaacacagttggtggaagtgttctgacgaagcggcactacggtcgttcagagcaaccggcactacgatatttctgactagctccttctaagaaaggctacctctcagcatacttttagatgctcccttgggaaaagaagcatggagcgaggcagagctcgccatgattggcctgtttgcccgaaaagattctgctgctacgctgaatctagaatgtacggactggcaacaaatgacgcccgacgcactcgtataaaaactgtggcgacgccttatcctccgaggtccgagaaggccgcacacgatcagctatgtatgttgtgtccttcggagtacccgaggataatatgcaaaacagaatgtaaatatttacgatcaagttgggtgggggggagggggggcgggagcgacgcaaaaactgtagttcaccacgagcaccgccgccgccgacccagaccacgtcaatgactacggccacagactcgctacctctgtcaggagaaatggtttcaaaaaaagcttggaagagaaaaccacatttctctgtgacagccttttggttgtgcaaattcagcgaacgatccagcatgcgccattagaacagtcgtgcgagcgctggcgtgctgttgtctcttttctcagatgcagccggttgtaactggcctgttcgggagaatccgagaaagggaccgggcagttacgaataatggggctcccccgtgcagttgctggtacaatgatgcaagcatagttttgaccgacattgactctggagcgtaatatccccatgttcgtgtttttagcggaagcgcagcgacgccgagaaacgtgctttctgttgccagccgcggccccaagctagtctgtcttgtgcatcaagacagcatagggaagagataccagcatggttgggacacgaactccgcagaggacaatgagttaatttcgtgtctgccttgaggtaccgtgtggctccctggaagcctgactcctttccatgtatttctactgcctcttgtggctctgcgtccgggttgcgatgctacgtatctttgttcccctgcagcccaacattcgttggctacactcgctagctggactttgcctctaacggagcattttggccggttcgtaccaactgactttttagtccgcaagcgtccatatcgaaaggaaataccacccgcaggcgtccctatcagcaggaggtcccaaggaaaactctccgcagttcacgctttcaagcacgccaaacctggcagaggtcactcaattcaggttatcgccgggaaa

SEQ ID NO: 824 - DNA, 2983 bp, Toxoplasma gondii
  source 1..2983: mol_type = genomic DNA
tttcttgcgcatcttcttcgtgtcacacactacgtctgtacaggtgcatgccgagtgcatactcatatatatatatatatatatatatatcaatatatatatatatatcattatgctctgtaggttccttgtaactttgctctgtatagacttagaggagatgagcactttttgtacgcagatatgcacttgtgtgtgtatttatgtctggggatctaagcagctgggagacagggagcagttgttggcaaacagtggcattcttctgtattatttctccctttcgtgacgcagctagtgcatgctatgtccagccttgtcacgtcctctcaaaaacgaagagaaagactttttaactccaggaacgtgctgtgctcgggtcgcaaaaagagacgtccttgctgcttgggtctcacattttctgctgttattctgacacgggtttccgtcagcttctctggcagaaaaaggggaagtgaggaagaagcgagatcgggacgtacagcaggaaagcagatgaagttgtcccggacagacctcttttgtctatgctcgatttcaacacccgcaaatccgcagggcggcaagtacgttggcgtggataggcatattgctcagcgtgaacctgggtcctcacgagttccgccacttaaattttcattttcttttcgaattcaggtacaaccagcattagatatacagcgcgacaatctttgtggtggaaaattattgctgttttcgcgttatgttgtgtctttcggggcggcttccttgccttcgccgtgctggtggaaagcctgcctgtcatcgctggcggcagaatcgagggttgtctcatcgccggagattagctgcccgtcccccggatgtcggtgtgtctgctgctgtctctttccaaatcttcgatcacctttccaaagtagatatttgtagcgctctctcttctcaacttcccggtgaacaaagtctgtccttgtgaatagtatgagcaaaaagagtcgagtagagcactgcgaagattttcgaagatgaagcccaacagcaaaaggtcgtgaatgtctatccttcgtgctgctcgtcagtacaggattttttaacggcgtcacagtttatctgggtgaagagtgacggtagaaagcaatgcaccatgtgggaagaggggatctgtcattgtttgcgtcaccgtcttggcttgcaaaaagtgtacgggaatcagaaccatttttcgccctcttgcagaagagaacttcgttggcaactagtgacgaacacaatcttgcacacgaatgccgcggctccaccgaccgctcggcttttttcctgccctcgttacaggcagcctgttgaatggaaataaactgctctcgtgaacaagaaatcgaaggccaacttcgacacaggaaggggtcagccaccatatacaacgtgttgtgttaaaatgttgagtatagaaaactagaggaggtgtgtgtctggtacatcagttcaggattgccttccaaaagggggagggggcaaaataaaagacagagaatcgctgtctaaaaatacgcagcagtaaccgtagctatggataaatgcttattctcgactttgtttcctacgacactacctaacatgtaaactctgcttccgtcaatgactgactgggttgacgacggggacttgaactgaatatcaatttcttagcctggaggttataagcagggaactagagagccagctgcagcgttctgaaatgtctgcttatttttagactgtcgttttaggcagaaaaaagataaggggagatttacttgaaaccagccgagggtgtacctttgagaaaaactgtaacgctgtcacaccgcgcccccaacgccgcttatgaccggagaactcttctcacgggggttcctcagttctttgggattatcgcttaactctgtggtcttgctgatacatgacgcgcgatttctgtgtgacagtaacccttgaagaaactcgtcaggtctactccagtagtcttttctcaaagacattttgttcactgcggcagcatttcacaccatccagagggcacccaatcaccgggtaggaaaaaagatcggtgaagggggacgagaaattatgttatttgcacgggtggagggcttcgtaaatgtgtgctttatcttcgtcctgaacactggacgccatcggtgggatgcttccttctgttaaacattcacgcgcttcgtccccaattagccgcagttattaggttctcgtgcaggaggtactcaaaccagagagtgaagacatcgctcaagagctgggaaactggttgcagcgtttcgacacgtcacaattcgagtaaggatcttggcataatttcgggcacaacgagagcagagggatatcatcggggacttcccgcttccagcgttctggggtgccagctgtcttgcctgataagaagcacctttgctgtgtagagactgtcgcagcaaactcgaggcagaacagtcgatgttttcagagattccgaacgcgatttctgtcttgggattaagcggcgtcaagtcgcaagcaggaattgaccgctagccgtttgcgggattggaagttgagcaggccttcgtggctgttgccgcacgcgctctgcgcgtgggtctcgccaacacttggcaagacattgcgacctgtcgggaaagtgtggacgtttggtttcgattcactgtcgacagaaaatcgctgctcttctgtttccggactcgagaaagtgtcttgctcgtttctgcctttgtcgcgcgatttctccgtccttttacggcaaacctaagcacgttcatgcaggccaggaagctctgcccctggcgtcctgagaactggcggctgtttctgtacggacttttcgtcgaactttctccttcgtcctgcgcgccttgccgcaaatcttttcggtaacgaggtttctccgcgtcttccaccctcggtccagaaaatccctttttccgcaaaa

SEQ ID NO: 825 - DNA, 2409 bp, Toxoplasma gondii
  source 1..2409: mol_type = genomic DNA
acggaaaatttcaaggacccactggtgttgttctgttcgtggactgtcttccggttggcgacggcaccaccgttgttgtttgtgtctaaagcacctggcgcacaacaccctttttgcgcatccttttccgggtgctgccaatctcgttgtcacagatgtcaaagcaaaagtatttggctcccgtgtgtttgtacacctagatttcgtccctcgggggtgggcagggaccctctggtggcgactgtgcttccagggtgtaggactcgaagtacgctctggtagcttccctgtttctgcaacggctttagtggtaacggtccttcagtttcccttagaagcttgctggaccacgcatgtgggcacaccacttctgtctgcatctgtacgagtggagaacccaatagcaccacgaggcagccacggtatcagacgtgcatagagtcctcacgatatacgcacgcgatcgtgtcgctaccatgctgacagtgccctggcagatgtgcaggaccatcttacacactgctcagtggggaaagagtgtagaggcgacaggcaaccgcaggtttccgttagaattgaatatcgtaaattgttgctggaagacaattcagctaaggtggagctagaattggctgtggtacgcagcaactagtgcgtcaagtagacgacggatgtccagacttggtagaacagcgagctttcccttcgtcacgacttaacggaatgggtcgactttggattggaggctctagcaatacatggaatccacaccagcacattgccggtggctctgaaagctacgagatgtaacggaacgttcttttaagggtctggacatggcatgccgcccacttgtccgcatcgggtcgtcgtcgctgagagctagccaccgttgcacttgtaccagaaagatgtaatcttctagtgactccccagtttagtaactgaacagcttcctttgtaacagcgtgactctactgtgtcaccgagtaacactggttcgcacggaaccgccacaactgaattcttcgactgtcacggtctcgcggtagcggacaggaacggaacgccaggcgaggcaagtctgtgctcattcccgactctgcttgtcttgaagacagccgcatagagagacaacacaactcagaacacacagctaactttaaagaaaatgtgaagccacctccaggagctgcgcccttcgcatccgggcgctagaggcggcttgcatgcatctaagcacggaagcccggtgcagcaacgaagtggacgacaacagggtagcttccttttggactatacaagtccatgggtacagacgcagatcagaagaaaccggtgttggcatttgccgtatcgtagcactggcacaagaaagacattcttttcctgcggagcttcctcaaggactcgatgtcacttgcatcgtgtaacgcgcagtgactagcagactcgttccacgccaactgcctctcaagacacattaccgtgtccacacgaagaccaattgatctagaatgctcgtcagtgctctacatttaagcatatgtctccgtccgacgaaattggaacagagtttcaaggcaagcgtccgtgtctcctctcggcgcggtcttctgttctgccctgcgacactttcatcgagttccgcgcaaactgtcggtcgcatgcactgcccgcttttggagacacgcctgctcgcgctcgcacgagaacggagaggttgtaggtctttttgggcgggatcgatgttcctcattttattttctcgagagcttgatactgagcactttacagaacgaacatggaggggacttgacagctctcacactgggcttcttcgtcgtagacccgcccagttccgggtgagtttgcactctcgtgtgtgcgtagcctggactccgaggctcgtgtttagcgaacgcagtgagtagaacgcgtgcttggggcggatttccgtgtagtatcgggctcttcgcctactcaagagcacgcttagatccgtctctgggtactatgtggaattgaggctgtccaacagctgcatgggacggggatcgcgggttccgccgttgcatgtcttttgatctgtatacgggcgcccgctctaatagggccccatgactctggcgcacttcgcctcgatcttgacagtgcgactccacgccagaatttctgtctcttcagcgtcactctgcaacgtatcgcaactccgactgagagtgtatgggtgcgtgcgaacgtgtgaccgcggcaaatcccctcccggtcgctgccgactttaacggcctactcgagcaccggattctctctggtttccagcgtgactgaatgtgtccatctgaaggttggaagactctgttcacgcgtcctccgcggaaaaaccctctcgtctaacctgaagtcgca

SEQ ID NO: 826 - DNA, 3588 bp, Toxoplasma gondii
  source 1..3588: mol_type = genomic DNA
aagagtcgcggcggacagaaaaatacacgagagcgtcttggacaaaccgctggcctgctgctcccataccggtgccatgtcgttcacggatatagcctgtcaactcgtgaatgtggggagctgcctcatgagaacgcggtatcacaaacgaagatccgggctccgcacgaaaaaaagccacctttcaagtctcaaggccgcacaagaagcgcttcctttttccttggagtttcctgaaactgagacgtaccgccgcgaaaacgaagacctcgttggaagccccgaaaagaaacaccgtttgatcttcgatgttggccgcaagaatctgttccagttgtttcttggcgagcttgcggaaggcccgcgcggcttgcttgtcactttccagcgccttttcaggagcagcctcgagggcggccacgcgctcatccgatcgctcgcgtgtgtgctcggctcctgcgaagaaacgcgcgcgaacgatcaaggcgcaaagctgcaaaggctcagtgacggggaaaagacgcgagaaacgcccacctcgaagaagaaccagtgtcatgaaggacgcagtgtcacagcacctgaagcacactcaggtttcaaagcctcgaagcctctgcgggctgtctggcccacgacagaaagcgaatgtttctgtcttccagagagtgcctacagtcgtccatacttctgaaacgcactttgtcctactttgcctccttcctcgctctctccagaagcagcctactgatttgcctactgacctaatgacttactttgttcggtgtcgtctttaaccgcagacatgaccttgagaacgtcatttccgaccaactccgggtgcacacagacctcgcttagctcggcagcagcggaccggacactggagtcggactcttccgcgctgccagtgccggcggcctcggcccggatggctcggattcgctccaaaatggcttcgcgactcttcaagtgcgctgcagaacatcaaaccgagaccgcgaagcccacagagcaagtgctagctgtgaggaagtgttgtgcaaacatcgaaaaatagacttgcccacggtaaataaaaaccatctagatctaaatacctccaggcaaagcatttgctcttgtgttctgcttccctcagtacacacagtcaacgagtggtggaaggaggtgtcggatggacgtcgtttcaacaccgcaaaacaagctggaaaaagccattcaggtacgacaaagagggacagctgtgatggtgaggagctgagagcgggcagtaagccgtacacgagcgagaggtataccagaaagcagaactcaacggaagggctgcgagggtgcgctttaagctgtcgatccggggcaaaatccctcctcatcacgaaagtgacattttgcggagacaggagagaaagtgagcaagctcaacatagtcctccttgaaagtgtcgggcgagtcagaaagaacagaaacatcaaaatggtggcaagaggtgtcattccgatttccaggtatgggatacaaacaaaggagtttgcgacgactgacgtactccaccaccccactggactgcttaagacaggtaagtagttcgatgtcaccctgtcagttgaagtgccctgcttactgaagaggatgttcatcttctgaatcgcagtagtcgccgcgacgagaaatgtgaaatcactcgacgaaagaatcagcgcgccgagggcgcacaccgaggcgcagaaccaaaggattgtgaagtccgccatactgtccagacgctttaactgatatgtccctgccgcagcctttgacagataggaaagtgactggagaagtcaagattatcatcgtcggtcaacacaaaatctgcgagtcttgcaagccaaccgagaagcgaatgaggcattgtttgccgcctgaaacgccggtagccgtcggttgcacgtaagtgtctgagagaaagcacgggcgagaaacgtagacttcagtcatccaggaaaggggaaggacgtggggaagaattccgcgtccgaaggtatcaacgcagtgaagctacacaaaccctgtgaaaaccgaagaaggatccgtgccatacctggcgggatgtagataggcgatgttcgctcctcgagttgcaaaaggaaaggaatgcgtgaaaggcagcccatccgcaactttactaaaagcgctggatcccagtgaacagcctggatgcgtagcaagaaaaagaagacccttccttctgactgaggacaagcagtcggcaagacacggtgtctgccgttcggtgggcgggaacctctctgctgtgcctagtgccgctttcccttacagctgctgctgtcttcgtcggaaagatgttttcctccgggagagcttcagatgtcgacggaagcttgcacagcttctgctgaggtaccccgcggtggcttcgacggctgttgagaggttttgtacgcgtgattaagaactggggtcaaacaagcaggccgacaaatcgaggaagcagcaacagagaaccgcggctgagacaccggctaaaccgacacacaaaaaattggctgccttcacaagttgagagatgaatccgacagccaaagtcgactagcggaaggccgcctcgccttcggtacaggcagagaacgaaacagaaagaatggggaattttaccccattacgaagggccactgagacaaacctccagtaagtttgcaagcaacagaacatccaataagttagagtccaacatcatagtggaaaacgaggtttagagggcttgacgcaccttgtgtgaccctggcgctcggaagaagctgccgcgagcatgcgtctctctcaggcctacaatcgaagtggagagaggccggcgcacaccgcatgagttcggaaaacgtctgtttctttagcttccgcgccacactggcaggaggctcgtctcaaaccccatcaaaaacgctgtggagtcagaactcgcgacttaggaggttttaaaacgcattcttccgcctttcctccaaaaaccgtctgcgcatgttccctaacaaacctgcagaggcctcttgtctgtttttattgccggagttgccgtgtctggggacttgtagccaacacatttttatttgcggtggacgcattgcgtcttacccgcggtcatatgtgagttattcagctgcagaacttcacgtactttggaaattccgagctctgtcgcccctgtgcgtactcagccgcagtcaagggtggcccgttgacttcgcttgcagtggcgccagtgaccgaaaatagttgagaatgctgcggtgatttccttcatgtttttcccacttcgtttcaaatcttttccctcgatacccatcctgctgaccggggctgaccgcgctgcagcgctggcgcatttcggccgtcgcgcctctccggcggacctttttctgcggcacaatgtgcttcttgagttttcaatattttcggtgtcagaggagttcgagcgaggctgtggaacagcactttgccttagatcgcagactcttttctcaggtagacggaaggggtccaagaagatcctaaacgggagcgaaaaagtcgctgcaaccacgtcagaa

SEQ ID NO: 827 - DNA, 2939 bp, Toxoplasma gondii
  source 1..2939: mol_type = genomic DNA
tgtctttactaaatatacacgtacatctatgcccatataagtttatagacgcacatggatacatatatatatatatatatatatatatatatatatatatatatatatatatatatataacgtgtatatatgtataaatgcatacatacatatatatatatatatatatatatgcatgtgtatacgtatgtacatatatgtgcatatgttcacatgtctgtatatgaatatgtgtttatatatctacatatatatctacatatatatctacatatatatatccatatatatctacatatatatatacatatatatctacatatatatatacatatatatctacatatatatatatatacatatacatacatatatatctacatatatataaatatatatatatatatatatgtatacctagacatttgtatatatatgcagatgtgcgtgaaatatcccagtgaaggagattagcttttggtggcaaggagcttcctggaaaagtttctcgattcgggcagtgtctttgaaaaaaagaaatggtcctggatgcggtttcgatttcagttttggcttcgtcgtcagctgaatccgcgtcgcagcgtcatccgcagttcacacattggcgcgtttcgggagtctttctctgaaaacgggaactcctgaagtccggtccttgccgtacactgtgtaacttgacttggtgcagaagtatctttgaaaacaaggcaaaaagagacgaaaacgaagttcactctggacggatcttcaggtgtgcgtgcacccccaaaaaaaaagaagccgtcgcgtatttcgagaagagcctctctgttttcggtgttctgcctgcgtcgggccgcctcgctttttcgtccagttcctcgatcacctaccgattcgtagaggatgtcgaccttcactgaattctgggctgtggctccgcttgcggatccgcaaaaaggcagggaaacggcaaggaaaaaagcaaaaaacgcctccgcacaagtccggatgtcagccatcgtgaagtgacggtgtcgccgggctcttgaaaagaagcagaagaatgtcaaggaggcgagagtcggcggcctgtgttcgcgcgttctggagctctcgcgagagtcgatacgaaacgcaaaaaactggagacacaaacgcgcaacttgcgtcaaaacaccctcgtcgtcgcgaaagagcgacgctcaacccccaaaagtcggaattgttcgcgctcaaaactagcgacggagtcgaggtctcatctcaactcgaactgcggactgttacacgaaggttcacaccgtacacaaaaaacagacggagcttgtcagcctgggtcaactcccgcgctttgtgtcgcgaagccgatcgtcagtccgcaggattgacacaaactttttccagctttctcttcacacggcgaaacggcgaagaaggactcgcgagtacagcgccgctggcgtcctctctgtcgaagcagcgttctcacgagcgtctgcaagtgtctttctttttttccagcctcgagcgaacgctggtccccctcccgcctcgggcagtcagctcttttcggcagaactttccccgctcccgtgtttcgcgagcgttttcgtgtaaaaaggagagtgtgtgcgacccctctgtcggatcgaacgcagctctccgcagtgtcaagcgccggtcgcgactcccaggaacgcctccgcgcccgtctgaaaagaaggttttcgaagaagccgacgagtctggcggataattgcgcagacgagaaggactgaaacgaatgccttttcactgcctcactcgagaaactcggagcagggacgcaaaccgccgagagcggggcgcagggacggaaatgtccgttcgagaggcctttttttcttctgtgaaacgccagggatggtacaaacgtcgcctggacatggtggccggggaattcgctccagccttcgatgcaggtgtgaggaagaaactctgcctcgacaccacgggagccggaaatcggcgctgtcgcggcgcaagcacaagttccagctcgtttcgtctcgcgaggcctgagagccatgcccgagggaagacacccagattgccttcaaaacgtcgcctcagttgctcggaaagaaaggaggccaaaagaaaaggcgcaccaagggtgtagattcgccgttaaagataatacgcgaacgacgcaaaagtggaggaaacagcaaattgacagagacggtgcccgtccagcgcgacgatccgcgcgaaagagaagcacagggaaacacgagaacggcgatggcatatgctctcgttctttcgagttttctcccttttacgcaaggcaaggacgcgaacctttctggaaaaacgtttcaaagcgttcgagaaagagtgtgccagcttcctctcctctcgatgctttttgcggaaggcgcctgcgctacatcgtccgctctttgtctctttgcgttccttttttccccttcatgtagtcaactactgttctccttttctccttctacaattgctctcttctctcttttcttttttcttctcctttttcttctcttttttcttctcctttttcttctcttttctcttccctcgtgtactcctttccttcgccgcgtcgtcctacgttcctcctctcgctgtcgctcgatttgcttcgttctttctcgtcctccacctcttttccttcgtctcttgctccacctttcctggaacaagtctctgcccctgtcaagcttctccgctgctctcgttgcctctgcttcactctgtgtttttcgccttcgatatcttccaaaagtctcagaacctcgtgattgtcgccttcgcgtagagagcgtggactgccgctctgcctctgctgaaagcgaggttctcgcgccttcgcgccggctcttcccccttctctttcctcccctcagttgctcctgtca

SEQ ID NO: 828 - DNA, 3001 bp, Toxoplasma gondii
  source 1..3001: mol_type = genomic DNA
aagaaagagcgagcacctcagaacagaagcgagtaacgagaaggacgccagaaggtgacgttggtatcacgagacaagagaaagaacagactccagagcgcgggtagaagacgcattgcagatcagacggcaacggcagtctctggcgagactctccaggttctcgttgacgctttggcctgcaggctcctcgctctcccttttgcttgttgtgcgtgtagagggatgagactcacatatgtacaaacgccctgagtctgaaaaaagaagtgggcagtcaagacgaaaaaacggaagaaaaaaagtgcagttcgcaccaacggcgaattcttcgagacataccaacatacaaacgtaggtaagtcttacaatgcagatatacgtaggttgcaatacgcacatgcagatatgaggaacatatgatcaatctaaagagactgacgtgtgcacgcacggttttgaagtgccacaaagagagaaatctttgtgcaacgacccttagatgaagaggggacgaaactcggtggaaactgtacctcttcaccaactccgccgtttggagcactgagactgtggagtcggttcccttcgttgtctttctaccaagcgccccctcaaacagaaactccaggtcacacggaactgcgcacctttgtttcgcgcaaaaagaggacaggggatcgtaggaacaggccggccttcaaccccactttcacacgagcggcgacccctgctacttcttgttttacttgtctttctctcattccttgctcgttttcgttttctgtcaactttaccttccacggcgacaatgtttccgagaacacaagggggaagaccaaaacgaaaaggctgttaacgcctagaagtgtttcagatcctgccggacgacagtggagacgtcggcgacagaggaacgacgtgcgtttgtgcgatacgactgcagacgcctcttcactggttcgccgtggacgaaagcagggcagcaacaccagcaatctgtttttcgtgggaggggtgttttctcgaagagcgttagaagcagaagcgtatctgtccggtgtgtttctgaggcacagggaccgggaatttgcgggtccggagcgtgaatcgtcaagggtagggcggacgagaaaaagcagcgtggagtgaagacgggaaacacacctacacactttcgagaataaagacaagaggcggcgtctgctctgcgtatcccgtttcccagcaaccaagcttgcacagcaagtagccgccgcagggaatgaggacctttcaagcccttggcttctagcccgtttattcgccgcaaagaggatctccttactcgaaagtgcgtgacagaatttcctcttcgccgggaacttcccctgcggctgaaatcaaggacgaacggaagggagcgccagcacagacacatgcacccgtccagagggaaccgtagctaggagacgaccgaaacccgcctcggcaaaaggagtgacgggcggtatttcgcccttggatcggtcaccttccagtttcgcaagtcttggcaaaagcgactgcatcaaggctcgctccaggaaacgtgtgtgccccgtcgaaaaagatcccgttacgggaacctcgcggccagaagcgacagagaagaacctcgcagcgcgagtctcggccgagttgcccgcgctctcggggaggcgcgcccccggcctttggaggctatctgcagggccctcgttggcgttttctcgggaaaacgcgggaagcctggacaagtggtgaagcttcgggtgaacttggcttttaattatctctcccaaagaacaaacgcgtggagagagccgaaacggagtgcctccatgtgtgccggcaagcccgctgctgtacagcctgttcgcgtgggcagacgagggaggccggcacgcgcgcacagggggcacacacaaacgcatccaaaaagagcgggacggtggcatatgcgcgcctgaaaaacggactctcttttctgcagccttccttgcttgatcctggtcggcttgatcaccctgcaaccacgctctctggcgttgaacttcccgtttcgcgctgtttcagaagtgtgagctgcactgggttgaccggacacgcccaaccgcccttcagggtgtacatacacgcggcgtcagcggctcactatgcagggactcaggcgctgtaattcggcaggcggggaaactgtggtgcattccatggaagaaaaggacgctggaacgcacgatctgcaccgaacctcgcccaggattcaggtcctgtcctcgcttcgaggttgtgagaacgtcggcgctgttcttccagcgggcccgcgcctcctgcactgaagacctcgagtgacacacgccacaggagtggtctctataccctgcccgctgggcggacacgctgaacaaaacgtcacctggaggcaccgcagacgtttttcttgagcgtctcgctctcgtatttcgctctctcctctttttttcggtgatcctggcctgtcctctttctgaggacttctgcccggcgacgcgcacactgccacgctttcgatttgcggcgaaaacagaggtcatcttcgcgcgcgctgtcttcacttccccagctcgtggtccgcaggggggctgcgaggcagatcacgttccccggcaggtctccgtcccttgcttcgcatgtgcattttgtctctttctttgtgggtcacgcgaggcttcgcgtttctgccctttctcctacttttcctcgtctctcgcctgcgcggtgtctgtcgctgttcgcagccgaagcacccctccgttttcctcggtttcgtccgcgatccgtttcacgcgtgcgcgtcgtggttttttgccggaacgtagacggttccgggccggacattcgagagtgcctgcacacccgtttccccaggcttttccacggttcagacgcatcgactgccaccagtctctgggacttctttccccggaaaaacccaaaatcaccccgtccccagtacgcaaaa

SEQ ID NO: 829 - DNA, 1881 bp, Toxoplasma gondii
  source 1..1881: mol_type = genomic DNA
gtgttcagcatgggaacagagcgtatctgcttggtttctctcaggaggaacgcgtgtagctttgtgtgtgttccttcacttttcttagcttctgtcgagcaactgcattccgcgatcggggcatatcacacgtagatggtggatgatgatttcgaaagtgtagcagaactcttgtctttcgcttcagtcagaccgcagcgaatccgtcgacaggtgtggatgggcacaaagcctctcacacgcagaggtccgaaatgtgaatggagactcaagcgtgagtgaacgtatgcacctgtgggtctatcctgcttgaatgcggccctgcacataggtaaagtcacagacttttgctgctctaatttgacagtgagacagcaagagggattttcctcgacagagccgttaatcaccgccccacccccacaaagtcgctcaacaacggaaggaatggagagtccgtgtggtcggtttcaactgaacatgctcgaggaaagtggggaagggtcacaagagcaaacaattcgtggagggaagcctcgatatcaggcaacacttccggagcacgtaccaggttggggcggctgtcgaaagctgctcaccatgacacaaagctgctgcagcagacgacttagcaaacgcaagatacacctgcatgtgcaaccatagaaatacgttttcgttcatgtgcaaacgacggggggccgttcaaggtacacgtcccccaccagctctagcgatggcgcggcacaggtgcttacatattcgtttacacaaatttgcatgcacaagtatgtatacatgtatatatgtatatatatgcatcgcttgccctgtacacatatcgatgtggcaagaacgatgtgcgcccaaaaattctttcagaacagcaacagagcgtcggccggtggcaccgtagaggaccagatgctctggtgtgctgagacgatctagatctactcaacaaaaagggggtttttctttcgtttgtagacgggcgtgagcgtcgaaaatatgcggaaatgcatcgaagttcgtctatgcattggtggagtttcagataattcgtgtgaaactgtcgtctctgggcgaacctcgaacggtgtctcccgtatgctttttagtgtacacactcttcttgtgtctgtgtagagcctgcacccttcagagagtcggtcgagtttcaaaagggaaggagagacacgaaaaacgccctaccgtttctctttccttttctaatcaccaatcttctcgacagacgcttctctttggttttggaaactctcttttgagtctctcgaaagtgtctgggacacgctgcatgctcgccgggcgagagggcgaccgagaacagactctccgaatacaagccgccagagccgggtctcgtcgtcggctgtgtggagcagacttgattgtttccacgttgaaacctaggtttgcttggatttgtcgttgacaaggaaggccaaaattcccctcgaatcaaggcggcatccatccttgaaacttcgctgttctgctatctgcatcgcggagctctttgcgtcgtttttttcgcagtctgcgcgagggaaaagtaccggagagaactagatccgctgcattttcgatcttcgctgtttcctcggtccatttctcttttccctagtcctcttttttttcgtcttcgggtgtctgtccgagtccgcgagtcggttgctgcgaagctcctcggcagaatcttcgtttctttggcgaagttcctctccgctttcctcgctcgacttcgtttctttcgcttcttttccaagtcattttcctgcctttccgcagaacgtcgctgccagcgctgtctcccccttccaccttcggttttctgtcgtcttcccctgtccgtcaaga

SEQ ID NO: 830 - DNA, 3708 bp, Toxoplasma gondii
  source 1..3708: mol_type = genomic DNA
gagtctctctgagaacccaaggtaagccatacgcggtcctcttcggcggaggcagaggcgcctgcgcctgtccccaggggagagtgacccccagcgagttcgaggtttcctgctccacttcttcccccgtctacgcttccttctgacgcgtttctttcctctacgtcctgcactccttccaagactctctcagagacgcaagcgcgaggagatgcgcggtctccagtggcgtcgaggcgcgggctgaagaaagagcagacagtggcgcccaacgcgcccgaaggagacagggccggcgcccccgctccgggaaggcgcgcagacagatgctgcatcccggcggacttgaaatgctccgcctatcgacggtgcatgcacatagtgtccagacggcgtttgctgactgtgccaccaggggcgcgttttttgaaaatttctctctcgcactttctagctcctaaagaaactcccgtttttgaagggacctcagtgaatcagtcagacaacatgcagcatctcctctctctcctcgaccttcggctcaaaagaaaactctgctgagagtctcggacgacccaacgcgcctcggtagccgtgtgtgccggacaagcatgcatgcagaggcaaaaaatacaggtaaatcggcagagagacgcgagtgagcacggatgcatgcggcaggttccgtgaatctacacaggagctgtcgacgcgtttacggcaaacgcgaagattaagaacggatagaacagcgaagtctgggcgagacggagaaaacgacgtacaagatggacccaggggagaaaggggagggaacaaggggaaagaaagcgaaaagagaggtgcagaggaaagggaacaggaacggagaaccaggcaagcaaagaagaccaaggaggaaggtcacgaacagagaaaaagaggcgacccttggtatttcgcgaggagacacccccggacatggcgtttctctgcttcccgaggcttttcatccacgcgacctgtgcgacagcgtgcagacgcttgaaagcaggctggaatacaaaagatttgaactgaggaaggaaaagaagtaaaaacaagcctcgcagacgacgagacagaaaaaggcttcgcatgcagtcaagccgatatatatgtgcgcatgcagcgaaccgctgtaccccgaggcgtttcgcttggtggcagccttggtgtgtgcttcgtttccttctctgcgttttctctctttcttttcgtagacttgcttgctattcaccgtgagttcgtctcagaactccctccccaacttttaaagaaagcgcatggtggctgctgacagatcaaacgcacagctgtgaactcggttcctacctttagacagtatctcactttcgactacccgagtcccccttcctctcttttattttcggtacttctgccgaccacaatcgacatcgttggtggcctggacttcttcgtctctcacccctcatctgtgcacatcttcacaagtcttgcagcttctgttttcttcactcttgctcgtctctctctgcatcgtttccttccctctccacgtttctctatgtttcacgagctgtctctgttccttgctccctctctctccgccgcgtattctctcgtcgtcttttttttgtgggaggctgtcatggtttgttgcagctgtcttggagatctggaaagtctgtttttttttgtcggaacccagttagactgcgtttttcacatgaggatgcaagctgtgaatagatgccacaataacatctgtggtagtctccttcctcaaaagcgcctccacattcgagacctcaccagtgctaagttcccgtcggaggcgcgggcgcatggagagaattacctctctgaagaagaaaagaatggacattacaaaacgggtgttggcgtggttctaggaagcaggagagtgcatcagaaatagacacgatgggcatagaagaatgtaagatcgacaccgtttttttcaggaattttggggaacttcagcactctcagtaaacgccaacttctcccgtttctgtgtcttttctgtttccgcggttccccctcttctcttttgcaggcacagcatcccttcgcgtcggctagagagagccgtgagatgcgacagcttcgatcagcgccgtcgtgctgggagtgggggcctcttagtcagacgtttcacggcgctttccggcgagggagcattgagctcacaagatgcgaaagaatttggcagataacacaagagttgtacataggggtgtgtagacaaccaagacaacaggactgtagagcaggatggctttacgttacacacagagacacacaccaactctcagactgtttctcggatgtaactcagagttgccaggcggagcgcgagcgttcagcacgggcgacaactttttttgtagattgctgaaggcagcaaaaagtagtggaaatgaatatcgtccgacagaaggttcctcgacactcgatctgctgtaaagttctggatttcgatacttgacgaaactaaggttctttcgcgtatgttccagatgcaatctatggatgcgatccagaactgcagaagtcaaatggactgaaccgagtcataaagcttcgcaaaaactgaaccgcagtccagttccccacttctttcacctccgaacacactctgcatttcttttcgctgcaaatcattgccaattctccgggacatctgctttccatacgaaagccgagcgggggtgacggctgcaaacaaccaacaccgtcgaggtgcggtcggtgaccggacattttcgttgagaaaccaaatcctaatttgcctcaggaggttcggtctctcttccgctgcaggtaagctgcagtctatcggtcagctcccatcctctcacgctgccgctgctctcggagtttatgtgggcgtgaagaaggctgtaaagcattggtatattaactgtggtagtctccttcctcattcaagtctgttcgaacgagtctgtctgcctatgcctatcaacgacgctggagaacctatgcagttgcggcgtcggttcggagagagttatgtcgcaaagggaactgctcgccagcacaccgatacagagactcccagttctctgaaacaacgccaccgcatagacgccgcgtctggatccccagtccttccttgataacacaaaaggcgtggaaacgcagaccgacaggaagcccagatgtctgcgtgcatctgcaaacgctgtgataaacgcatgaaacggcaggacaaaagatatgtttcctttccctcagcctcacggtccaggagaaccgattttcacactccattatactccacccgtcgccgcgagtaaaaataacggacagttgcgtgcaggtgtgtgtcacctgtcctatttgaggtgatgtgcaatcctgatgtggaggggcaccagccgcccgtggaagtctcagacagcaagaggagttcgatgagacacaaagagagacagaaagtacaagagagtaaggagaaaaagagaaagaaggagaaatagtcgaaacaagacgtttacaggacagccggaggagaaggtctgggcagggttagggcggaacgaagcagtagagagtggtgacgctgacgatacaggaaagagaataaaagataaaacgaggaacgaaagagagcgcgtttgttgagaggccagtacttcgaacacaagacgagaagaa

SEQ ID NO: 831 - DNA, 4281 bp, Toxoplasma gondii
  source 1..4281: mol_type = genomic DNA
acgccaaggcacgacggcaagtcacgagaagaactcctgaaacgagggacaaacgagaaaaacacaaatccggggacgagaagtgtctttccacttcccgttggacacggcgcaccgcttgcaggctctgcggagagcaaaaacggggctgcctttcacgtacgcatcgaagggagacaccgaaaaattcggacgcagcggaaaacgacggagaaaaagcaagtcaagcgcgagatggcagtcagcccagggggcgcgacagataagagagcgttctccgtgtttctgtctgagtttttctggttgtcagctgacgaagaagaaggagaaagaacaggattttctgtcttgcttagaaaagaagccatgccgttccttgttccgaagacactaggggacaggcgtgacgcttgggacgaacaacaacttggaaagcgtcttgggtgaaaattctcggggcgtggtgtctttgccgcgtaacgctgttgactctgacaagattcaagtgaattcctttcgagaaaaaggcggaggtgaagcaaacgaaaaatgccttttgttcgactcaaacaaacgacaagcaatccacgactgacaccgagagaagcgggcgaggcggaaaaagcggtacgagggcgccagtctgggaaaacgcgaagaagctgaaaaagacgggggacgcagaagaagaaactccaaacgccacggaaagcaggacagccaatggatcaacgggcaaagtgaaaacatatcggggaatggcgacaagacgagggcgcgtggcttcccctcttcttgaaacgacggcgcataggcgagtgggagagagcggtggaaaagacgaaagacccggtactttgagggactgatttcaagatgtgaatcgcaagggaaagacgaaaggttgtttctggaaaaaaacagagcgcagcttgcctttacgatcgagagcagcgcgggcggtcatgaggagacagagattcgttggggagtgaggacgacgacgggtgactgaaagacggggaaaagagaatctgaaacgacgcgagcgaaaagacggagaaaacgcacgtttctcgagaaaagaatagtcaactaggagaaagacaggtccagcagccgcctccctcgcgcgttcttttcggattcggccgctctcgttggggaggatttcgcagaaagggaaacacgtggaggggcgaagaagcgaaagacaccagtcgaagctcttgaagcttttgagatgtgaaaaaagtctcagagtcgacgcgttgagagcagagagtccgggagaaatggacggcgcgggcacagagtgcctgtagagatctcgacgaaaaggacgatacaacagcttgccgcgttcttcgtcttttctgagccaggcatcccgaggagccgagcgtggtggccgcacatgcgagtcacgagtttcgagcgtcttccttgatttccccagttccagaaaaatcgtcggcgcgatacgatcacagccctgtttgaggatgacagcagtgcctcgcgcaaactgtcacctcgccggtattcctgcgacgaggagcgcgcgtagaagagcgatccgcctgagggaggtctgagacgcgggacacatgtggtcaacctttcgcttttctcgcaaacgtctattccatacttttggtcgaacgcgtcttcggacctgcaattatgcgctttatgctttagagctcagacttgaacgccgcttaccagtcaagagacgatggacgacgggcggtggactgccgggcaacactctcgagagcactgcggagatggggaacctgaaacgcctggtgacgggaaacaccagaaagcggcaaagtggtccgcgatgtgagcgagacaagaagcagggcaaggaagcgggaaggcggaaatcttgcaaatgcgtaaagccgccaaagttcaactgtctcgctcgaattttgctcaaagccagtgtgaaaaagcacagagtcattagagagcggaataggcgagcgcgtgtgccgctgacccatgcacgctcaccgcgcccagtgtacgtacaccagaacacagtcttgagtctaagtcacttccacttcctgcgatgcttgcaggctttcttcttagactcgccatattggttcaaaaaccgtactctgctccatatgtttccacaacgcttcgaactggaagaccaacagcgacatgggtctgtttgaccacggaggcttaaccgactccatcggctgttcgtgagcacggaacacaaacgggaaagtgactgctgccctaaacagatgaggcctgcatcagtcttcgcgtgggtttcaactgatgtttctggagagaacttggcacctccttttttcgccttgtttcattcccaccggtaacacactcgtcacattcaaaccgacccacgacttaatgcgcggccttcctgtgcccaaaggcaattcattttctagaatccgctacgtgtttttttgctcaagaaggccacgtttatgtcgtcgccgaacgagctaccataaccatgtatgtatgtgtgtttttacatctatgcgagtgagtagtcacaggcaggcttacatgcacgtaaggacgcgagctgctcgaatggaccacagaagagtcactaccctttcttttggggtcatttcatattctctcgggcgcccgagtgttgctcggcagccctccactgcttgccactctcttgaaggaggtgagttgtctcagaggagagtaagcagacctgcccctgcatcgacagttcgcgtgcactgaccgaatcaaaaatgaccggaaacaagacatacctaagcattaatccatttatggatgtcaaggtaaccaaaccatgtttgatgctttttcatagacaggtaggtgtgggcgcagcagtaagtcgagagcgacatcgcgagccctgctctaaatttaccacgttgtgaacagagttcgtaaagctttcttcgcccactgccatccatattcgttaggtttgtcgcgagcttattcagtgagttgttcatcttctacatccactttactgaactcggcgcagaagatattaggacatcagatcagagcctcatcccgtgtgtcaaaaaagctgtctgcatgtgtcgcaaagcccttggcacaactgcctgatggttacgccgagtcaaattgtgcgcctccacggaaaaggctcaccttaatcatagtgaagatgctgtacgtgttagtaaaagagtattatacatatggaataggtgtaaagtatcaccacacatctgtaaacaaaggactccttaacttaaactgaggagtgcgtttgattgctgaacacctgcggtttcaggtgttttctaagtaaccgtatatatgcgagttctctcctcaacgtttctgccagcgttattcttgcttactcctctacgaaagggacccgccatcgttgatatcctctgtaaactaatcttgtgtagacgtggttccggacggatacaacttcgcgacaaacgctcagaattgctgtgtacatcagttcgagagcggagaacaacagtttgaacagcgagagaagacgaccatctggacactagtgtgatcagcaccatccacgtagaagtacctctctctgtgagacaggattatttgtcgaaaaattctgttatcacccatagtaagatcacgataaaacgacgacttagatgccagtatgatcagtaccatcgctctgggagtaattgtctctgagagaacgactgaatcacggaaccatggatacctagaacacgatcaaggggggggtgtatgcgcgagagctgccctgtctagaacaaaagttcccatgccgttctgcctatcctttttgaaagtcgttgtatcttgctcaggaacgaacgttcgttcacacaaccgtgtcagggcgctgcgtcactttttttgtgtggtgaataggtcactgagatgataaagagctgccgagaatatggaccgatcggaatttgcactcagtcagaactttgttccttgtttccgaaagctgtggaagacaggaaaacagatggtttgtcccgttttttccgcttcgcacctcacagtcgcaggtattctttgtttttcgtttcttgtcatagtgtctttttctttctcattctcttgagtgggttgtgccgtgccaaggggcgctcacacgacgcgcgctcggtcttccgcttgctctgtctgtatttgcgaacttttacagaagcaggtttcattttcaggtagaacttgtgaaaaagagaacacccacta

SEQ ID NO: 832 - DNA, 2235 bp, Toxoplasma gondii
  source 1..2235: mol_type = genomic DNA
aacaagtctataatgcgcaaactccacggaaggcgcaggatatatggaagggtgtttgtcctccgttggtataccgagtttcgaagaaaggggagaactccagtgtacgcaagggagcgttttcctcagcgcatgcagccgtgaatgggtacaaattttgcagtcgatccatttcggtctctattcaagtgcagagcagtgacacgaatcagcgcagcccgctgtagcgtgtatgtgactggaggaggcatacgtctgtgcctggaggaacgaagaatgtcctcatcactcgcgactttctcttgtgttgggttgtttgctctaggcggccgctgtggactacagagacgagagaccaagcactcaaagggagaagagagagagagaagacagagaaaaggagtcggaaagagagacgaagaaagccaagtagtccggggtgcggggagaacttgaaggcggagccagagaagccgagtttttttgtgcggtattttgcatgcacgcaatgtattcgcacgtgctggtcggtctccaggtttctgcgggatacacagagaaagaagtgaacaactgacagccatcttctacccttctcgtggcggaaatgcggtttttgcccatttgtaacggcactgacggacaagttgcaacttttttctttggggatatcagccgggaagcactgggttctttcgtagcaactctttccctgtgtcgttggacgtttcctcgacacgagctcttcaagcgactggactatatatgcggcatgcgcgattcgcacggggttttttgtacgtctactttctttctctagcctgcttcctcgcacgacgttgttgcgctcgctactccgttttcttgtgtttatccagggcgctctgccgccgtagttctctcgcaacgtctttttcggtatttgtgtcagctcctcgcaactcgcaggcctgatggttcgctaaatagtttctttctcccagtttttgtacggcaaacgagctgtcccgcagcactagaaacacggcattcctggacaccccatttcggcgtgctgctctgcctgtcgccggcggacatcagaacataccgatgtggaatcaccctaatgtctcagcttgcaaagctccggtccttccattctcgaagcttgaacagggctgtttgcaaagactctctctgtgaaaggagcttcttcaggagaagtaatgtcggctgcagacaacttcacgtcccttcactttgccagcctcccgtggcaattgctcctttgtagagcccggcacatagagaagcacggggcgttttctccgctttccaagatttattcaccgtctttctttcacacttgcccgttaaaaacaaaaactgcccgctgatgctccggctgccatcggtttctgtggtgcgtggcattctcatggttgggagcaaccgtgaagatcgagaatcgctgcacggttccagggaacgcgatgtatccagtttcgtcgggagttttccccggctttctactccgcccgcaaggcaaagaacaccttttctgtaaatgtagtcaacggggtcgtctagcctacacattttctgctttttcgttgactcggcccgtcttaaagggagcgccgttctccgcgccctgagagtgctctttccccctcggcggttcctaatcccttctctctgtatcgcgcctgttgttgctttcttttggcgtctgccgtcccgcttcgtcgccttttttcaggaattctccgggcatctctccgctgcttattcgtcaccgcaattcacaccattctaaagagccgtctcccgctgctgccttcacgggttaaggtttggggggtttagcgtttaccgcttcaacccgtaagggtgttcctgcgccgactctcagcgtttcccgaccgcgacgacgcggccttctcttgtgcgaccaatttcgcgccggattgaagcttggggtaaggtcgtggagggttgcctccgaggccgcgaatcagcgggggcgggtcgtttttgcagcggtggatttcgtagagaggaccagtggttttcgggggggggcggcgggtcgcatggctccccctgcagagcgcagctgctgccacaccattttcaagtttttttaacgttttcatttcgctgtttcgagctcgatccgccagacttttcgctgctgtgccgacattacttttttcttgatcgagcttgtccccacagttccagtgaaga

SEQ ID NO: 833 - DNA, 4124 bp, Toxoplasma gondii
  source 1..4124: mol_type = genomic DNA
catcctttctgtctcctcctctccgtcgttgcgccgttttctgtctcgttctctctgtgtctttccctttctgttttctcactggacgggtcgacactgggtgggaggtctgaccaccaagcaccggcttgccacgtggaactggcttctcgagtggtcttgttgactgcgtcgttgaggtcttttttgacgatgagttggacgagttcgagttcgacttcccgcgttcgcgcgacttcggcctcccgagcctggtcctccgttttgtcctctgcctctgcggcctcggcgccttcgccctcgacgcggcgacgctgcgcgtggtttcgcctgcactcgccggggcggcaagccggcacgaaggcagacaggaggaagggcagggtgacgaagaggggggcagtcaccatcggtcgcgtcatgctgctccgcggcgtcttcccggcggggaacggtcccctggaaagcagattcacgagcgcggctgtgccggggtacggctcgcctagacgcaggcgagcgtcctcgccatacacggcatctccatggcgcctgatgccgcccgaggaaaccaaaacatcctcgacctgcacaatgggggtgatgcggttcgacaaaccgtgcttccagcctctgaaggaaactttcggctgcgccaaggcgggcggtgctcgagagacttcggggtcagccgccggctgcgcgttgtcgacttcgccagcttcacgcgaggtgcctgtgttgctgcgcacagcagcgaaagcggggggcagagcgacaaagagaaggagcgaaaagaagaggagacagcgggcggaggcgaacgagttggagaaacgagggaaaaaagaaaacgagggtctgcggattcgcggacgcagtggcgcgctatttggcgccgatcccggggtcgccaggacggtccggatcagccggggctgcatctcggcgtctcgcgagggcttctcttcttttcgggatgcagaatgacagcttgctggaggaaaacgcatgcgacaagaagtgagcgccagaaaacacgggcttgcttcgaaaaaacgcgacgcacagaatgcttgcacaagcaacggcgacagcccccgcgcgcaagagtctggcacgtctctgccacggcagcgcggcgcgttgaggcgcgaccctcgcgacgtattcgagtgcctttgagtcggtccacaagaaatacaacgaaacagaatgtgaaaaactcgatatttgacgcaatgggtcgtgcacaaccaaaagattggggggggggggaaacccttatcggtgaccgtgtgcagccgccctctcaggtttcgcgttacgcgcggacagcggccgcgtacaggtttgacccgcagctacaaggctttttcctccacgactcggccgtgactcgagaaacaaaaccgtcttcacctcgaagaaagggcaaacgcaaactggatctgtcaaacaatccggcaccatccgcgagactcgcccatattcaccattcaagtagcctcgggattgccgaaatttcgggggctgcgaaacgcgctacgctgatcgatgccacagccacgcttaccgcgaggagcgtcggggggagtttaagtcatccagacacacacacacacacatacacacacaccaacgactcacacggaactggccttgctgagaacagttccccgaaaaaactcgaggacgcatattcggtgcctgtgtcgtcaagttgggaaaaagggcaaatgcctctggttctgttccagtcgcaggaagccggcgctcgttcgcctaccaagcaaaaccgggactcgtggcacacgggcacgaaaagcggaaacacatccgctttgactaggagacacgcacaatgcagatactatgacgagcatgattcgtccgctaaaagggccaaagagagtgtcctccatacgacgcagcgtcaggtgtatattttcagcgggcaaccccgatggctcaaagccatgagtttggtggtcatccaactttggaaacgaaaaccgtcggcatgctcctcgtcggtccggtgttcacacccttattgccaagcgtctattcacttgttcagtatttgtacggaggggggtgcgcagcgagggatgcgaaggtaagtgtgtgacacgtgtgcacggaactgcgtagaaaaatgtgtgtgaaacgtagaagcagacgtgcgtcgcccgtcagcggtgccgtaacggcgtattcatacgggaccgacgaggagcatgccgacggttttcgtttccaaagttgggtgaccaccaaactcatggctttgagccatcggggttgcccgctgaaaatatacacctgacgctgcgtcgtatggaggacactctctttggcccttttagcggacgaatcatgctcgtcatagtatctgcattgtgcgtgtctccgcgcacacttcccccattcacttctaaatgatgcatcttcccgttcacttccatgtcaatgccacttccacgaaacacaggattcccgagctgactcaacgaagttgtccaaagcgatctgcaactcgaatgtcccttttcatccctcagcatcttctacaaatacgtatggttctgcgcctcctcacagcctgtgaccttgcagaaaaatatgtttttcgtgggtgacgttcacgaagtatgcaccggtaaagctgcaaggtgacgacaaacagggacgcctgcaacccaggacgccctcgcctcgccgtttctgcctgttcagaccccgtttcatgtgtcggggttccttctcggcttctgtaaaactatctacatctacccatcgctgtatgtggcgtaccatgcaacttgttgggtctcaccagcgcgttttcttccaagataagccgaaacgttcgaacgcggcgctttgaggcgtatgagccgtctctgtgtcacgtggagagagcgatagcgagatccagtttgctatctccgcaggcacacacatctgtgtgttaattgttgcaaaataagaggttatgtccgatgtttataggcttttccgaaggaacgggaagctcttcttgagaaagagcgcctctttcaaggagttggggatgcgcgaccggcgacacagccgccccggcgcgtgtgtgtgttggtggtctaccggcaaagcacgctcccgctctgtcgcgtgcgaggattttcacttgtcagcgctcgaaggtctccgaagctcgttttttccctggcgaccggatttgtaactacagaaaatgcgagttttagtgacctgcgcgaactcttcccctccggacacaaggaagcgcacaaacagggggttctttagcgagaacggcgcctctgttttttcccccttttcctgagctgcgctccttttcctcgcgccccctcgcgctctttcgttcgccctgtgtgcttcttctcgctctcatcgcagggtctgactgaaccgctgcggtcttttcccgttttctttttttggcactgcaaactgctgggttcgcgagtcgctgcgcgccggagcgtttggagcgcgcgggttccccttgcattctcgacatttcgtagaactttggaaaaaacactctggatcgacggccagaaaccacttctctgcctcacactgccgtgcgcagcgcccaggaagaccgtacccaactgctagaaaacggggtgtagtgacgtctgcatgctccgatccgcggtttctcggcagaccgttacacacgcctgtctgcgtggacttgttcccctcatttgcgaatcttttgccgtactcttgcaagacctctcgtcctgcgttgtcagatccgtcgggagaccctgtgccctcgatatctctcctcactgttctgcgtctgcctcgcgacgcctctgttacgtagtctcgtttctcggatcgcagagagcttcttacgtctcctctcctcggcgtctccaaatttcccttcgaactgtaaaaacgtctctagaatcctcctggttcttccacgctcgcttttctctgtgttctctcgtaaccgttcagctggctcttccgatctatcgggattcatccgacgtcttccattctctgtcgttccagtctgacaatcgcctttctcattctcaaagctctttcctgggacccaagaa

SEQ ID NO: 834 - DNA, 4747 bp, Toxoplasma gondii
  source 1..4747: mol_type = genomic DNA
ttgttttctcacatcagacacagaagctcagaaaagctcgaagaaacggcgcgttaaggcaatcaaggcccagcagcaattggaaatggcagagaaagatgcggacgaacgtgcgaaagcttggcaaaaattcaacaaacgcgtaagtagtcggcgaaaggaagtcacctttcaatcttgcgtcttcagaggacgccgtgcagaatcaggcggtattacatcgttgtctgcagtgtcaagagcgttgtacagagttgtgcgtgatcccctttcttgtctttagcaacaccgcattgcaggcaaaattgtaatgctgcatttctcgaaaagaagcagaacagctcgaggatgccggtttctagcgctgtagaaactgcgacaccgccgtcatcgtgttttgtggtgtgatgcaaatgctggattattcgtacatagtcgaaacagtcatgtggggcgcagggtcgcaaacaggaatgacatgtcattgggcttttttcgtcggtggtgctcgattgaagcggtgttgctgcggaaccacgcggtacttgtcacgtctgtattttgtagccggctgcaaagcatctcaaattctgtttatgagttgctgtttaggctgggtgtacagacgtgtgctgtgtgatggttcgccgtgagtggcagcggttcatttgatagttctgtttttgcgtgtctgtgcaggccatcaacaaacgtatggcggggtacatgtctggacgtggccacgaatcaatgttttctggccacgaagtgaagaccacagttagcatcagtgtcctgagttcgcagcgaactacggtgaattcgtttgttccccgccgcaaacatgatgtagatgaagaactgattactgatgactgatgcgtgtgcgttaatttcctcgtaaggtactgtgcacaaactgtaaccctcaaggctttgaaatttcatcatctttgcgagcaagcgagtagatcctctagtaccgtctctcatgtgctagagttacgcgtacatagacctgcaggagaaaagcattaccgtcttctgcgcaagacgctcgtgacgtctcttaagcgtaggtagtggcgttcacttctgagcatcttactggtgcaagacagattgcggtaaattactaaacgtgggcaacccacaggcagcataaaaaagcctaaactcatacatcaccctgaacaagtgacaactaatgcactgcgtacaccacgatccggtgactccgcgactacggagcatcttcagcgtgtttgttgaaaccgtcgtacaaaaacacatcactattccggtattataagtttctgctctttgaatctgctcgtagaaacttatttcgattggtctcctgcatatgatatgggtgggccgacgtggccggtttcctctcatcaacggtacgtctgtgcgccttgtgtgcgaatcaggccacggccttcggcatatttaactgtaatggatcaaagtcgcgtgcaacccgcctcgcacaatcactggtttgagtatgtgctcgacaaaaaaggtccttgcccttcatgttatcacgaggcacacctctacgcaccacaacgatcatcacgcaacctccctcggtatctgtccgacgagcgattacaccaacacattttcttccaacgtgcaacacgctctgacaatgacgtctgccgtctgccacaagggatacagacgacacgtccaaccgtgcctgtatcgatcgatacatgctccgctacacgcactaaatcctcacgctgagacaacaaagagccgagcaacacagtgccccttactcttcctcggcaacttcttcctcttccgcggttgcagactccttgctctcttcttgaatcgcgcgtctcctcctccttctcaacaatcgcagtagtgacacaacggccaccacagctgcagcaagtcccactgcagtcctcactggatgtccagtcaccgctgctcttcccctttcgaataacgatcggtcttcactttgtccgtgttgttgtacctgttgttgttcacccccccaagcaccttcggagtcatccccgcctgaccctgtgtcacgcgttgaaccggcaacgcccacaaaaattaaagccagcacgttcacgatcattaccgccacaacgacgcgttttacagacgccattttgttacttcacgaaaatcgcaataaaaaacagtgaaccatacacacagttagagtgaacacacgcgcgatgatatctgcaaaaaccaaaataaaattgactgacggtaggatcgagtgccgatcgacgtcaaccgtcagtgcgtctctgcacaaaccaaaccgacacggaacagcccacacgtctgattccacaacctggcaggacctttatccaaacgtgtctcgttgccaccccgtcccgcgctctggcacgcgtcgcgcgccgagggatctgaggtttctccgctaaccacctgagggagtcatgcgtcccaaatcctgtctcgatgattgctgcatggcgtactgtatcatcatttcggcacctttcttgccggaacaagcggatggtggcagcctgatcctgcttagttgtagtggcggcttaaggaaactggttccatcttgaagtactggctggataccttgtctcgtgttacatgtaacgtcgtttggtggcagggctgagagacagaaattccccttctatatagcagcatcagtttctcacagcttggaatttgttagcaacttgtacagttttttcaccagtccgtgaacagggaggcaaggccaggatttttcatgtaacatgtttgagtgcgtcccaaaacctggtgggggtgggaaagggggggttgcattgtttttttcatatgcgatgttgcggcagtcagcacgaatgccgcggtacatgcgcccaagactccgccacatagagttacaggctgtaaaattactggtgttcatcagacatagattgcatcactgaagtatgaagagtatgtaggggggcactttgcagcaactggcatttagttactttgaaacgtactttttattgcaacgtgtagagaaccagaaatttcggttagtgcggaaacggatggggttggcatgaacttctagagttctgtgtggtagattccggttcccaccagacgacgaaagcccgttggaggcatttgccgtcttttgcgatgtttcggacaccaggacgtggagttgagaccggtgtcgtgtggtacacagcgggaacaacaaatgccgtttggtggaagcctgtaatgtcgtgactacgtgcttccggcacgtcaggtggtggtgcacacaggaatgagatgaagggaacgtatcaacagagctctgaagcgaaagaacgaacgatctgtgtagctgatggcaacccgccgtttggggttgcactacagtggacagcagtgatgtctcatatagtcacttcgaagtaaggaaagagtaatgtgagtttttcctcaaagccgttgtatatgcttgcaccagtacacgataaggtcgaggaacatgaaaaatcgttgggtagtcggtcgaggcattctttcggagcaccggcgacgcgcaagagtatcagtgtggtacaagcgatagaggcaaaaacgtcacctcgaaaaagagaccgtttctgctgcacttgagcatggccccctggaagcgtttgttgccatgatgtcaactcaacgcttacgccgtctgtacacaggagctggcaccgttggcgccgcggctgctgaacaagagtttgaattcgatgtgttgcggatttactcacccacaaagtacaacgcctcagtacatttcgcggagaaccagctagatcaaagttcgacaagcatttcacaacttatctgatttcttccttgctatggcggaaacgatcgagctccatgatgatgcggcttttgcgccaacgcgcccggacatggaatgcgcattgcatgagtgtatgggcagatggggcaacctgaaaattatgttcgagttggagtgtcttctccaagagatggaaaaaagaatccaggaaatacaggcagaaaaggcgatggaggaacggtgggaaatagtccgaacacgtaggcgtttattgctacgtgattttttgcctgcgaagctacccacgctatgcagacctgtcgaagctgcaacacgagataactgaggtcgagcagaaaagagcagacgtctctctcaaaactctacaacttgacgaaaaagctttggagaaggaacaccaggttaaatgtgcttttcggcagttgaacctggggttaaaagagtgatacagtgtgtgtggcgcacataacgcgtatgggctaacatatggtgtgtgcggcaggcaagctcttttacgggaaagactacgatcagtacgtggttgacgtgctttttgaaccgatcgctgttgatgtaccttttaactctacgagtgcaggtgaagaacgttgcttctggcggaagaggccagccttcgcaagtgcatgtgaggcggaccgcttctctcactcaaatggataacgctatggctacaacaaggctaacggtgatagtataagcattctcatctccgcgagagtaatcgaggaagcagaacaacgcgaaaattttgcggtatgacgtccacttcagttctgtcttgtctagcgagcaacactagttcggcttgcgctttcaacccacagctccacagtgatgcaactgaactaacgtcgagtaacgctgctggccgta

SEQ ID NO: 835 - DNA, 4496 bp, Toxoplasma gondii
  source 1..4496: mol_type = genomic DNA
cacaggtctaacgagggtcgctcaggcaagtaccggccgtgtagcaaggggctctggaaatgtgcagttgtgcgaagccagaacaacgctgctgagaacgcgacgttcgatagtatgactgaatggcatgcgctgtgcaggccagccactcaaaaatcgaaaaaaggcttgcaagtgtctgacgactgctgctatgtaacaccatgaatagtaacttctatttcaatagacccaggtacatgagctaggtttcccttcccagcaggtccctccttgataacaccacagagcgaggaaagccatcagaggaaacaaaaggattcaggctttgtcgaatttcaatctggatggcacgcgagtaccacaatggaccaatggtatctctggagaaaagcgatgctacgtatttaagcacggtaaagcccacaggccaatgacaaatacagtgctcttgtgtccatttgggaacggcggatttgaattcactagcaaattccggtgtcgagtgccgaagtaccgtctccagaaatccagggcgcaggtcagagcttctaacagaaagctgctcactcgtccaagcaagtgaccagcaccctatctgcagtgcaaaagtcccctgcccgctacagccatgcgtaggaggaagcccttgtcaatcgcagggacacttctagcatagtcaacgcagttccagtggtgttcgctagttttctattcctttcctcccagcccctttagtgggctgggcttacatcccgtgcagctgttctcgtaacgtggagtggcggtccttagaattcctggaaccaacgcgcgatcagacatacaatttcatccggaacatgacacgataaaaagcataatctgagatatttcacctggtggttgaattttctgaggaaagtcgctctttgcggtgagacagttgtttgctaggctccaaacagggtctagcaactcgggctggccagtcctgggcttctgacaaggttgctcggtgtcggaagaatgggcaagagaattgcatcacgactcaatgtaagaggaacagaaaacctcaagtactgcaacgttgaatcggcaaaattttatttatcaacgaacacagaaaacacatttcaagagcgccccgagtcgcggtacgagcaaactcattagaccacgatcagggcttgaagaacgggtctgaagctgcgaaccgtatcatttcttcacgttcgtgcccgctgacaaaaatcgccgtttgaccttactgcacagtggatgctacatttttgtgttcttgaaagcccgtgtctggggtcgttcaccgatcgaactgcttggtacttcttttatccaaaggcttttgggaaggcgtggcgttcaaaggagcttcgctcgtatgtgagtagctttgtctgtcattgtcacgatgaaggccgcaagctctctctgcctgggattggttttccttctacagctgagtacggctcaagcaagttcagctgaaacttcctctggtacgttctttggaacacaaaattatcctacgcaactcggttcttccagtgcacgcgagcaggcgcctgttctaatctcgactttccagccgaccacagatcgcttgaacacgcgcatggttttcacgcaagttctcaacgatgcatacaatggaggcacagatggaatacacaaagcaactttgttctcacaagagctcagcaacagcgtagaatacactgctgaggcgatggagaagtttgtggacatggttcaaccagttcaaggagttgcttccatctgttacccaacaacggcgacagaaataccggagaaatgcagtaaagcgtatgagtatggcgatactgtctacattcctattacccgctccagcgtcgccccaaccacaaatgaggcgtactcgggcggcttgtggagggaacccagcgaaaaactcgacaaggtatgagcctaatcagaggatgaaagttaagtatcacccctgaatgggacaagatgctgcagtgtcaagcctctactgtgtagatgaatctctgcagagcaatacacgagagaaatcagccggcatttactatcatttgtacaggtctcagtgagtagagtctcaatggacaagcagtgcaccttatgtacgtttcgtgtgcccaggaatggtacgaggcgatacgccttctgaagaaacaggttcccaagctcaagacctttgcactgtacactggtcctcctgacgacaagcttcttcattacctactaggcgaacacaggctgatttttgatggcctcttgatcgactgggaatttggtcgcggagcatgttggtcagaggtacgacgcggacaacagtatttctcacgaacaggggcagggtgtgtgcgtagagtttgtgggtgttctttcacatgtggtgacggtgctctactttctggatacaggtgcagaaatcaccgcccaataacaactggatgtggttcgtaaaaagcaaaacaagatacatgatggccaatcaggatccctcaagctgtgtcaacgctgatggaagccgggccgacaaggacgtgtttcttaatgctggagaccgcagtaagcagttctttctcgtaccagcggctgcccttccgagaaaggcaccagcagcctttttcgtgggggtcagaaaccccgacgcactttttagcgtggttagaagtgacagacaaaaaatgcagtatcatttatcaacaaatatttgtatagaattaaattctgtgtgtgaccttcaagctctcttcaaacatttccaccgacgatttgatggacctcacgtgtatttcgactgtgaaaaaagttaggcctgtctcggtacagacaatactaagtttgttttcttgtttctgcaaaattacctggttaggcctgcaaatacaagactatctccttcccgtctttccctgctacaacggcagcgagtggcgatgtcacagcgctattaaagagaggccttctctggcgtgtgacgaccagagacaaaggtaagtgaggaatactaggaatgcttctttgttgtaggacaccaacgcaagtagctttggaaggtcgacccggtcaggggtgtgctgcgcaccgtctgttcaatacaatgacagcgaacactctgatgtctgaacttgtacatatggggtcacgacgttcaggtacgcttttgcgttgtttgagatcaattcatctgcaacgctcaagttcttcttgaaaacgtgcaagaacgtattgggcaaaactccggcgtacgatcttgtacaagtgctctgaggatcccaaagacggacacagaaaggatccagtgtacacctgttcgtcattccctcgcagttaaggggactagcatcgtcgaagtcgcggctaggacagtctctccagcagcaaccaatccaccgagccccaattcttctctgttgcatcacggggcaacgtaaatgtctatacatcgcattcacttgattttctggtcactatcttgtaaaccttcaccaagaaacatgtctgacagcgcagctgcatatatttagtgcaagtgcgtgaacttagttctgcgtcccgactctatccataacgaagtccattgtacttcgtcttgtcgactcgctttcgtacaacaatgaaaaaggaaacacctctggtgtgcctgtactttggttccgagtagctttccggtaacgtctgtcaaaatgtcaactgcgtcgctccagagactgttgcgcacacctcaaaacgctgcttcacagtgtgcctcgcagccatcagccttcacagcaacgcaagtctatcagaagtatgtcaacctcaggtcaacactggtcacctttcgtccgaacgtcggaacgccaacgataaccattgcacgctactatcgggtgtcggacttcggcaagggttagaaacaaacctcgcattctcggatactcattcctccaaccttggccgccacggtggcagcgtagagcggttgaaaatggtagcgcttttgctcctcgccacgagcagggtttgttctacggagagaggcccagacaatttttcttcaaattgtggttgttggtccgcagcgtagctcagtgcattatgataaatagaacaaaaagcaggtggcgatgccccgtacgacgtcgccatcaacaaagtagcagtgtggccgcactacgaataacgacttctgacccttttttgtacgtttttccttgttttgtgggatgtccttgaagtgttgctgatttggtcaactagtcgcgacataccgcgcatgcacatgcacacccgtgtgagacggggtttctgaccaccggcggcgaacagtgccacgagtggtgcccacgtggtgacccgcgtcctgaaatctttctttgtagcttcccgattgggtgcctttctctgtgtagagtcactattgttttcggagacatagatttaatgtcagctagggccttgcgaataattcagacggcgctccccgacactaacga

SEQ ID NO: 836 - DNA, 2579 bp, Toxoplasma gondii
  source 1..2579: mol_type = genomic DNA
catcttgagggagagctttaatctagttgcttacacccttcagctgcgagggaaaacgactggtagatggagccctctccagcctcttcagtgaaccattctgggtggtttggtttctatagtgtggaaaccgaacatctagatcagtttttaagggacacatcatgtcgtcacttcccgttcgttgactttgcagcatgcagggcgaaaagtggtgggcttggcgttacgtggactggctgcgtgtcgcgtgcactgcatgtgagcttcaagggggtttccaaggtgtcctcaaggagcataaagccttgtttgaagtagatattgtctcagatactttgcgtgggtacaaaagtttcccaccgtcgtgacgtggacttacgacaaaactcgagcctcgcctttttcgccggctacccgtgacgtttgagaaatcgtgggatctgcacaaaggctccgaagtaaaattcaattataacttgctgttcggatcatctcagaagtaacacaaacggctctggcttctagtgaaagtctggacactcgagacgactatgcaggtcagtacattacccacggtggcaccttcagccgccgcccgatgaggcgaatatcgacgacgctcacggtgtcagattttgtggagccttgtgagcaggcaatgaccagcagtgcacttctcggtctttgcttactgctacaagaaaacatttgagggccgtgaaaccgcgcaccttttgccacactgagtctggtgtccatttgacacacggacgggatgacgttaggcgttcccccatctcacgtttaccactggtagttacactacacctgcggaaacaaaggaatgtgtcatgtgccaaactgacacgagatcaaacgcagacactctttgacgccaagagtggtggtagctcctgcactgtgagacagggccggagtgcaggtctcaagagtccgaaaggaacgtttcggttccaccaaactggaggcgcgcgacagaagacgctccatacaaccagattcggctagcgatttatacgctccaccgtccgcaactcaggttcctcttctgtgagtggcattcaccactggactttgcccaacggttttgtctggatttggagatcggtgtgcgcgtctcaaattctcgatagtggagccagacactctaagtctctacagaaaaaaagtgcgcgtcctgcaaaaccttgcgatatttaagaaatgtggaacttcactcctcagttcagcaaccggtttctgacggctacctgcagagcaggtccctaaatgcttctccctaccttgagtatatgcgtcaacccggaaaccgcagctcgactgctgtcgaggaacaggtcctgctgatgaaccgagtgtgaaaagtcctggtttgaggcgaatttatgcctttgaaaaccgttggggcaaacggagaactccagtgcatttagcgtggaagaagaaatccggaaaacgcgctcgctgtcttgccaaacaggggtggcgtcttccccacctcttcttccgacaagctgccatcgcgagacggggctagcgggtggcggcggaggagggtagaaacggatcgtctccttttgagagattcgcacatggtacagctttaactcctcttctgtggagctgcggtaaacgaagactctgtgtatttacggggaaaataacagagggaaacacgcttctaccgatggccactcgaccagagggggtgctgcgctaacaagtttcagcgcagtcgatgacaatcggaccaccacgaccatgaacacgtccgccaccctccagaaatctttttccctttgctctgttgtgtaaacgctgttttcaggaaaagagacctttctcgctggagcatgtgtctgtcgcgttttcggtgtctgcgacctcgttgcggtctgcggatgtcacatcgaaaatcccttatcctgagcttctttttcctccacaccgaaggcgtttcctctccttttcttgcggaggccctaccctccacggcaaacagaagcaatagctggtcgtctattcccttgctctttcgtttgtgccgtatcgcagcctcctctgcttctgaccagaaaatgaccgtggaaccgattgtctcacgcgacgatcctttctctctttgaccctctggggagatgtctctgcctggatttcgccgacttgcacattttgtttcgaactctccgagtctacacgaacaccgttgtttcccccttccttgtcgatgtttccttcccatctaccttttgtctccgcttctgccttcttgtgaaacttgtcaacgctgacctttgcgcgcctcttgtctgtgactccagcgggagagtggacagttttttttccttgggacggagaggccaccgcgtccccttcgttgcctgctccggagcaggcgagaatttttgcagctggaccctgaatcgtcccgcagagaaggagcctcagttgtatacgggaggtaaatcgccaagcctgctcggctgtcggctctcttcatgtgcagcaaagcgcgttggaggccgaagggtctgcgttcccagaggcctgcaaaa

SEQ ID NO: 837 - DNA, 4848 bp, Toxoplasma gondii
  source 1..4848: mol_type = genomic DNA
tagaagaggcacatgagaagcaggcaagccgcctgaagacacgatccggttcggagtagagcggatgtgaaaaaataaatgaacgggctgtgattctcgcctcgcggagtctcgtcaaagttagccgggggacgcaggttttcattgatggatcgggtcagctgcttcgtcagctgctctccgaagtcaaaagaaccacttccttgcggtcccgtactgttctgccctgtaggggctctgttgtagccctccatgctggccgaagagacaaacgcctgctggaccggcagagtttcgtccccttcgacgcctagagaatacattttgtggcgagaaaactggaaggaaatcagttttggaacagagggctatggcaaaaagggaggataccgagaagctgagtcttcttaagagtgctggagtccctgagctcccagaacaaatgccgagagccgagaagagacgaacagaacggttcctgcaagcagacagaagcggaaacacggaatcatgtatgaggagagctgacggcggactcatttgcactgccactacatccaaacacaaaatatgcgttcttctcaaaaactcttggagctagtgtgtgtgaaagagtaatagcattcacagtgtggacagaaggtgcagaaggccctctcagtcaacatgtggggtaaggctagcggaaggcatggaagcaaatttctctatagcaggattgctccagaatcacactggaaacaactgagggaagacacgcaacatccgagagctacgagaaaattatctaaccgaataccaaaggctccagcgaaaacgtcagaaagaaagtctggctctcaagcagtgtgaacaaccaaagaactgaacagccgcggcaggccttgagttattttccgtctgaggtctcttgagacgtgtgtagacaaaggtatcagagccagtaggcacacacacttggaggccacaggcgtgcagacatgtggctatcagccttcccgacgcttcatcatacatcccacgagtacgtagacgctttttatcgaaggagagcactcctgccatcggtttggctagtctgtatcgacgtttgggtggacccttcggcggttgttccttttgtcatgccagagtgcatattagacatagccacacaatggcataacttcatcttttcacttcccaatgctccggcatttgtcggcggccgctttccacagggcagtgtcttatcaatcgacacctaatcgcagtgaatccacgcgaatccggaatcacagtgcacataccgaaaagtcaaacacgaccttgcaacttgatttgatgagattgcagccccacaaaaacgtttctttttctatccttctcccgagagagtgcttgaaaagccctgtaacaaacggcctgtaaagacatctgagtatcctgctgggtcttgctcgacgaaccaagcaccgtccggtcgtggtgctgtgtaacacggatgcggcttaaccaaacatctcaggctagaaaaccgcccatttgaacgcatgtctcacgtgcatgagtcccgaatgccaccggagttgcagcaacacagtggcgcagcgaagaaagcggaaaggaagagaatccctttcgctgctcaccgtgaaagcgtagcgcgtcaacggcgtcgagctttttcttcgagcagacgacgtgatgctaagacttgaaggtttgagagagccacacggtacccccgacgaaacaaattgagaaacgcgtcttttctgcgttttaaagtccttcatgatccaggcacatgccagcttttcttccagaaatttccagttcttgcaaccacaggcacgtggtagcagagaaacagggcatcgggcaagcgattgctaggactacatcatcgaacctcgtcctcgagacccggtgttccgcagctgcatgtgcgcggctggacagtcctctcctgagcactgtcaaattttcccaattgtgcatagttttccgatcagtcaagtggtagaagggagacgcgacttcccgttgatgggcaacggtgtcgaaagacactgcacgtgcttcggaatgtggcatgcgcgtgcgacagcaagtgcaagttttaaggcgaagtggattcgctgcctggccttccggcactgcaactccgagtaactgaaaaacgtcccgaggtctaataaccgcatgcccatcctaagttaaaagagaagcgacgtctactattttcctcccatagagtgtgatttcgcgtcgaacagggatgcacgcagtatattttggggaacaactgattcgagggcggcaggcagtctttcaggatttcgacgggtttgctcgggacctctactacccttaacaaccgtatccaccaactcaattattgtactgacaacaaggatcagagttggcaactcgcgggtggcctgttacaagacagaagcgcatattcggatgcagagtgcgctcagcagttcatgagattttcgacgcactacaaaaacaactttggactactcgtttagacattcatgttattcctttaccggatcgaagttctattgacattcaactcagtaaatccgatccgccgaactgaccgaaagcgccagctaagccgacattggaaggagagagcgacgcgacgtcaccgtgtttttgctgcgcttaacactcactcggggtcactccgctaggcctccagtatcttcagctctggagatgtcagtattccgtgttttccggcattgctgacttatgagataatgcacacaaatgtgtccctcctccaggatgcgactcaagaactaccgtatagctgctatgccatgcacaaacacattgtttgtagtcacacagggcgtcctgctaatcggtgcactaccaagtttaatatgggatattgccaagaacagtcactgtgtccgtgtccgctctacgcgtttcccctgaaatcctggtcacgttacaatgccaacatacacaggtactagccacaggggtagagccttactaccagtgacgctttttcagacccccacttaaagaagtaccggaatttaacgattgcgtttcgccaaccaactgacgagagtgcttcctgcgtgaatgctttgtcgttgctctcgccacacaatcgttgcgcctttaccgtgacgaactaataagtggatttcttcagtgctttgggcaacaaagagctgatgcacgctgttgtcggcgaggcccctgcgcttggaagccgcatcgcaggtagaccttttgttttctctgagcgaataatttggacgggcatgtatcttattttgtcaagactgggtgtgctcacaagcaatcgcttccacgatacgggtccaacccgagtaacgacgtatacaagatgcctctgtgcactgactacaattctggatgggtggaaaatcaaaaggaagaacatattcccagagatggacaactggaagccttcatccaaccaatcagatgaaggtgcattaacttcgaaaaggctatacgctcctaggaaagcacgtacgattcggaatgcctgaccatagaaagtctaccgtacccaagtcacgtagtttgctacggggcattatctatagttcaagtgaaatccgtttacattgccttttcgtcttttgcgctttcgggtagttctcagatgcaagtttcgcgcactgtggaaactgcgttacgaacagccttaccctttgctgcggttagttgtagtggaagtcgaaagtcatcccgccgcatcgagctatgcagacacttgcgcacgagggagttcttgtctgggtcccccctcccctacctcaacagaggaaatctgacgcctggtggcagacaaatgatacctttcgaatttggcctagactccgaagctgatgctacgttggcctggacatcgatatttcattgactttttcgcacgtgttgttcatgacatggctccacagcgtgcaagccatctgcattgtggctttcttgtcactctgatttagcatgaggcaacggttttttgtgaattcataacgtgtgcaaaacctgccgcaaggactcaccgagtgatggcttctttcccggcacgcctatttttgtcttgggggttggtgtgccgcatgtgcatgcgttcggccgggcctgaacagaaccggtgaaactttccgttattgtctcagctgcttgtctttcatatcctgttgaggacagcgacttcctacacactctgttcagcctttaaaaaggtatgcgcgttttaaattttcagctgttcggagacgggcttccccggtcgcctaccgtcggcctccgctccgacagaaagaagcacacttccaggaggttcaacggcaaacgcgcttgcatctgtatgtttcgtgtttcatttataacgcgtgcccacgagactttttccagtgaacagtcatgcgtccgtaaccgacggaatgcacaagacagcacgagcatgcgatgaatgtgttcatgtcgcaggtcgaccgggtgtcgcgttcatcttgtcactttcacacattggctttcccttgctttctcttcgaccaaagtccgttgtgttttctcgccctctttctctttctcgcgaaccaggtgcgaatttcgctttcgtactcctcggtgcgccgccgtcttttgaggtctgtctccattctgtcgctctctcattcacctttcgaaatcgtttctgtcattagtaagcgatcctgccgtgtcacgagctcgcttcgctctcccttgttccccacaattttcagcgcaagtgtgagtcacccgcggcacacacagcagtaaaccaaggacagccttccaaaacgttgcggggcaaaa

SEQ ID NO: 838 - DNA, 1512 bp, Toxoplasma gondii
  source 1..1512: mol_type = genomic DNA
cagaagacgcagaagatttgcatgcgttcgcggacggagaagagagagaagtaggaatcagataatcgcaggaagaagctcgagtctcggaggacgcctggttttttggagcttcatcacgcctgtgcttcaactcaccgggcataatgtcaacttggaacggaaaaaagagcacactcggtctcgttcactctcccttgtctcgtcctccgaggcgtagaagactcttgcgacagagccgagagagtcacggcccagaaaagtaaggcaaagaccgtatcgagacatgttttggcggacacgacgggccaggaaattggcatgaaatgtggaaaacgatcaacgacaagcaggcggaaacaaatctgtatatacattagaggatacggaagttcagctcgccgcgtctatctcgacttttacttccagagcagctccctttccaagtcgcacatcatcgtagtgtcgctggaccttttttctgttggtgcctctttctcattcgcaagttttcctcttccactcctactgcctttcccccctttcgccgacgatgggagaagcctccacacacgctcgtccacggggctcggtgtcgtgtcgaggcaggacggaaaacaggcaaatttgcaccgtcccgcttggaaaaatgggaaggccggacagaaactggggataagacacaactgcaaaagcaggagttcgcgaccggggaaaagcaagagacatgggggcaacgaaggcacaaccgacggtgctggggcagacgggaggggagcggcagcttttccggcagagaaaaggcaaggaagtcgaacggctgctttttgatttccagatgctttttctcgttcccgtgtgcggtctcagatgcgcactggggcttcttgttttcgaccggcaaagcgcgcaagaagctagaccgcatgcgtgtcacagcacacagacagccagcagagaccgggggtaaaaagcggcgggtctttggcgcttcttttatttcatctcgaaaggctgttcacacttttcagcagaacgtaggcctcaaaagacacgcacaaatcttggacagctagaggctcaggcagccgtgcatgcacaaactccagcatctacctctctgtgaagtccagttggaaaagatcgaagccgccttcgagttcgagaaaagatttccttctcattgctcgcaggggtttttcccgtagctgcgcatgcgcagagaggatctcccttcccgggttccggtttttcaggtggcggcttatattcggaaactcaggctgccgcgctctctaagggaggggcctgcgtgtcgcgcggcctttggtttccagtgtgggtgccaaggcgaaagaaagaagtgacgggggggcatcgtttttgcagcacgcgcagagagatctgggtcgtttttcttcggggcggggcgtgtgtctgtcggagagttgttcctttctttccgtttctttctggatattcgtctgctctctcgcgacctcttcgacgcga

SEQ ID NO: 839 - DNA, 4993 bp, Toxoplasma gondii
  source 1..4993: mol_type = genomic DNA
cctcctccgagagcagcgaggccgcgttgttgtcagttttctcaactcctctgaaacgctgatccgcgtctgcactcgcgttttgaggaccagagagcccgtcgatgatgtcttggacttcgtcgcagagaagaacagtgtctcttttcccctgggcggcgtcgaccccgtcagcgcctgacaacttgtctgtctctggggccgagttctcgcgggcgtcaaagcgccccaacgcgttgtcgaagaggctggagaggcctgtctctgtctcgtcccggagagacattgataaaaaggttttccagtctaccctggatggcgagaaagctcctccgcgtcgtgctcgcggtagagaggcctcgcgcgggcgcgccacggggagtctgactgaggcctgcgagccgaagaacccagggacggactgtctcctgcctcggatggtggacccgtcagagacatcctcgctgctcgacgtttgattcccgtacaaaagattgtacgcttgccgtacgaggctttggtggtgactctcctccccctgtgccaaggtcacgtctgactccagcaactcggtttcttcgagtgtctcaacgcgcagctctgcatctgcctccgccaagagctgcgaaaacgggccatctttcacgttgtctccactcccttcctggcttgtcgtgtcttgtctgttccgcgccaaaaaggcggtaatctcggccttctgggcgaggacgattgtccccgcggtcgctgcggcgtctgaagccgcacccgggagcggctgaaggaggctgccctcgcaggaggcgaggcgcgaggtctgcgccagcttttcgcctggagtccttcggtcctggccgtatctacacgaagagtgtcttcccgaggcggctgagtcttctctttcgccgccctccctctgcaagtgactcaggaagaccgcggcggtgtcggagacgtcagagacagacgagagtgactggcgaactgggtctttgaaaacaggagacgggtctagtttgcctgaggagacggaagtcagagaactgcgagacgcgccggtccgcgccgccccagctgagaacgaggagacaagagaaccccgctgagaagtggggacagagtcgggtccacgagaaagcgaggtgccttcttcgtgtcttgaagcgccggcgggagtgtagatatcaaagtactcgggagaaggcccggtcccccctgcagcgtcgcagggagccgaaggcgccgcgacagagatcagcgagtgtacgtccgagtcgcgatcgcatgcagggtcttgaagaggctcagaagcgcgaggaagcgaaccagagggagaagcgatactggcgtcgagcgcagacacccggctgctggcgagatggggcgttctctcgcgtgcctctgcggagtctactcgaaacggtggtggtgagagttgagcctctgattcaaaagacgcgcccccctgacaggagtgagcagagggtgaagcgaacgcggagcgtcgcggggaactggaggggctttctgcaggcgaagcaaacgcagcggagctttggcttccaatctgaatcgcttctgacccaggggacatctcttgagctcgaacagaggcagacgaagggtccggcaaagcgtcctgagggtctgcaagttgggacgccgcaaactcgacagctgcggaagcagactctgaggcggcggcgctgtccaacagcgtctcgccggggcaatactcgtggtcggcagtcggtgctccgttgtggtctggaacgacacaagttgccgcggcagcctggaacgaaggctgctcttcatgtgtgttcgactcccagttcttctccacagtgtcgcctgagttgcttcgaataaccccagacggggacggactcgccggctcttgcgaagtggactccgcccctccagcgctgtcgagcgcagcgcccgatcctgagcgctcgttcagcattccagaaaaagaagttaacgcggaggcagaaaacaaccgagaaagaagcgaaagacggtggagagcaggagacctgcctcggagaaagagggtcagctaactcggagttaggcgcaggcgactgggaggagttggagggccgagagacgggtcgaagaagaaactcaacgcagtttgctctcgagaagaggctcgggggctcgtggaaagaatgtgtgtcaacccagaaaagtcactggcgcggatctcgtgccttctttggtgttcccttctgccccccctcccaggtgacggtagtgacccaaaaaagagatgcgcatggaagaccgacactgtcaagcatgctgcaaagggcgggttcatcgtccgggactcggaaacgaaggcgcgcgcggttgagtccaggggtagatgggatgggtctgaaaaaaaatcagcaggggaactctcagagagtcggttgacgcaaagacagtacgctcgtggattctgcgcccgcgtgttttttgactagacaacgcgagagaggtagccacccgggccggtgcacaaacgaaaccctgggaggcgcggtgacgcattcgcagaaaacaggctttctgtcctgcagcatgaacgaaaactgggcaggtggaattgtatgtgaaaagttcctttagcacgtgagcgcggacataaagaaaaagattgcgccgcgcgcgctaggctcacctcccttgattggcgcccaccctccacacgtgcgcggcaacagttaccctcctacgagcgaagacacgcgacagccagaaattttgcgcaggctgcaagacaaaagacaggctggaaaaaaggggtttgggggcgaaggtgctgatgagcgggagcgaacagaggcgagtaagagataaggccaatgcgttgaaaagttgcctcgaaagcagttcctctggaaaccatgtggcatatctgcctacaaccgcgcttctctgcgcactgcaacaagccacctttcgaatggctcacaggttttacacgggtttaccacaagacgaacagcggaaggggaactcaaatgcgctttcttgaagaaataccaacacgaggcgtccacgactctccaaatagccaaaataagcagcatcgggaaactcggaaaatggcgtatcagtctatgacgccattacgaagaaacgattagctgtagggacacctcaccactccgcagcaggcctggcagcgaatcttcgcagggaatgccaaacggaaggattgcagggacgaaaagcagagttgtcttgtccgatgtttatcgagtgtaccttactcgcacgaaaggcagctcgcactctcattgtccgaatgcagggtcccaagtttcacaagtagcacactaagtgtttgggtgcgagaccaagtttcgttattttccgcacagtcgaatatattctggaaatgcaagatagcgggcggtacgggcgtcgaggaataaaacgactactatctgaggagtagcgtagctgtccttagtcacaatccgacaagaggtacctgtttagaagcgatgagtagtgctgggctcctgttgaccagctggttctgtgaaccgtccagcacactgtatctgaatgtatgattatgacgcagacttgtaattcatcttcggacagtgtcgaattcccacctgaatggtggactcctcgtgttagaggcggacggctggtgcaatttgtcggagctttctgcgttgagggaagtttcccggttccaaacgggtaactgatgaagcgggtggctgcttcgacgaccttcgaatccaatacagtctttgtgcgcttggacctacagtacgttgttcaggtgcattcgctgtaatgggaccaagcactgcatccagttccttcttatgtgctgcagcgaactgccatcagaacatccctttctcgcagtcctctctacttcctaaaatctctgtcataccacctctacagcaaagggtattagagttctcatgtgcacaaatattaggctctggaaacacttgtccggtgaattgacgagcgggacgccttcgcgtcacaccgtgttgttgacacattgcttacccagtcacctcttgcgttgcagcgggagcgcacaccattcaagcaagtagataaatagtgtccacgagaaagcatgttagtgtgcggatgtctcagtttttggaaccatgccattttagctactgctttgtgttgcaagtgacaaatcggtggattgccagcaacacacagcgtgattgcatacccatacagatataagttgtcttttagtgtctataaatgtcagcgtgtcgtgcgcaggtgcctcgtttttgttgacaatggcgcacgcacatgcctgttatgcggccagcattaacctcttttcttttagtggtctaaccgacgtgtgcctataaaacatcagcgtgctggttggtagacagtcgtaattctatatgttctttgtgagatgttttacgatgaacgagcatcgcccacgggatctcactatcccttggctctgatacgccaccagctacaagttcacggtggaaaagaagccacaaatttctgttccaccgtccaaaacaccgagtggctctcgaggctgtcctccgtgagaaaaacaatctctctacccgctcaagatttcctcggaaaggtggtgcaaaatggagtggagagtggggcagtcagcaggccgtaaagacgcagcttgtacagattgacgccatatcgacctagaattgtcaatcagaggatgcaggtcgcctcgtaaaatttacctgcttgtgccatcgggaaagagagattattgagaagcgagggactgataaaagcctgcgaaactgttgattgagcgagtgctgtgttgagtttttagcggaagagtcatagtcggcagtctctagaatgagctctcacactcgcaagctatggtttgactctcagctgccaataaaaacgtcaacgagtgggtatctgtttccttgccagttgtacgcaggcatcaccgaga

SEQ ID NO: 840 - DNA, 4289 bp, Toxoplasma gondii
  source 1..4289: mol_type = genomic DNA
gcgaagaagcctcttaacgccagtaacgctcttcgtctcgccatcgacgcaccacaggtggtagcccactaagtagagaacgaagttgaagtcggtccttccgaggcaggcgaacagggacgaaacgagaagcaccatgatgcaggtgacgatgcccccgcggagtgtacgtacacctggtaagtcttcagacgaggcgtcagcgaggcgactgccgagccagcctgcgcggaacgaatgtgggagcgcaggcagcagagtcggaggctgggcttgacgaactgtcgaaatcggtgccgaagacataaaaaagctgcctccgggcatggcactctgggccgggtacgagaaactgccggtcgtcgaaggcgcgagaccagtggacggcaaaccctgagccatgacgtacaccgtgcccggcgcagctgaggcgggacacgcgacatagctcgaaggcattggggcgccggcggaaggcatcaccacagacggacccgttggcggaccgttgctaacaagaacagctggacgcgtaggttcgttcgccgccgaagagacgggagcataatgcgccgcatacggatcggagagttgcgtcgccatggtcaacagagggagagagacgaccttcggggagtcgacggctgtgtctagaggaaagaataagcctaacgtgaacgcactgtcggctcaatcggaaaacatactttcgtgctgcaccggaagctatgcgcctgcgaaacgcgaccgcaagaaaaaggcttagcggaggcttgggagcaagacagatgacagtgccttgaagtacgaggaaagagaagtgactgctgtgcagaggaagcagctttcgagagaggactgaatacagagttaccggggacgaacgacactcagagtatttttgggagggcggctgggcccctacagcccttccaagaggtgcggctgaaaaccatgtgcggagacaaaaccgccctgaagaagttgcgattttgctgtaaggcagaagggatgagtcacggtcgaccaacggcctggaaaggaacagaagaaagtggaaacggccgtcggcggagagtggttgtaaaaagagagcgcgaaaaagcaggggtaacggatccagtttgcttcagtcactgagtcgagtctaacgaagaatcagtgagaaaagcagaggtgggaaaggacgcagtcagtgtcttccgaccgccactcgcgcgcacggcttgaggggttgagtttcccggagaaagcgcttggaacggctgatctacctcgagatatcggtggttttttccaaattccgtccaggaggcagaagcggcaacccagttggggaaaatctgtgcaaatacaagggagaatttcgggcttcgaaccgaggaagcacattgggatacgcgccacctcgccagaacagctaccgtagcaggtgggaggcagagcgggtcgccaccgagctgtgcaagtcactgcaagacaagcgtgagagcaccacaaaaaatcaagtcctgtgctttctggtcacgcattcccagcattcttccgcagcagaaatctacagcggtgggtggaacctcgtataagtgtaagttggctgcataataaccaagggaggagatgaggtcgcaacacatgttgttcccggtgcggcaagacatgccgtggcggacacagcctggcggctctgctcttttcaccactggaggagctggaaacagacgatccgggctctgagttgcctttttttatcggtggcctcgacaaactttgcgaagtccgagaacgctgccgaagggaccttctgtgcagttccgcatggaagcgacaccatttcgtgtcttgcgggagtctaccaagcagtttacccttgcaactgaacaggtgggggtcaccagctgcaatggcgcgaaggtcacctttctccctgagtgaaagagagagctggttcttcagtgttgaatttacaaagcgggggacagctacactgactcaggtgacggctctgagcgccttcaagttggaggttttttgctccgacatctgcagttgttggtgcctccgcttccgatgaaaccacctcgtgtcgctgcaacccttctccgctatgtgttactaaatgctgagcatcatagcagaaaaccattgctgcttagctcagtgaacctcatgtcaagagcgatagcctgacgctgacgtccttcggcaagaagtccggcggtgatctgtagagactcttccaggtgcttaccttacggtttattgcctggcaccgcgccggtagtagtctgtggacttctgcgtaccctgccgtggtacacgaatagtcagtctttttctcaaacctttgataccccttatggggtgttcagcgccaatcaagaacagtgcattagtatcatccaccctgggggtgtccccgactcaaggcccttacggtctgttgtgaaggacctcgggttcgtgccgttgttagcagggttgctggaaccatttaaatgtaagcagaaaatatgtgggactatggcggttgaattcggacagcccaaaggaagttaactatcaaatgtattcagtgtatccttgaaacctgatgcagcttagtcttctatgttgctatcttagtcaactaagcttcaaggggaaagaacttgtcgagagcagtcgtcgtggtaaaagctggtccgactttttgcatggtacttgcctggcgcattttttacgtactttgccagaagaaaaggcttatgtggtagaatcattgtgatggcacctgctgtgtgcatctgacccctcagcttttaccagaagacacgaacggggaacggggtccctgagttcgttatcctgggtgtatgtgtgagactccgggttgcctcgatctcttcgactagagtcccgtcggctgagtttggtcaggtgcagcatcgggggctacgcgaacggcacctagacacgatggaggaggtaactgttcctcgtttcggcccttacaatttcatcggtatagaagagaagttccttttcacgctctctggcatttgcccttccgggtgacacgtcgacaatttgtgggtcgtcgatttctctcatccgtagggaatgtctttcattttttgaggacatgttaccgaggggctaaatgttccgagagatagtctgtcctgtttatccaaacacaaagtttgccaattgcagcaccactggaggcggtcaccgcctttcccgagggaaatcgtgagatatgtatactttcttaacgcgtgcgactgattgtacacgggtttgcttcttgcctccaaatagcactaaagaagcagtctctgtggcgaaaccctgtccaggcatcttgttaaaacagatggcagggacagggccccctccagagatggctagtctcgatcgagcacatactttcgtgctcgtcggagactatataacggagaccgatcacagaagcaaaacggcgtgtgttttgttcatttccagctaggtaccgctgaaacgccccgtgtttttaccgtaacaggacttgccgaccccaatacagctaatatcaacagtcgtaattagtcgggcctgcgaaaattatggtcccagcaccgactggcaaaatgcgcacaatgtgcatgcagcaagaggcaaagctaggttctcgcgtcgagaagttagtattctctcgatgcccagcgtccacactttgttacgcacatttcactggaacgagagacagtggcaccaaaacatacggtgcatcgcgcactgacgagcacgtgcggtttctacagggatgtaaaaagctgccgcgacaatgtaaggaggagttggagatctcttcgagcattgcatttcactgctgatcaaggcgggaccacggggtttcgagcacccggttccccctgtctcggaagatgccactctatgggccgcaaacccttcttacgatcctggctttatttcctgctcctgtttgtgtctctcatccaagagaggtacagtatcaagcctcattaaagtatgaacaggcgaagcaatcgatcacatagattgagggcgtggtattccataggcaagaacaacttttttctcttgaggcgacaaacgcacccgagacgcgctagcgccccctcgtccgcgtaaaggcgtgtttacatgcgcgtagcactgcgcgggtacaggcagttgggggcaccagtttccacaggggttctttcaccagcgtcgctgaatatggttctgtattgagacttatttgcctgcaagatgctaagtttcacccgaaagaaata

SEQ ID NO: 841 - DNA, 1455 bp, Toxoplasma gondii
  source 1..1455: mol_type = genomic DNA
ctcctcctccaaatggacgtggtggagaacaggcaatccatggccttcagcggcctcgcgaactgcgaaagctgggtaccgggcggcgagatctgtcggaaggttggagacgagaaagacgtccaagccactgcatttctccactttcaagtgatgcgactgtttgcccacaaaacctggcgccgccgtcaaggtcgaagccgcgagacttcgaggcacctggacggcatgcccgggagagcgaggagagaaaggagagggaggagaagagagagaagaaagccgatcaggaagcgagggggcaggagaggaaagacgtccatttatgtgggcatagtttgccttgaaagccgactcaagagcctgtagcacatcgcttccaccgggaggtggtggagcctccagagggccatttggaagatggtgctcaggcaatggagacgaagagagagaagaaggagaagagagagaagaaggagaagagagagaagaaggagagagagaagaaggagaagagatagaaggaacgggatgtgggacaggagaagaagaaacggcggagcacgacagtagagtcaagagacagatggagagccagcagaagatcgcaggcaagcttcgagacaactgacgagcgtttttcaacgggagagacaaagaccgacggcagagagacgacctcgagcgagactgggacgatgacggaagagacgacaaagggaggagcaagtcaacctcggagggtccagactcgcgagagcgaggccgcgtgacacgcagatgcgagagattcttcccccctgcctccatcttcggtagccgtcgaggagagagggagagaggccaagaaaaggaaaaacatgcgttcgagacaagtcggctggacaaagagacctcccggacctctcgcgctcacgcaagaacggcggagcgcctcgaaagcactcttgaaggaaatttgagcggaaactgaacaggagcgagagtcctggaaagcactggtgacaaagactaaggcctagaccaaggcgagggggggagaagacacaggcgaagaaagagaagcagggaaaagaaaagagcgacgcggacagcgaagaagactcgggggcgattgccggcgacgctctctcgaagtcgcatgcctttttgttcgtggaaaaacaaacgagtcttgaaaccacctatatctgttcgcgcgaaggtcgcaaggaacgtccgggtatctaaaaccttctggactagaaaaaagaaaggagacgaaaaggagaagagacaaagaaaaacaaaagcgtcagcttcaccatcctccccccttggcgagtgacctcgagagtaatcaccttgcagcgtttcggatttcgcgagcccttgtcaagtcgaggcgacaagaaagcagtctaacgaagcgaacaaagagtccgttgttcgtcaaaactgtggcgcgcagccaaa

SEQ ID NO: 842 - DNA, 4217 bp, Toxoplasma gondii
  source 1..4217: mol_type = genomic DNA
gggtttaaactgccttcagattgttttactcgtaggctgtcaacattgttcgttccgttactgccacctcgacttgttacctgcttgcactctttgaggaatgacttccgagtgactgggttcgtggcgcttgctcaaaaacctttccccaagcgctcaccgagcttgagcgcggacgtttcagcggttgatttgttgttcttgtgtcgtgcactgaggaacgaccataatttgccagtgagaaagcctgagtcatttggcatgtcacacgtggtggcagcacacctgggactttactagtgtgggtgacagcagaggtttcatgcgacttgcttagtgagcaaggtggaagaaacatacacacaaagtgtcttttcactcatgaattgaaggattgacggcctctgaagtactacggggttatacccaagaaaatgagagagctgagtaatattacaggatactgtagcactatggcgttcttaggcgacatgcgaaagacgcagaaagcgcatgatacttgtagttgttgttacaccggcaatcgaaacatgtgtgtcttcgatatcacgaggaactcgatgcgcttggcgcatcagtggatgcacctttgaaagacgatcacgaagtgtaagtcatccgttgggcgcaggagtcttggagtttacgcgcagtcatgtgttgatcaacgtgcatttggttccgtcgagacccggaaacttacgactgtagctgaagatcctagcgtctggtttcgtcctatctttatgagaataggaatgtatccgtatgcgtagtggtgatgattctgtaggcttgtggtcgtcatcttcttctctgttactgtcctagataagaaactaagtttagttatggtgggagattatttcgtacatttggatcacacgcttcccgagaggttctgaggacttcagtgctgtctcgaatcttccgctactcagacaggcggagtaacatggatgcactgttgctgtgtgcgcaagaggcactgtcgtgcgtgcaacaggacttgcaatgacacaaatacctaaagaatctagaacaaacctactctacgtgtccaaggttacaagcctaataacagcggcattcgcatgggcacgagacaatacagaagtgaaagttgcctgacatataagtgccagtgtaatgcgagctttctagttccctgcttccgacagatacgcaagcaaacacttgcgcgtgatccgcgtatctaagcatgctccaaagtatcgcttgatttcggcctcgaattttgatgagggaaaccggtggtcccttcccttgaaccgtgtgcccggtcgacgagatttacgtggtcatcgtacgtgggagcgctccacgaacaggacagatcttcgctcgatgtccccatcgcctttgtttcacatgcgtttgcctaggtttgccggacctctggtgtctctcacgctgaagaatctgttctcgtgactaagatacatcaaagaacgcagcgctgaatgcaaggacgctgcggactttgcgaccatattttttcaacctctggtccctatccagcagcgggtttctttagtcccgacgtgcaacagcgaggcgtgtgctgtgtggggcttcatggaaatgtcaaccgcccggtgtcaaaaatcaactgcggaagcgatctgatatgtggtgcgtcgctttcacgaaaaatttaggccttaagaaacaggagggttaagggggtctggtggtttgaaacgaatagttcagctcgtctggaaacaactcggtaatagcttccggtctaggttcttgtacctgtgttccggctcgttgctacacacgaacagtcctccataaaccgataacaaacaacgggttttacatgagcatcttcttcagttcgtcatagaagaccaacacgagggcaccgccagcgccacgcaacacgttcgcccacgcgcccttgaagaagcccttgaatccttcctgctgatagaccttcttccagcagtctgcagtgcccgtgtactggatttcctgctcacccttcttgcggccagccatcatcatcattcttcttcgaacagtgtcgaaggggtaggacgcaacaccggcggcagcagtgacggtctgagcaactgcccacttgtagaagaggtttgcatcgttgttgggaccgaagagcatcgccttcgcggtatcgaacagaccgaagtaggcaccgcggtacacgatgatgccctgaacagagactccgaagccttggtagagggagaagaacccggtgcgacggaagattttgccgaggcagtcgaccagtcctgtaaattcacgttcgttgcccttgccgacgtcagaggccagacgagttcgagcaaagtcaagaggatatacaataaccaacgaggaagcaccggccagaccgccagaggcgacgttcgtgcaaaaaaacttccagaattcttttttctggtcatatctggggaacatgcgcttgaaagtgtccttgaaggcaaagttgaacgcctgagtagggaaatatctgattacatttgccatgttcccacgccacagagacgcaacgccctgctcagcagacacacgacggaagcagtcgacgataccagtgtatcgtggaatcttcccctccttgatttcggggatggagtcctgcgtctgaatcagcatcttcacacgctcgattggagccacaattgtctttgatacacccgcggaaattcctcctgcgaggaaatccttcgcggtattcatgagctgactatccgcatttcccttcttctccttcccccccgcagagaccgtcggcgccgccattgttcctggttcgcgaaaatgaaaatgcacagcaaaggggaacccgctttcctacggaaagatcgctgctttaacacggacagaacgcctgccttgctgtacacagggacgaagagacaggcgacaacacacaggaaggcggcccttctctcttcgaacgacttgcgtatagacacttccggagtttttgatcgaaggcgaaaaaacaggaagaagacgcagtgacgcagcgacagacgaaccgtcgcagtggacgcctttagaaacgcgaggaagcaagagtagggaaacacggtaatgacgccgccctcaaccccttgcggaggaacgacgggaccaacatggggaacttcctacggtggtgtggacgattttcgggcaaaatgtctccagtacccggtctctagtgcggtgacgacgccgcgcgcttatgtaagccggggggaggggttgctcacgaacgcccattctgtgggtttctacctacaaagcggaagaacacaccaccctgtacagatcaggcaccactgcggtctacagttgtgtgtttgcctcgcccgtccctgcccgaaaattagccgcatctctctgggtgtgcggcgcagcacctctgctcgcatgcacgtcctgtcttctctggcgttaccccacaattttctgtcttgccgcgtcagcgttttcgctcttcaagactctacgatcaggagaacggacctctgatagtttgactccaaaacaagtagctcctctaactttcgtaggggtacaattggaggattgtcttcgaaggaagtgccgaacactgcacgcgctaatggaaatatgtgactctcggcttttccaaacgtctgcacaccgtcgcgcagatgtccagctccgatggacgtaccagccagggcagttcccgagcgtaagcggcaagcggttctctctgcggaccgccaggacattgacgcttccgaatatccttatcaaaccttgttttccctgtgaaaaagggcagaacccggggttaactcgcggttcttgccacgaaactaccgatcgaccttcagtggaacgatgacgcgtcctttaactccgtacatcttgtgtccacgccttgtcagtgcaggcctcgctggaagtcgcctgccacggagctgtcttccttggctcttcggcagctttcccagcgaccgtggtacaaccacgtaggcggaaatcaagtgcatctcgagcgactccgtcattctttcgaacgcctacaaagccggctgccacacccatccggagttgccgccgtagatagcggtacttcgaagtgagaaatgtggaacagcgggcaaaggtggtaagcccaacgaccaagctcttcacctgaggtgcaggttcaacgtctttcctcagca

SEQ ID NO: 843 - DNA, 2594 bp, Toxoplasma gondii
  source 1..2594: mol_type = genomic DNA
actccgttagtaaggagcatcctgtatacgccaccagacaggcaacagcgtaggagggcgcactggaacgtcgagtttaccgtcgagtttaccgtcgagtttacggactccaccctccggcgttcttttgactcactccgttgatgttcggacctgtcgcgaaagacgccagcctgtcggggactgagtcctccagaggctcttcctgcttttgctccacagcttgtcgcaggtgcgccgtcgcgattgccttcatcgacacctgcggatgaggcacagagtcgaggaagtatttggactcctggcgtctggggaaactcttgtatctggagtctaggcgctcgggggctcctcgagcattgtcgggactcagtgggtcctctgtcgacgacgacgcactgttctgcacttcgggagctccttcgacgcagcgacccgaaggggcagagaacagggaggacggagactcggaggcagcagagacagagagagacggcgaagacgacagaagtccttgctccggcgaagcctccagcgcggagacagggccgacgagtggggactcggcttccgccatctggtcctcgcaagcccgtgagaccagcaaccgcgaagctgggtgagaaggaggcggctggagggcgcgcctcggccgtgtctacctacggaggcagacgcggcaggggaggcagcgagagcgcaggcgaggaacgaagctggggcaacttccgcggcaacgcgaggctcaggaacggcgaagaggcgcgcgtgcttagcgagcaaaggtgcaaagtaaccttaatgtggtaaacaaactgtgggagatctaaaccgggaggtgaactcgtgactctctgagagaggaggcgacaccgtgggcgacgggttgcttaagactcgtagagtcttgaatacgggcagcagagtctcctgtaagtaccaccgatttgaaggtgtttctacgagaccacgaagaactactgcgaaacgacagagaaacatgccgcagaaacgagaaacacggcagggaaaaagcccaccgagaatggggaaccgaacgcacaattcgaagcaggggagacgacgatacagcagggtcaccaaagtatccagtgaagcattgcaagaattcggatacctggagagaggcttaccgaagaaacacgcagccaaaaagagtggtgcccgcgagcgctgttggcgtgaagataccgcggtaagcgaggcgccaaatgggctcagcaccgggcaaggaatggatcacgcaataaagacgctgaagaggactgaagataccggagaaaagaggagcaacggcggttacagggaggctgcagagtagacgcaggcagagcccaggaaatttttgcacagagtctgctgcgagcaatgcggaaacaagacgctgagactacagtcgctggcgccgaagagcgacagctgcagacttcgcggcagaggattcgctcgccgcatctgaatgccggcgcctacgttagcgaggttacaagaagcgtcgacagcaattccagtgtacagaagtctcttgtttctgtccggaatttgtgtcgggcaacagtcggggcctgtgagcagtcgccaacactgtgtgagcgttatgctttgaggcagctcaagattccacactagttcccgctgtagctaagagaaggccactgttgattatcattgcgtgcgcgagctgggagtgtttccctgtcgcgttcgtgagctccgtctgtcgcatctaagtgggcaacgaccgcggcgagtagatcgcagcaacagacccggctacgaggagccgccggcacacttgaagaagtgtctatccgtgaaaagcccagagacgcccttctttcgaccgaggcacgagaaaaaaagaccttgcgtgagatgttgcccgcgggaaaattccacgcaactcccgcgtatttcgacatgtgaacggattctgatccccgagagtcgagtattatccatacataccaggcgtaaaaagcgttcatccagttactcaacaggtgccaggccaacaagaatccggttagtgcagaaactttcgagacggtaactgcgttcgacacgaccgtgcggaaacgctgacaatgcctggagaggcgaaaacacgaagcgactcggaaagccgaaaaacttgtgcagtccaattttgcaatgacctgtcgcccagctcaccgagctgctcattgtccggcgattgttgaccaattctcgcggcgttcgatggtactgcccgtgcctgcatgcgcctgcaagtgcgaaggaaaagggaagagtccgcaactttcagcgagtgattttgcttcgtgtatagctccagaaccaattcgggcagcgctctcgaaaacctgccttctctttgaggttcaggaggattccctcacagttgcatacgaggtcgtcctgagttgtggctagcctttccgcggagccccctcagacaatagtgtgctgctaagccgccaacaagagtgaggcccaaaacttgccgcgtacaagacatccaattgctatcgagacggagcagccttgttcctctgcacaaagtggagacaaaactttggaaagggaca

SEQ ID NO: 844 - DNA, 1665 bp, Toxoplasma gondii
  source 1..1665: mol_type = genomic DNA
agtattttgaccacgctgcaccatcgtactaaataagatgtcaatgtcgcggaaacgcctgcaccggccggaatgcaccgcaccgcaacaaatggtgcaaactccactttactacttcggaaacctgtatccactggcgcagaatttcttgagcagacgcgtttttaaacattagcgtttctgtgacagcaggtgcatagaaattttctgaccgagcgaaagacgttgactgcaaacagacttctgggttggtcagtatcgtctgaggcgaactgacagggcgcgctcaacaaatccgttttgtttttcggcacttggacaaatcaagaaatgaatttctgctcttccgtgcgtcgaaacgagttcctgtcaagttcagcatacaccacacgcaacttagaaggcagcgggaactcgcatcaccatgcagtagatatggccgaattccgccacgccttgaggtgacggaactaccaaatgcagactgctagcactgcccctttcttcttcaaaaagtgttgaataggtagttcatgccttgatgacaaggagcgagagtcacttttttctttatgatgctactacctgcataagtttttgtccattaaagctttagttgtcccgagtaacggacggtctctccgaggcgtctactgtccagcactcccagcggcggccgacgaccttgcgaagtgctgtctttacagtggtgggagcaaagtccagaaactgtccgtagcatgaacaaacttaatccgtgagggcatgtcgtgacgcatgtgtgcatcagcaggagaaccatagatcagtaactcgttagctggtatatcccagcacacagtatctacaaagattgagaggcacatgcagcaaaccggttttcttcgacgaaagaataacccactttcctcgacaattccactagtttcccccccagaatctgtaacaatgcgactggcacgcgattatggagttgctgtgtgccctataaacacgtggttgtgcgaagtcgcagcggggaaggacttccccgactactgtgttcatcagtggcacagagaaaacctggtgcaagtatggcagaaaaaaatggacccaacgcactatgttggtcgttgcagatttaaaaaggcacacaaacactgcagaggatcacgtgaacgtgccaggttgacacagttggcgtccaggaaactgtgactgcatgcagatctcgcatgcaccgaactccctcgattactttttcctataaaaagggagtcatgcgagacacgttccagtaagcccagcactgagcttccctgttctcacgaccaccataaacgtgtcgtataattaaactatgcggtgtcgccaaaagctgaaccgcccttgtcgagaactttcgctttcgtagtgtgtttcacctcgtttgtcgatcctgtaaccgtggcatgcacaccgtctatcattttcacttttcggtctagctccagcgtctcgatgtgcgtatcactttggacaccgacaggagatacatcgaatatctttaagttcgtctgcgtccctgctctcctggaatagacaggaacgcgactgtaggtaactggcccatgctccaggggtcgtttgttgaaccagcagtttctctgtgttacttcagcgcagctgtttgagtcctcaaaa

SEQ ID NO: 845 - DNA, 3990 bp, Toxoplasma gondii
  source 1..3990: mol_type = genomic DNA
tttgtacactgtgcacaactgtacgaccatgtagtgtaaaacgaaaccggaaacgttctctccaaagaggaactgcgtgcggttgatgttacgcgcttcaccgctttaagcgtgtcacaaattaatgtgcatgttaatgactctaatgaaccttccctgagtatcttcgtgatacaccttccatatcaaatgcctatagcggcactgatactcagttttgtgcctgaggtcgcggcaacaacgtgatctcttgcaatcgacagtggccccaaggtgttcagcgagtcaactatgttacggagaaactctaaaggcagttgccggatgaaccccccttgctggacctacgaagtagttccttccgaaactgaagcgtgtgtctagcaattatcgaggcacatcgtgaccctcgctttaaatgtggaacgtcggcctcattctgcccaccactcaccacagaaaacgtttatgcccagtagagcagatgttcagtctgtttcctttccctggacaaataagttgagaaagggtcgtccttggcctcggggttggcccgggtctacgggaaggggaggtcgaggagacgacaaggggagagctcgaccgagatgagaaaggacgagtggaggcgatgaaagggatatttcgtgtgggggtatcagctgcttcatctcttctgtcgttgcttgcatggtctccagcgcggcccttgggtagcgctgctccaagtgagcaggaacgacgaaacgttggggtttcgggttattgggaggttgtgatctgtatcagagcacacaaaatcacagaagctggcggcagctcatgaagcgaatagtcgagagtagaagtgtggaagagcttcaattaccggtccaggattttgatcaagtagaaaaactggcacggtgcatatggctaaggtctaaccactcgccacgaagccagcagcagtgcagtgcagtgccgtgaaaacgaactctagtcactgaagctgcagcgtggaccggtactgaaacgatgttttgtcttgagcgtcaaagcatatcagctctgtaaacgtcggcattggtttaatgagcacagttgtggctcggagctacaaattaaatgtaaggctagaaccgtcgcgtgaccgtttgcttcgcgtcaagggaatccgaagtggatctgacaagcaaggcggcgtgcttggggcgcgtaacataatatcagaacactggtatcaggtcttctcgagacgcacgtggaaactgatagtaggtggatgagtctggtggtcgaaaagctgggttggcatgaaatataacatgcaagacttggggggtattcatcggcggcaagcggcctttctcttcctcagcaggcccttccttatttgaccctagaaaattctctaccatgagcgccgcgggttcgtattcaagaggaccacgactacgagaggaacacgaagacgagccggcctcgtccacatcaccatgatctctactcctgggaggtggagcacggggacggcttgttagcgggatggcttccggcttttcactttcttggccattccctcgtccaaaacggggacgtgcgcaagaggctagcgtaggcgaaacaccataacagaagatttcgtattacaccaccactcaacatagaagtgctgaaaaggcagatgcccctattctcatgttgtcgattttaatgtcctcctgtgttaaaaaagaatcacttgtcagaaaagatgaaacgaatccagcttttttgcaaatacgtaggtcagcccgtgtccgttcctgcaggaacaagacaagactcaatgtggcgagagacacgttgccagctctcagcactaccgccctgggcacacggtccgtcagcagacacgcgatcacatcggatcatcattgaagtgaatctaactgatcgtagcttgagggtcatatggctgatgtttttcgacgacagcgggcccgcattcttgtgaagaatgataggcatctgggcgtgctgactggctggttgagtcgcagcatcctgacaccagatttcaccataaaggcgtgctgcaaacagcaggaagccgttctgtggtggtttcccaagacctacgaattttgaaactcgtcacaagctctaatgtatacgcccgttgtgcattagtagttcggccacaaaccctctgacctttcttgtatccctatccgctaattcgttcgaggactacatcgtggcgcaggtagccgttccaactatgggctctggataaagcattagtcatgttgtactcgtcgaaaacagccttagaggtacgtcaagtgttgtccggagggagcggaagctcacacgtggtacacgtacctctttggccaccgtcaagtgaatctgatcactataggcagaggtatgacgcatcttttcgtcgtatgtagacacggaggcagcgtatctcccagtgtcaggctccgcttgagctgctggcaacgcgtgcggtaatctctagaggtggatagtcaatgttcgttctctgcaggcgtaacgtcttcaggcgagccacccaactttctgtttgatagaattcttagaatggtaatgacgatgggcaaaaacaccgtatcaatttccaggtcgcctgctattttggcgcgtcgatcacaaggagtctcgttgttagtagacatgaaccacccttcgcgaaatgagcaaccatggggtttccagatggtgcgacaaccgtgagacaacaccaggaagcctcttccctgcattcttcagtttgtctcggttgtcatcacgcgtgtgtgttcgccgcaagcagggaactggcattgggatcggacgctatcaatagctaaacaaccaggtaaagtaaagcctttgtacgtttttctatgacacgtgtactttgtattgcagtgcttgtgatacagggttcaaggcgaatctggtgtgagcttggggcggttgaagtagacgatgggaagagcagcaatattttcagtcattcatttgtgtttgtcagtgccttattttcggttggacgtattatatgaaaacctcgagaagacgatttgcagggtatcaaagccaatgttagacgcgtattctactcggaacacgcactcctacggggggaggaagtggtcaaacacacttgtggacacagacacaaaagcagtaggtcgcctgacatatcgatgaccaatattaagtttgtggttacccgctttataagcaaacatgtgagacactccccacctccctaatccaatgatggaaactaacgcccttgcggggggcaactgtttgccaaacacactatataaaagtaactctttctgtgcatggaatacctcatttccgacggtgtcgtcaacacaacaacagttgtcttttaatgagctctagcaatgcactgggaaccagagtaatgggcagaggacaactagaccctctctttctgtcgccggaagtgtgcctgcaattgttgttgtcgccacggcgcagtccttcagcacagatttcaagtggtttgccgacaacggatgctgccgtaagtgatgaaatagtcactgttgacatgacagtgacacgccaatatttgaaagagcagaacgagttacgatagaggactcggaacgaattacatcggctcccatgccgtactccactggccatccggtacggcgcttccggttgcctaatgcgtgtaggctgaaacagaggacaactcgtagcaagctgttcggtatcgatggaagatacctttcacttgaacgtctccgcgtgtgacacggttggagaccgctgaaaaaattagcgcatgcgtttctgtcgtattaggagtacgtacagtccgcaaacaatctgataaaatgaagtgaatgcccggcgccggagagtaattaagctgagttacctgacagacgaaacgcctatatgttgaagagataatctactgggaaagaaattcggttcttcactacttaccaaatataa

SEQ ID NO: 846 - DNA, 1501 bp, Toxoplasma gondii
  source 1..1501: mol_type = genomic DNA
tacggtgttaaatgacacactttgaagcaagcttgcgctaccaagatcctttcagtgacaatgattcgccatatggtacccctggaaagatacgtgcaatccatgggcacacatggagcactccgtgacggcatggaagttgtgcaacctctcgaagcagtcgtgtacgaaaagaaactgtgatcatacacattttcaattacacgctgtccttcctgtcgcatgccggattgactctttaagctcacgcaaggggctgaaccccccgccagaagatagtcaggttccatcaccgggaacaggcgcattctggcctagtcacagtccctaccaccgcgttaacacttgtactctcctctccgtttctagtaggactttttctgttcataccttttctgttctagaggatgacacatcagaaactgagaaagtagtcgcatcttttcgttacgagagtgccgcctacaagctggcaggttcgacgggtggcttcggtcacaagtcacgacactctacaccaccacgttggatttcatcgcttgatgaacttcatctctgccacgacttgtgtgagattctgttggcacaatcctgcacaaaaggtagtataaatatctccacagctttgtaacagtggccaagcatcctaggcattgtcgttcctctcgagttcatctatgcaatggagctagctcggacaataacaaaaatgtatgtacctcgaaaatggcgcacacagttgggcgtgcactcattcattgagcattcggtcgtgagaatacaaataccagactgaccatctacacttctggcagtattttcagcacttgacgttcagttgcatgtaccccggcgccgtggcagaaacagaaacgatttaccaacactccagctcacctgagtgaaacacgcactttacaaccaaacaattcgttgagaaaaacgactgagcaatattcgaggactcaaacgaatggcattccccggctgaagtctccgcaagactctaggaccgctgcacaccgagtggtgaccttgccactgcatgcgtttttgtcaccgatgttcgacatcgaccccgctgaaatcgatcgaaaggctctttcctgtttggtattatttgacagcttgtgcgacccttgttgtaatcgacggtacaaggtaggaagcataaattcttgtcaattgctcgagttacgatcttgtttctgaacagcactgctgggtggaggcagtgactgttcgaaagccgatcgttttcatgtctacgtgatgcgactaagtagccattgtactgaagaatgaaaaggaaatcgacagttctggggctagtatgtggatggatctaaatggactgcgtccttcggagggcgggtagtaagcatatttcccccgaggcgcgaatgccgacgtacacacgcgttcgctgccttttgaatgccatcactcttttcccgaagcagacgtgtgcagagtaatgtctaacttcgagtaacgatta

SEQ ID NO: 847 - DNA, 2249 bp, Toxoplasma gondii
  source 1..2249: mol_type = genomic DNA
taatcttgaatattcacccgctcttcgcgcaagactgggagtagtgctagctggttgcccccccacccgccgaatgccttcgtagacatcatggcccgcgacctcacagcaaggaggacgggttccactacgtttggagaagaacttttgagagcggcaagaggttacgctcaagacgatgtttctgcgacatatgtggcagagcgggacattcgtcgccgaagacggcgacgggttactgtcagacggcagcgaacatgttgctccaattctggaaatacttgttccacgttgtgtgatgctgcagtggaataagctttggcttattcgcacaggaagctggtctattctgctgcagcgacatgtcagcaaaggctgagctcgctggatcaacagctccatgagaacgaacaggttctcctcattagaatttgagaacagacgtgctcgctggagttactgaatccaaggttgttcgatcgcaaatgaggagatgcacgaaggtatcacaacaaaaagcgaggtcagcaccggcaacggaattccgactgtgaaaaccccccacaggttccagacggcagcgttgacttctcatacaacgtagtcgcacctttgaaaaactgggagaaaggaatcggagcaaagaatacaggctagtcctgtcggcaaatgctcacgatcgggaggcaaactgctccctgcggtcgtatttggagcagcgtcgttgaatcgtccttggtaagcgtcgatgctaccggcacagcaccactgacgaagtatcaagcgtccctcagtgattagctccgtcacaaattccactgttgagaggattcatacaggaagaactgttgaacagagttgctgtgcaaaaagtgagtagtcgtcgtacacaatggggaagacgaagaaagacaaaccacaccgaggggacagggattagaaggcatcgacactgcgactagtctgcacaactacacgacagtcagcccggtcaataaaaagatgaatcggcatctcatgagcataatcacacaagaaaactcatggttattaagtctcgaaggagcatatggcgactcacatgtcttgaagtcaggaagaccaactgagcctgcatgcacgggaaatgtggcatgctgacgacgtccgtgaatgactccgttggggttctcgtaggctttccgcttcttgtgtggacactgcaattgcgtataggcagttgttcaccacgggatcatttgtagctgaaccgttccatagtctacactgggaatttgtgtgatagatttttagaactccttgcctgctgcggcccactgtcaaatagctcgccctgttgaggagaacccacgccagcccgccacactgtgacgtcttgtgctggaatgtgtgtggtgtgatagaccttcactgtctcggaaagacctcgttgagagtgtgcgtgcggttacttgtcaccgcaaaaagatgtgcctcagtcaagtagtgagaatcactgcggctatgtctttcgaggcagttaggcttttatgttcccgtagccccgggatatcgtcgacgggttcgaaccaaggtcgcctcgatgagcgacctaccattctcacgtgtagatgtggcgacagtcgcaagtaaatcgcttacatttctggtaaagttcatcagtctttcctggcattcaggtcactatttgaggtgattgcttcccgggttgcatgcggccgtaattcggagggatccaggcttggcacaccggcaggggatgacggctgctggcgcagcagaagacggtgaccactgcggccgccggagcccccgtttgtgtttcgcttatgcaaagtcgccatttctggctaatgcgaaggccaaatcaatatattttcaggtgtatttccaacacaaacgaagacgtgattatagcacggtgtgtgcaacaagtgaagccgtattcacggttctgtgtcgctttgcgccacaagcttcggcaaatcttagtactcacgttccgccacacacagttccttgcgtcactgaaactgtggccgacctccaatgtgtctttgtgttcattccaaagtaactagacacatctctacctttttcctgagcagcttgggcatgtccatatctgtcggctttcctgaaatctgcagccagtgtgtgtgtgtgtggtccgcgaaactccgaggctggtgccatacaactctcgctccagtgccgccacaccgaggaatcctgtaggacacgtcgaa

SEQ ID NO: 848 - DNA, 2715 bp, Toxoplasma gondii
  source 1..2715: mol_type = genomic DNA
agcaaggaatataggatacgattccagcgtattctgcagaacatagaacataggtgaaagcaaaccagagattcagctgcacaaggcggggaaaatcaagtgtcaccgtgtttctaacctcgtatttgcgcttaccagatgggcccgctgatagcaattgaacacttcacactcctgatcggacaacctcagaagcatgacgtcagcatcgccggagaaccgtgtacggcctgttattcctgcaagaagttatcgcagcatcattagtcccgttttcaacagttgcgacatcgtataagcagagtatttacaacggcaacaaatgcagcattcttacctttgatggcgtagacgtcggggcactctatgccgaagcgccgccgagcccgtgtcacgttgatagtgaggtacgcttgtaaagctagagccaaaatcacgtcagctacaacccagccgtacactgcaaagcacaacatcgcgcaaaccagataaggtggagatcgcaggaccgtccagaaacgagaatttctattcgaaacctatataagaataatctgtaccgacgcacttgcggtacgcactgttcgatggcttactggctccgggtccggcattctcgctcgccaagcaatcaaatatgcgacgcgaacctggggaattcgggcatgcacggcaacagcagttttgctccccagtggctgcagcaccgaggcaatgttcttctctctcaatgcaacacactggttcatggtagtagtcctttgaatgtatgccctcacttcagtatcgttatcgagctacgtcacaaatttgcacgtagagtggggaggtatattcggagagtggtgcctcaaaacgtgggacatcatacttacccattctctcatcccactgtgaagaggcggtagtgtgtgcgcgccgtaaacagagccccacgaatccagctgagcatgaacacggtcctcacaaacggtacggtggagaggacgtcaagccacattcgtacgacgggagggttgcactggcgggtctcgctttcgtcttgcaacggtggtcaatttggcggaaacgtttacgctatttgtttgcatcaacgacacagccggcccgagctaataagctgttgtagacgggcgtaagctcggaactcctgttgtttctccggaagactgtggtacgtcactgtgctgtaggctgccggcgatccgatttcccacttattgtcacctcaccggcgcttgtcgcggttgaggcctgaaaccgacaccagcaggcattcccgccagctgcttcgaaagagccgcctttgattatgaagtcgcaactcacgccagcacgatcagcgcgtggcttgctaatgtctcaaacaggcctactatggcgcctgcaatcagagataccttatccaagaaccagcaagacattttctcctgaatcactaaccctcgtttcggctgatgaggagaagcgatgcaagtgttcctgcaagcgacagccgtattcccaagtcgcccgcgcaaagttgagctttatgcgtggcatgaaaaattaggctgtcggtggcggtaaccactcgcaggacacggaagctacttccggatttttcttgcggcagtgcttggtggacacagaagaaaatgtttctttatgcaagacaactgcagagaagagatcatgaagaatgccttttagtgagacagcagtgcttcttgcctgcatgggttgcctgtcccaccgacagtggacgacgccgtggtatcgattctcacagaacctacggcagctggctggcttttcaatgaccacgtgcaagcctagccgtgccgcacacgagaaactgactccacctgcgaggaaacctttgctggcaactacttaccgtttcctttgcatttttgtgcaagcaactgtgcagaaacgggttttgttctgttgaagtggccgagtcactggacgggggcgatgtttggttgacgtcgactgttcgggtgttagccaaccgcgttggcgagggatcgcgactccgtcgttgttgattccaacgaaaagactgaatccgggatttatcaagaaggcaccgccgtgaaccgttgcactgtgccgtccaataaggtgtgaatgcagttttttatggaaacatgcgcatcatctgtgtggcgcgcctatatcgccgaggggcggtgccgtgcgcacgcagacatccttttgtttgatgatgctcgacgttgtgttagagaaccaggtcgtcacggcgactgatgcccgctaagctcccatattgtcctttccgacttatctgtaatccatagttagttcaggctccgcgacactgcaacgggggctgcctatcgtcttcggaatgcatcagcgtgtcccatcgtcccctaatgtccggcggaagcttcaatcagggaattcccaaccttttcaatctgaatcttgtcaacagagggaagcaaaccgttcatatcatttcgctggcattttcctcaccggctgtttcgtcaggtcactccatcgaccacactatgcaagagaagtagtaccgagcggaagcacagcgcgtttatgaattgtgcagtaactgttttgtaaagtgtttttccatcgaacgtgtagtccgcgaccgaaactagcacgtgcatatgctgttgacggcagtggacgcccgacgttgcactccttagtctgcgcatcaagccttcgacagcccaa

SEQ ID NO: 849 - DNA, 2806 bp, Toxoplasma gondii
  source 1..2806: mol_type = genomic DNA
aaagaccttccgtgcaagctccggatagtgggcgtctttcggcgagactcgcgggaaaaagggcaagcaaacgggctgcttgcagagctccacgaggacctcgtgcatccaacagacccagggcgaggggacccacgactgctctttcaagctcccgcgcttggacgcctcctgcgagacaggcgaagagtgagacgcagagtgagaggaactgtctgccggcgcactcgcagaagacgggcccacagaggcagcggtggcggagcgcgaagaacgctgaggacggcccgaagcactcaactcagtcggttcgagcttcagacccgcactctcgagaaggccagacagcgcgctaaatccgcgccgagacgacgtcccggcgcccttgcgagaccgcttcccgcctccctggccacgcgcagcttcggcagcaatcggctggagacgccactgcggccgagaggcttttccaccgtcgatttcagaagctttcttcgcccactctgcgatgaactgctcctcgatcgcccgcgcctccgcctcagtgagaaacagctcgcctcgcgtgcagtcgaacccatggacagcgccatccagacggacggcagtggatgaccgagcagctaacgcaggcagcgaggaacgaggaagggcaggcgccacggacgagtcaggcgctgtttgagaatccccagtgcaactcgcagccgaggaagtagcttccggagaaaaagtgccggcaaccgccggcgcggaaaaagaactgggtacagttgaagcgtcctccgggctcgcaagcgccgttgacccctctgtatgtacactggaaccagccgcgggggcgctcgccgacgaagtagcttctgcccctgacgacggggccgactcagtcggcaaagggattggttgctccattctatcggaacgacaagcgtgcagctcacaacatcaactagttgtgtgtagagacgtaaatctgcatacggtggagaaaaggtggaaaccctctgagtatcggtcgtgagaacgcctccacccctggtgaaatcacatgcagcggggtctcaagcgcaaaaagaacgacagaagcaacgatgaagtcaccggcgcctctcttgcggagggccttatcttgactaacaaatgcgtactgtcctaggtaaatagagagtccatcccttatttgcctccgttttgcctcgcgaagccactttgtttgccgacggttgagctgcagagaagagacgaggcagctgttttgagaaacaacgctcgaaacacacaaatgcagtctcggaaaactctgaaatgcgagctacggtacgaggctccgaatgtgatgaagccagaagcttgattctgaaactcgcatgagagctatgtcatggaaaataggtagccggcgtgtcacttcttcggttgtcgtcgagatacttcatatcctacgccgcatcacgccctctttcccctgcaaacaaagtatgacaaattttggaagggattgtccgcactttcccccgacgaacattcgcgccctgaattacgcgctgtcctgctccagtttccgccgggaagtgaggtgtatggttcagaaaaacagagcgtccatccacagaaaggaaccgtcccttcatcacgtacgcagtgaaaagagcacttcatccgccaaaagggccaccacttttcttgttgggtctcgcgaaaaagtttacgattgcgaattcagaagatcgaatctctgccttctgagtatgatgtgcatgcgaagaatccccactctgctggtcctcggcagcctacgctgggcaacggaacgcgcactctacctctgactccctccgtgctgtagcttgcggctaacaggaaggtggccagtttgaaaaaagaatggaaatgccagaaggaaccccagtgtgaagtaagcggttttaaaccagttggggatgcagaatattgacgcaaaggggaaaatggtccatatctttcagtacacgtagaccggtagtgcaactcgaggaaaagagtgttataactccagagttaatgacgaatgtcacgcctaatggacatggctacatacatacacatttcctctctttttttagtattcaaacatgtgtgtacagcctacttctataaatgtttacctaagcaacacatctgtccacttacgcgactacaatacaacattgcagactcgatattgggtttagatggtccagcacacctcgtgcagggattttaaaagtaacagaagatatgttttccccaaagagacaagcgaatacttctttctcttggcttgtaatgcatcccgtacgaatgggtatcaggccgggaaggatacttgcggcctttggtgggcagatgacatcgactaccgtgcctcgcgagttcatcaacccacgttgcagagcgtgtcaagacaaagcgaggcactgttcgtgagagagaaagcagcacttacgattgtattgtaaaggagtgtttccagtgtataaccaaagaaaagagcatcacgagttcctgcagaaaggagcgggtcaccgctatgctcaacctcacccgaacttcccaggtagcagggtgccagccaggggctgtcgcgtctcacgcgcgtttatcgtcacgagacgaatacgcgaaatgttggctgcaggcacatctgctctcggcatcgcgctgtatactctgtctccgacatataaatgtctagaaccgtttttttgaccctttggcgtccgtgtttgtatcccttcgcagttggttttccagagctggtgtccccggtgttccttttgactca

SEQ ID NO: 850 - DNA, 2077 bp, Toxoplasma gondii
  source 1..2077: mol_type = genomic DNA
ggaccttgaacatttcgtcctcagtcatggcctttaccttgggcagaggcacttgccatttgcccgccttctctttgcgtttttgcttgaccatgttgctgaggactttggtgcgtttgaccgcctcacgatcgaggagatacgcggggacggcgccgtctggggcctgctccggctccgcgctctttgcgtctttctcctcaaagtgcttcaaagtcttcttcatcgtcgccttctccacgtagcgtttcttgttgaacagtttggacttgatgccgcggaggcgacgcgcctgcttggacagcttgtgcggctcgcgcgccgccttcttgcgtctggaaagcagaaaaatcggaaggtggacacagaggaaaaaactctaacgcacaagaggcgagcaacaagaacaacgaaggcaaagaacagagcacgaggagagagaaggcggagaaaaaacaagtgaaggcgcggagggaagaggatggtcggcaggataaagaaggagagcaaatgggtcaagcaacgcctggagcgacaccaaaaggaaaaaacagacaccgaggcagaacatacaaagagaaaaaagtgagagagcaacgcggaagggaagaagaaacagcctgcaggtcggaaaaaagacagaagaagatagagagccgcatacgacagagaaaagaaagaaaggacaagaagaaaagaggacgaagccgaagaagacgagaagaagaagatagaggagaagaagaagttataggaggggaagaagttgcctgaagaggagttgaccgagaagaagcgtttacggagaagaaagaggacaaggaggagaagacggagaggaaaaagagtcagaaggagagcaagcctgcctactgcctctcatggtgatcgagacgtcgtccaaagcgcttttggtgaagctcaatgtactcgttctgcggcatgctggcaaagaggtaaatttcagagatccggagagagcgcggagaagcgtcggcggacggattcagaagaaggacgagagacagcgccctgcagctctcgcagtcggccggagagatcggcaagtcgcctttcctgcagagcgtcggttttggcctttctttgaggaaagattctctaaaaactttgggaagtcgagactcaaatcgacatgttcaagactttgcatgcccagctgggcaccatcccacagagcgcaaaacggcgatttttcgcgggtgagagataagcagaaaacctggatttcctggctcgagttggactcctctagcgacaaagatcgaaggttgagcaaggtgtcgactctcttgaaatttcagaaaacgccgaagagccgcgaaactccgccttctcgcgtccgctcgtctcccccctgcgcccgggggttccagtgtacgtacagctgcgccgcgaaaaagaagtctcttttctcaggtctggaccgcggtgctcgcacagcggcgccttcgctttttccgggtgtgcatctgctaaggcgccgcggcgaacgaaggtttccagaaaaagaggaaaagccgagagagtataagaatgaagagaactgtcgcgcctttgccggagaggtgatggaggttctggcgatctgaaggaggcctcagtctctcgccttttcgttccgctcctgcggctgctctcgcacttgcgtccggagaggtccctcccccctttgcgtgtcttctccctgaggagggcgatacgttcccccgcttcgatttacagagaattggcatggatgcgcgtatcttgtgatctctagttgcaggcaactgtcttcgctttctctccgcccactgcctcgcgtcgtcgttccccgcttgtgcatgacctcctcgtttcgcagagctccgtcgatgcgcgccgggagctcctcgccagcctagtcggtctctgcgcgcctgttgaactccaggttctcaagcgaatccagttgaaagaaccgcactgagagtcctccagccttctccttgttcgccttctccttgttcaccttctctttcctcgtcgtctttcttgtcttgcgcgcggcaagaaagactcgttgagctgtccgcaa

SEQ ID NO: 851 - DNA, 4990 bp, Toxoplasma gondii
  source 1..4990: mol_type = genomic DNA
ataaaggacggttctttacgtgaatgtggaacagaaaagaaaaacgccgtgcacagactcggtctaaaggcagtttccctttgatggcgctgtttactcgccagcgcaaccggtcactccggtacgtacacagcacccatcatagcctccagccacttttgttcgtaacctgttcagattttccgcgttgcagtctctcttggtcacatctcatcaaaacccgtggctttctctccccttctttcgggcaaccacatatgcgcgcgtcgctcgccatctcttagcgcaccgtctgctcgactagacttggcatgttcctcccttcgaggcacaacggctgaaaatccgcgtgctgctcacctgagaaacagcgaactgtccacggagcttctggcccccgagggagtttccagagccatcgagcgttcctccgagaacaccttcgagtttcgggcgcctcgcctcctgatttccgaatccagctcgaatggtcctcgagtccatcgttctattttgggagccattcccggaaattccgccaacgggaagagggccgggagtgtttggaccgacggggagggagttttcggcgcgaaaatgcgagttcgcctcccgtctcccttcgctgtccaaccgcgggttgccgtactgcgtggcagtgacagaaactgggtttgattcgcctttacctgaagacccggagagggccggagctgcaggtgaaagagcgccgacagaagccgaggtagcggggagaagacttggtcgagctggcggaggtgggacgcctggcgtcgacgtgtcgttgtagaagtcgtccatgctgtcagtcggatccagcattgtgcgtgcagggaaaggggcaaagtgcttgaaaacctcgcaagtcaaggctatgagggtgaaggaaatgttcaggaagtgtagtaagaggtcttcagacaaagaacgggaaatgcacgttgagaaaaacgcgtcggaaacgcaagacagaacagccggaactggcgggagcgaaaacctccaggttcatgcagtggaggtagcggaacggcggctccagagaaaacgcatctacggggggaaaactcagaaaagaggtggatgtcttgcgaaggaaacgcgaaaacaacgggtggaaaaagccgaaaaaccgtgtctttcggggattcaaacttctcgcaggaaaccgcgacacggaaccgcataaaaggcacaccgggggatgtggcgcttgtctgccccgaggagggctgctaaaaagtctaacgaaaaggaaaacgcatgggagaagatggcgaaacaagacaacggagctctgcactcgacgctagcttgagcagagttttcacgcgttctttttgttgagaaaagtgggtgactcgcgggggtttcggggttcgctcgctagtccaagtttccttcttgctcaaaagacaaaggcgtccaccataatgcgttttcaccatgtttctttaacaaaagatcgccaagttttcattggtgggtaggtgacaggaactcaagaaacgtttccgtgctgcaagtgtggcggtcacactttctcgctagaacgaagagcgtggctaaccgcgggagaaccggagtcgacaggcgccctcaccgacgtccgtgcgccttccttttctagacgaaagtgctaagtgtttaccagagttctcaggttgtctgcgtggcagagatgcaacagcagcgtgattgacgatcgcagcaaatgtacaagtggaatcatatcgcacgaagacgattagttacttgcatctgctccgcccgctgcgtcctgacgaccagacaaagagagttcactaatggtactagcacagtagagatcgccttagttctcgggaaactacttccaaaccaccaatagaagaaattggtactacgaagttactctatccgctgcacaaagccggcattacgaacatggcgaaaagcgtgacccttctcttagtcaatcaattcggggacaagcgtttcatgaacaagagcgcaaacgtcgctttgtcttctattcttttgctgtgttgcctttcaaaatctctctgaggggtttcaacccctccatcctctctttgttttcacgcttggcgcgatgacgtccgcactcgcactcctgttataaggtctatttaatgtttagcctgaaacttgcaggtttgatgctaatccacactcatccgagaaatacttgtttgttgaaggttctgtatgatttctcgtcacactatgtagatcacatggcatctgaggttgagatcgtaggttgcgggggaagggaagtgctataaacttccgtaagttgtgtgataccacccttcaatggtactgatcctacttagtgacggcgagcgcagtggcaggccatggacgccagaatatacctacatatatacatatatatgtacatatatgtatatacatatgattacatttacatacaattctacatgattttctctctaccgtagcaaaaagatctatggactcgcaagcttatccggttccagtacaatgccagacatgtatcagtaaagaaaagtcctgctgctttttgttttagttatttcttgacttggaaaaagctgaactatcgcatcgaagcgaggtacatcgtggacacctcgcctgccggtgcggctgatgactcgagtaggtacataccgtacaaggaacgattctctgcttcccagcacgtatttgttagtcctcgtaattagagtttcgcgctaaggtcccgttccttttagacaatacagctttcgtttgctcagcctctttggtagagtcatttccttgtttacacggaatactcactctgcctcctttaacgacagtgcttgtggtgtgttcagccagcgtgcatttgaaaatcacatctagatttcgaggttcaaaggcacttgcttgcctgtttaggcgtgagacaaagaaggcatcacgtaccaacgcttttagctgagcgatcaaagggcgactaaagcccagcgtaaacattgcgaaaaaggacggctttacgtttttcatcaaaacaagcagtgaagttgaaccgtctgaacaggacagagtcaaacggttctaccgtgttgtctaactctgtttactgagccggcacttccacatgcttgccacagatccgagcagcgcagatcattttcacgaggagagcggccgtgcaacagcatgcgagcgaccaaacaactgcggaaacttgcgcgtggaaacgtatggcctcttttacgaaggtaggatggctctctcagattttgacctggacgcctcggatgtggccaaaacacgagttcgaggggctggaaccctagtcagcgcacaaagagtcatagaattctgcgttgacatgcaaatctgatagaagcagatctgattcacccgttaagataggtagagtacatactagcgcaaaagctgtaaaggttaccccgttccaccaggggggctcgtccagcgtctacttgaggctcgtggcgccagatccagacaaagccgctttcgagaacagagaaaagcgtttcaccgtccacggtaaagcgttgtggcgcttggtgacgtttgcactcccgatagtccgcgaggactgctgaaaaatatcgtattcacaaacaggttcatgccaggctaccaagccgcacacggtagactggcgtggcagcggggcgggtggcaatggcgtcgtcgtggtcactagaagacaaggtgtgtttcgagctcgagtgtcgccaccggaaacccctcccactcgaatcgttccagaacaaatgcacaagtcgcactgtttcagcctcacatcttcagccacttttctttctcgtgacgacgtcgaaacctagcgagaggaggcatcgaccctgtctttcgcgagtcggcgcaggtgcaagacaacgctccccggtctccgccgttgcccgttgaggcgtttggtgcacgttcttgcagcaaataaagagagtaaggagtcgagattcctcagcttcaccggacaatctcgtttttgagcctttgccacgccgaagaacaaagaacgtcgcacttttcagcggacaaatcgtacgggagcccgaaggagctcagcgcttcgttacttagtagctcgcgggcggaagcactctctcgcctttcctagcactctgtagtgtctctgagaagagaggcgttgttcacgacttgcgtcgttgcagggcgttcgagaaaagcgcaacaagctcgcaaaagtgacgaaggactgtcaaaaacgttgcatcttttcgacctgagcgagagagtgacacgcgggaggagtcggcctgcgtaggtgctaggatcttgtgcaggccagttgggggtcgaaccgacgtcgttgtgtaatcaagaatctctgttttctctcgcctttcatctctgtctcgaacccggttgtggtggcggcaaaaaggacaaaataacgggagtcgcagggcgttttcgctgctcccttggcctcgcgacacttcgctctctttgaaaacgagctttcctgcgtgtgcttacgctggggcgcaacttgccaacgccgaaaagacgtgctctcttttgtcccgctctccgtttttcgctgctttctcggtcggcacgcacaccttctctccgtttcagctcaccaggggaagaatttcgcgttgaacgcctcgtttccccgttcacacagaggcacttcccggcgcgaccccggcggtcgaaaccgccttctctaaattaattcgcggttcaaatgctgtaccccgccgcggtcttgactccctctgggtgagctggaagtgcgggagttccacatcgctcgacgctagagccactgcacatcgggagcgttgttctagacgtacaccgaaaaggactctcatcatacaacgcctgtgttcaccaaagaacacgcatagtcagatgtaagtgtgatcaatcccctcgtccttggagcaaccagaaggtcttccgagga

SEQ ID NO: 852 - DNA, 2367 bp, Toxoplasma gondii
  source 1..2367: mol_type = genomic DNA
tcgtcgagatggccgagtgtcatctcaagagctctctgccggtgtgtgcgactttccccatccttcagcagaagaaagagaggctgccttgcagctgtctcaagccatccctcctcgttccaggcggcctttataaaaggcccgtctctatcaggacggcagtccgccgtgcaagaatctagaggcgccgaagccggagaggggctggcgcccgtggcgatatgtgcgcgcgccattgcacgaactctttcgtccgcttaagacctacgagttacgcggtcggaagagtagaaacttcgcaaattgagggtccgagactccctttgcgcatgctgcggagacacgagttctccaacgaaaaagtggatcacctttgagttgtatgacgtcaccagaggcaactcagaagagaactgccttccagttgcctcaaggacgaccgaggaagctcagtgagacccgcgagcccgccggcatccacaaaagcagcggacgcctttccctgcttaaaaaagaactccggtagtccactcggcgtgggaagggggcagacctggaaaagcaggtatatctgctttgcatcaaaacagcttgcaaaatgaacgagaaaaaaaggggggaaacgaccaggtgacgtacaaaagggtgatcggacagggccaggaacgcacaccagcagatgagggtcaatgtcccggaactgtttctacgcgatggatggcacagaggttccaataaagcggcacacgaaaggaagacagggaaagagcgcgtatcgcctcgtggcgctggcacagatgatggttacatgcagacgaacatcacggggcagttgagttcaacagagagagacggcttggcggcccacgacgcaaaacgctgccgagcggaaaaggccttgcttctccaacagcaagtggaaataccgcagacagtggagattagattgtcttcttgtacctttccgtagtcgtggaattgtcgctaaattttgagtcccgccccacagagaatttttcgctgcccggcttttgctgtcgacggatggggcatgcagttttcgcttgattcgtcagtagggaagaagcatgcatgcccgtcacgcgcagtcgaactctgctgaggagaacgagaaactctccctggcgacgaaaagtgagacaggaaaaacatcgaagacaagcattaagacagaactgtgagggctgtctcgcaggttgattcaaaaccttgatggtttacccaaatgcctacggcaaacaccatattacgtgtcgttggccaggcgacccccagctaaagcgggggttcgcacctctactgtggagctgggaacagtcgggacggttgcacattaccggtaggacggctgagactgaggcagcagcgtagtagtcccgggctgtggcacgcgacgttcgcagcgactgcccggctagaagaggccagagaagaacacagctggcgacaggcggtgttgctgttttgcagagaaacggaaactgttgacctcgggccctgcgagagctgtacgcgtcgtaatgctgtgcgtgagggtagttcaggaaaaggcacggatcttagaccgaaatccgaagttagtgtacccagatattgtcggcagctggtgcggtggtgtacatacaccccaaaaagccagagcttttttgtgtgtgccgtcggatatcaggacatcgtggattcttcacattctctgaatccatgtgcagtttccgcctagtttcctcatgtgccttcagcagcttaccactttctttccgtgtactggtcgtctgcttttctgctgactgtgttatctgcggtcgtcttcctcggatctcctcttgtcttcacctcagcgtgtacgatgctcagggacccccgtctctatcacgccaggcagaagtgttaatctctggatctgaatgctcgtttcgaaggaggcattttcgaaatgtgctagttgacgtcctgtactgtttttagtatcgtggtgtgctgttgttttcaccagtagccgtcaggttcaagccgtatctgagtgacaatcgaggaggctgaagtcttaaaaccgggtcttccatttcgtctgacccatagaatccagaggtctccctctttgtttttcccccattcagttgtttcccccgtttttgggatgttgttgatatgcatagttcctctttacgcgtcgcttccgtctgtttctcgatattggcgttttgttgccgctgttacaccccgtccgtaagtagagtaatttggactcctcgtggaactcttccaacaagcaagcacccttccagcttgatatatcgtcaccagtattttcggtggcccttcactgactttcgccagacagaaaca

SEQ ID NO: 853 - DNA, 2795 bp, Toxoplasma gondii
  source 1..2795: mol_type = genomic DNA
catgcccttagcctttcattcagtcctactgtggtgttatcgttcaggcgaaggcctcgtaattaggaacacggcttcgaaaaaccacgatcttgattcactggaccgcgttagttattttggagacgatgtgtcatcacctgtttggcccagctggcgctgttggaggtcccatcgcttgagggcttcttcatactcttcgagttgttcgtagtacatgtctgatgcaacgtcacaaacaagaacatctcacacagtcaggacgaccccacagcacgctgacgaggaggcaccacatagctttgagagagtaatatgcacttgttgacttcagagggcagaaatgtttttatggtcgctcaggacatggtttcaaacgagctcgctcacctgtgacttgggcgagcacacagattcagtctcgagtcacgaactgcgtgcatgccctttatgagggttcagatggctgagtagacatcatgttcctgccctaaggataacttccagtgaaactgcaaaggaatagacataccgaaaatgcatcgtttgcagccagatccgcagctgcaacacaacagagagcagagaatgcccaatcagccttcccagaggctgttttctgaacaaaaccgaaagggggggtagaggtggaaatgatctaatatgggagcactcataccagccatgagacacgaagacatatctccctccgataaaaacaagtcactcaatacagtgacggttcacacgcgcgaaacgccctcctacttcaaaaactgcgttcttgaatagctggacggtatctcgaataaagccgtccacgacttcaccttggtttagtgtgtggaaggccatccgcaagcgtgcgattactgatgggtgcgcaccggatgaagccacttcatactctatttttgttttcttgtgctgaaagcgatttagcgttatttccactcgggcactggtttcttccacagcggacgccacctgcgcatgctaaaacgctggcccatcaggtagcaacgctggcgctacacttttggacattaccagagcagtagagttcatcgaatgctaatgattcacagtaatccttggcgtcataccagtcttccggttctggtttccatggcggcacaggctttttcagcagacgaatgcttccctgttgccgattcatttcggattcacgtgctggatcggaggtcttagtctttaccgcaggacctgcagatgtcatcgtttcttctccaggtgtacttgaaggaggcgtcgtgtgagaagaaacgcttgagaaattgccggcggcacaagacgcctcgcccggcagaccgagaggagtgacattcgcagtagcgttattcatgacccccctctttctggacttcagtccactcatatgtgcaaaacgcacattgcggcaaatagtaacaagcgacagaggaacattcggtctacaatgcgacacaaacatggaggttcgtcggcttttcccccaacgtgtcagaagatcaccactgccgatgccgggggacggtaaaaatgacagtccaggaaaaaggggcgacactctgtcaaaacgaaggagtcatgcacaaaagcacacgtgaagcgaacagctgtgatatgccgggaatattgagacccctttgtagcgctggggcagtcaccgaagcgttgatggtgagtcgtggtgacccggcagccggcacgatgtcttcgcgctttggacggagagtaccatcagccaacgactcacttgctgcagcgttgcagagagaaaaaacgaaatacatgtggtaatagtggcgccacacaacaaaacaatacaaatcaaaaagcctgtcgtgtacggttgggcttcactttattcacgaaatatgcgtgccgaaaccctagggcctggacaacggcaaaacagcagagcagctcattggcatgctcgaacagctcgcatttcgtgggaacgacggtagattctttctcccaaggaattaaacagataggcggtgtcgtttgccgttgtcacatgctgtttctccacagtctgatatataatgttcttccatgaccgggggatctttgccgattacctaacgcttttcccctagcttcctgccgtcgccttgtgacccgcctcttcgcatgcgagaaaaatcgaagccgacagggaacagcagacttgcaagcgagcttggccgacatacatgctggagttaaaagtaatagacctatttaaaaagcagttgactcaatatcatttagtgtttcttgcctccctgcacactaagtggctgttcgtttcttatacggcggacacagatgaggagatcactttttttttgcagctgtattgtggtggcatcggcgtggcgcgaagccgggtgcttgctattttgcctttgcctaacacatgctttttgccaccggatccgttgtcttacaactgccacccataatgaacaaacacgttgcccgtaccatagcgtcaggggtgcaaatgaacgagacgacctccactacaacgcaagaattgggtggtcgccagcatgtaccttgcgagtttctttcaccttcatgttctcctgtgagggtaatcaaagtcatttcttcattttcttcccccctcgcgctctccttggaatactggtgaggctgtcgggcggattgagagcgtaactggcttcgttggagtcagacagtgtagcgactgcatcaaccagcagctcgtgagccacgtgtatcttttgccagcggagggttcgtgccaatccagacctggacagtaaacaaca

SEQ ID NO: 854 - DNA, 1232 bp, Toxoplasma gondii
  source 1..1232: mol_type = genomic DNA
caggagaagcagagacgatcaaaaatgaagagaagatacgagaagtgagataagagaaaaaaggtaggggaagacaaggcgataggaggaagaagagaaaagagaaaagaaagcaagaaaagacaataagtcggattgtttacctgacagaattgataaaatttgcctctgagcaaggcagaggagcggccggagctgctggcgcttcctccgggacctctctgtttctctcgctgctgaaggagactgaaaatctcgtctttcaaagcctccactctgctgatgtctcttccccacaagtccatcttaaggagaagaaagccacaaaaaaagaaaaagagaaagacgcaggacggaaagaaacagcctggaagaggcagagaagaagagaagagaaagagaggagaaggaggaggcgaaaaggcgaagagaaagagaagaaaatgagagtcgaggaggaagacgcaaatcggcagtcaaaggcaaagcagagaagagacagaagcgaggaagacgaacagatgagaagacagggagaggggagagagatgcgtaaaggttggaaacggaaggcaggggaggacgcggagaaaagaattggagaagaagaacggaaacggttgtgcaggtgagcggacggagaaaacggagtgaagatcgaaacacagaatgcgctacgaaacgatgttttccggtaaggaaagaagaggacgaaaaccgagaagaagcaggacgcagaaaggagcgcgaggagtcgcggagccgagcgacaagcctccgaacttgaagtgaaacgcagaaagacaaggtaggtcttcccctccgagtttccagcggagaaagcgcaacaagacaaagtcaccgccctccccttttccccccggcgaacggcggtggtagggcaagaagtcgagaccgcggcggcgcttcaggttgaagtaaaacaactaccgcgggaccggcgacttggcttttggacttgcttgtgtttcgttttatcgtttttcgcgtcggaagttcacactgtgttttttccggactcgcgccgcccaccgcatgcgaccgagaagacaaagcaaaagacgacagagatctctcggggagtgagcgcagcagcgaggagacacacagagtcgccgtggaaacgttttctctcatcccaagggtgcttcgcgatgatggctggtctttttccagtctcgtctcctgcgaattgagagacgcagtttgaa

SEQ ID NO: 855 - DNA, 1839 bp, Toxoplasma gondii
  source 1..1839: mol_type = genomic DNA
aagcctctgtagggaaggaaattcggcggaacagggacgagcatggcgtctgcggcgagaacgtttccttcctgtttctcttgccccggcctgcctgcgctttcctcttctgccctgcgctgtagcgcttcgcggtcggagccggagagaaggtctccgtggacgacgttgatttctccgaatccagggagctcgatttgctgcaagaggcccccgtactgcggtccttcggccgaaagaaggagaggcgcagcgtccgccgcctcgtcgcctcgagagagaccgagttctcgctctagcgcccgcgcagcctctccggccgtcgccgtgtcaggctggtgtgaaagcggaaagaagaagtcccgcttgatccattcctctgcagaccgcactagcacactcggctcgggtgtctgtgcagctgcctgctcggcgaaggccgcggctttcgcggctgcggcggacgcaggcgagcttggagaaggcgacggaggcagcgggaacggcgagggcgtcggcggccgctcgagctggcgcagatactcgatgtgacctcgagaggcgcgctcctggtgcaggcgcagcttccgcgagaggtgagaggaggagaagttgcgcgagcccagcggactggcgagagcagaggccgcagaggaggcgagagagaagggtgaggacagggaactcgagcagacgaaacttgaagagaggacagcggaaggggagactggaccgtttgttcgagagaaggtcgaggggcgggcagggacaaaaacgaaagagcgcgagtgaggaacagagaaagacgcttctgagaacggagacatggaagaagacgagaagcgcgagacggagcccgagagaggtccagaggagagagacacgggggcgacagctgaaggaggagacgcgacgggagaggagaccgaggaaagcgagaaggaagcaagtagggaagaagagcaacaacgagggcgcgcgttgcgacgtttggactggcgagagatgagcgggaggtgaggcgagtggagcagagactctgcagccaccctcctggcccttctgcctagcggtgcggttcccgagttgagcattctgtcaagggtgccgattcactgaaaaatcatctctgcgcgttcactgcgaaaaagaaacgtgagctcctctggaaactgacagagagagcggtccagatgaaaaggcgagcgcctgcctcgaaagtgtgagacagacagaaaagcaggtgaaggggaggcaaggagaagcggaagaaagaaggaaacttgaacttgtgcgaaaggacttgcaaaaagagacaaagggtgacacactgcgtcggacgctgtctcgtttgacagcccccttcgacatgtttccgctcaaagcgttttcgaggacggaaaacaagaaggtggagagaacctttcaacgcgatgaatgcgaaatggaggcgcggcaaagagagtctggtcacgcggcgagagtcgctccgcgcaaaatatcacatctctccacagaacatgcgcgattttcatgcgatcaagcccgccagcgcgaggcaggagggcacaaagactcgcgggtgttgtgtgcgtccaccgcgaaaatgtatgtggaaacgatccctctcgacaactttcgacgttcctgaagtttccggcggctgcgtttctgcagtttgtcttccagtgtgccagctgtgtcgttgtcaagctctctgctttttcctcgcggccgctcgtgccgcaaaagcgagcggaaacacttgtcttttcccgcgcgtgcatctggcgcctaccctctctccgtccataagccgacgccctccctctctgccaa

SEQ ID NO: 856 - DNA, 3562 bp, Toxoplasma gondii
  source 1..3562: mol_type = genomic DNA
catgatctcttgttccggagtggtatctgatgaaaagacacagcggtacacctgccgcttttctgtagtcctgtgtctgatgatacagtccggcagcgcatgcgttctaataccccacgagttccagcgagagatgcagctactgtggcacgctgctgacactcactgatcctttcaagcctctcaggtaccctctactttgtgacactgtccattcggggaatggcggcaaccatgcgactgcagaactcctgggcttcctggatgtatggggagacacatgcgcacacgggagctgcgcacatcttcttgacgaacgaaaagccaaaggcaatccagacaacacagaaaacgaggaagcacatggagaaaaacgacgagacgtacccgacagcccacgttagtacgcagcacttggccgtgtacatggcatccttccacaacaacacatctcgcactgactccaggacgcagttaacgttctcgtagcagcggccaaccattccgctgagtgtacttcgactcacgatttcaacggggccttcgccaaacgagggcgcaaggtcgaggacgcgaaacaggaatcccgcagcaaacggcaccatcaggaagtagcaactaacggagagaagtgatttacccagaacaaatacaaagaagtaaagcaaattgattcccagaaagagcgatcccgccgtggttgggttttcccacgacagtaatcgagccactgcacactcgtattcccttgtaggggaactcgaaccagcgctaattttcgacatggtgtgtggtggaagacggaaggcggcaatgcgaaacgggggaatcccagaatcgaaagtgcttgaaacgtgcttgcacaataaaggaccgcgttgaaagactgacgcctgcgactgaagtcccgttcgtccctcgagcgcagcgttcaaaaaaacgctgtccaatgaagacacgtaaactacccctacctagaaaactctcacaaacacggtttgcatatccctttatacagtaaacgcgaagagaatagacgggcgcacagaggatggaagtgttgcttgcaagcagtctggtcggagaactcgcaagtgctacgccaaaagtgagcaacctcccaaaaaagcgcttaccacagtcggaagcatgtgtgtgcggaagattccagagacacggaacggggaatcctcgacaggagcagcgctcttctaagacagagccaaagcactctgcacacgtaccacacaacaaaagtctttcggaccacttctcttcccgcagaagtgacctgctcactagcgctgaaagccggggaacaacaggtgagggagaacgattttgcacgataccgccacgctgaacctcttgctgctgttcgtctctttttcacgaccgaccacacacttcgattaacgctgaaagtgcctcgacgactgtgggtagcgccgccagcgatccacgcccgctttgctggcaccccgtaaagtctcatgcaggtcacttcctcacacacgtaccaggaaaatacgaaactgaaggttccattggttttgtgcgcaacattaaaaactgtgcaaccaaaaagatatggaggaaaacccacagaagcaatgtgtgctaacaccgtgtgtctctcgacgccctcggtccccttccacgtactagccctgaaatcgagctacaacgccactaggtcgtcgccttaaacttcagaaaagttcaagggtgccagaatgtattccttaacggtggactttccatgtaccagttcactgtgacatgccgtgcagaagcggttgaggcgtcgttgtgtaggtaggtgcgtagtgacgaatagttcaatagttcgcgccacgactgtatcgccttcccccggaccgatgaagtgagacgcgtgcgtaagacacattttgaggagcctgacagccgatggcttcgctcaaatctagcgattgtggggtagcatgaaatcggggatcttcatgagataccaaggattatctagtcttaccacagctgcgttcagcaaatgtccacaaagaaattcagcaatgtggaaccgccacgtcgtatttgccgccgctaacgtgttggtacatacagtctctttccacagccagcatcgacgatagaaactattgttacgtgaaatggtactccactaactgttggtggaaactcgcttcaggttccttataggcgacctcaggaagaaactccggcgattccggcaaacagccgctcgcatacagtgacggtgtatcgatgaagctagtcataatcgtctgcccagatactcgaagaagccagttttttcgttccagtgggcatggaaagtgttggccatcaagtgtccacttatgatctttgcctcgtaagagtaaatcgataatggaggacagtccaatggcatacagaggggggacgcagggtgcgcgacgcttttataactgcatggaatgtcggcggaagcgaacctacgaccgcaaaatcgacgtcagatactcttctggcacagtcaaaatactggaacgtttctgcgtggtgacggttttttaacggccgatggtgtcttcgaacccgagggcgaggcgcatctgtacccgtgtttagcgcccagtgtaaaaccccgaactcttctcagaataccgtacatgtccccccgcgctcgtttgaaacaaatgctccgggagacacacacactcccaacgatggtttaggacttcggtctaagctatggtgacagaaatcgtaagaaaaggactattgctcatctccgtaattggctgacggtgttgcgcatcaggcggaggaacggacacggcacatactacacgccgccgtcgtcgtgtgtttggcgtcccacccagagcaggtgcgtttagtgggtcgccagctgttcctgatagctactttcagttcacaagcagttcctgtttgcttacgttttctgtctaatccacgtcaactaatccggaggcaccgcacactacgatcggaggaacccagcgctgcggtgtgctgcggacggttactaacgctagtgaacctgcaatgtacccagtatggatatcacggtgcaatatccacagtgtttcactcgtgtttttgcgcattgttgcaattcacccgaggttatggaaatccttaccatttttcatttatccaggggtccgccgttcgggagtttcacaagggatcgggctaatcaagcgtgagtcaagcgcgcctgcgtcacacgatgccagttttcccagaattttcggcgccgcgtagttgccttcggaatttcatttgattctcaattaacatctgaaaacactgttccatgcttgaccgtttatttgtacccgggcatctgcctgtaccatctacaatcgaagtgtcaagtggtcgcactggccagtcatcttgtcgccacgaagaacccactggtctctagcctgttgcgtccagcttttcctcttgctcggtggtacattgcactgaaggtattggccgtcacatgtttgtgtgtggcgagcataggaaggatcaccttttagcatcggggcaagga

SEQ ID NO: 857 - DNA, 4428 bp, Toxoplasma gondii
  source 1..4428: mol_type = genomic DNA
ccttggctgctgatcctttcggcgctaagaagagtgctgagcatcctctcggacgggaggctcttgagttctgccagactcgtctgatcaagctcttcgctcatgaatgtcaaggagattacacgccagtgggatgaaggaagactagggtcggagccagaggagtggtctcgcttcagagcctcctcgacgtcgggaaggttgagagagctttgagcgaagagcgcgaggaaagggagagacgtatggttcaagcttgtggacgattcgtacgacagcaagtcgttcgaatagtgccaaatctgcatttcaatttcacgccgattcgcctcgccttgaaaggtgtgttcagagggggagtgaaagaagatgtgttgagcagtgtacatctccgtcgtgtctgtgctaaatagtgctccgagaggcgtcatttggtcctctggaacgcggacctgaaacaccttcgacgtcttgtacacttcgactttcgtgaactggtgagggtaggtgtagaagaaatccccgcgcttccaaggcttaagcgttcgagatggttgcgtcccggcgaacgcgttcatataaacatttgtcagattacggtactccggctcctgtagcccctcaatgtgtaaatcgactggcgactgctgcatgcctgtagcgcacatgccgccccaatccttgccatgttgcttgtagtcccattccgactctggcaacgcggagaagtgagggatggagccaaccgccgtactggagttttctcgctcctcagccacatcctgaagcaaggaatgggggcggccgctattctttccgggagttttctggaacgcagccctacgttgggcacggaccagcgtctcgtgagcaccgatggcactcagatattgcgcttgtgtcgggaggtcgtcacgagttgctgtcccttgcagagaccctcgatgaaaggctagcgttggattcgacgtgactgagacagccaggatgaccaaaaaagcgacatgcgaccgggagatccgcccactcgatccccggatcgccgcgaaaggacagtctgtcatcgctttccgacaaagttacggtttacgttagtttgtggagcgagagaaatcggacatcaagattcacaagtccgagagcgacagtggacaattgacacacactcctgaagcatcagaccggcgcgttgcgtccagtcccgtccccagtttcggcgacgaaattcgactgctagccactctgcctgcagccgatcttttgggaatcccgttgcgtcgcaagccggaggaaatgcagagagacagaggtcaagaaaagaaacgccggttcactgtttttgcgttgaaagacaacgcgtgagctccacgacgtctgttacgcgcgttggctaatttctagcgctcgctacgccttcgagacaaggcccctcatcatcgcagaggagaaaatcgtggcagcgagcaccaacatcagaaaccatcacacgggctttctccgaaatttaccgtgcacgctgccaagaagaggggagctgaaaaagacgcctaagaaaactcagcaagatcccgtgtgcctccgggattaaaagacaaagattcgcagctcattgcgcgagggcgtcttccttgcgtttggcgtcaaccgctggtggacaagacacgccctagcgtgacagcaaccacgtggccgcaaacgaccagatgactagaaagattccgaaagctcaaaaaactacacgttttcgccgtcctcggcgccaaaagtaactacaggctcttgaggagggttgccggcacgggacgccgttttcgcagataaacgagggaccaaatgagacactacctaccaagatagccacaaccatggcggctgccaccgcagagtggttccaataccaccgattaggacagccgaaatatcccgctagggaaccagttatgctgtcgatatatctgaatgaaacaccggtaagactgccaccgatatgggaccgactatgcatttcagacttgatggcgcccttgtagaacatgttttgccacctgaaacaccctaacagtgtcctttagctagtgccgcggctgctgtgtgaatgtctcgtggcgctgaaaatcagggtgcgtctccaccattcataaaaagcagacaccgtatacagccagcttgaaacggaagggactatcgcacaataaaaaaggtagaggatgcagctgccagtcaagcaggccgcaagagtatttgttgggtttacgctgcagctagctattttccgtcggtgaaaaaaaagcttcacaacacttcatcactctgaggacaagcgaagtggcacttctgtggactgcaaaactggttgcgggtgtcagcctgcatcgagacacaagatttcgctattaagtgatgaggacgcgaacacctgcgaactgcagatcgaactgtaccctaatgaccaactttggaggatgtagaatcgtgtgggtccgcttgctctacctgtcttacaatagcaggtcgcctcttgccgttcgaacatatcactattatggactgtggtacgtgagtcgttaccgaattggcaattgtcagttctggggaacaaagcaggccaagtgctgggaatgccatccatgtcaccgttgactgtggcggcccgtctccacaaagaccaagtgactaggcgtcctggcaacctttcactaaccatccagagatttatcagccttgagggagtgccaggataatgcctattccctatttgccttccctttccccacggctcacaactttctaagcacagccacagccaagtctttagcttaaactggattgtgttcccgctgttgccgatgtctcctgcttcatatttcaccatgtttcagatgtaggtcgggaaatctttcactgatatggaaatcgcagagcggtgatctgcagccgagttcccgtttactaaaactccatctgagtggatccgatggacaatgtaacagagtcaaaacttgtgagtcgaccctgcgttgcaatttttgggttagcatttgaaatcctattaatccacttgagtgcgctacacattgagcatccgtatatgccaaaggcggaaaacagccactcgatgccatgttgtgaagaagacaagttggtttgagcacctctgttcatttgttctatgggacaagatgcgctgcttcaggttgaggcaaaaacatgtgcagcaaacgagtattccttgatacaggtatacagaagtagaatccagctttatcacgccgagaaggcaatccaggccatgaatgaaccaaaatcaatgatgttcttgtcacacatttcgccgccgtgtacaacaggtatgcgctacagcaggtatccaccatttgccctgtcaacgctgatcgtgtgtagtaaaccgtcaatcgcctcaactcttagaaccatcaaatcagcacttgatgaggggtacggtgccccatctggaccaataatggataaagagttgataccttgaataactaccacaaagtctaccggcactacacaaaaacatagcgtgtggtctcggcgcgcaagaccaaatggtacaaaacgattctaacatcgtcattacagaagtaggtattaacaatatacaagccatagctgaccgtgtaacggaattttcacaatagaagcggttgctgtcttttagcaaacgactgtaaacgaaggacaccttcactttcactgactactcgacactccgcgggccattcattgactatttgccgtgggaaagtaaaagcgagtaccgcgatatcaaggatgtttgtgtcgtttcgtagattcacaatggcaaacgcccctgtaatatcccgaagcgcgacaggtacatgtaattcattcagtatagaggtgaatgcaacaaaaaggccaattttgccacatgcgcctgttctagggtaatcagttgaaaaaacacggcatactcgaaatgggctagtcttatctgactgccaccaaatcaagctaacaaccaaatttggaatcgctaaaacaatcgcgatcttgtttgcgcggtcctgtacgtggcagcaatggtgctgcaagactctcgatcagtactcagtgtatgagtcgcgaaccgacacagagctattcaaggtaagttttttttctaaatacacaggcgcgcagcttgctagacatgtttgggtcctcttttctcttttgacgcaaacttgacacgaagcagccctgtggtgtgcgcttgatcctgactgtgacgacacacagttgcatgccctgttccgcatgcgacgtagatgaacaagcaacaaatgaaataggatgccacgaccccattgtacaagattgcccatccacattaacaaatgccatatttttgtcagttgtaatctctcgcggacgttattctacaattgtcgagtgcca

SEQ ID NO: 858 - DNA, 1240 bp, Toxoplasma gondii
  source 1..1240: mol_type = genomic DNA
aaacattcgtcagtagacgtgcgtaactagattccataaataagcatgtaccatgggaaccaagcacagtattgtatatcagcatggaggacagggggaatacgatacggcacgcacgagagagagcgggcttctcggttctttgagcggtcgctcatagaatatcctggaagaaaggtactctcgttgatgcgtgtaatgaactagtgaacgtgaagacatttcactgaaatgacactgttcgtcgtttctttcgggggctgtctgtggccctttccgattcatgcactgactggcagtttgattcttgtagtaaacagctggggaagagtgggctcgagagcatatgcattcttccatgaggctctgccacagggcagatgtgcctgactcactgacacaggcgtctatccccgccagtgatacagcagtgctgctacagagagctgctcgcatatttcactagtagggtgagctcaactgaataaagagattgtccagggataagacgagtcaccgggcaaaccggtaccttcgtacaatccaacagattattcccaaaaattgagttactatcgttgccaccgttcgctcttctggacatgaaattgaattgaatctacgtcagtcactaactaaatctatgcttcctcaccaagaacggcatctttgtggcacgctggttgcaagcttcgaaactaatcctagggtgcagatccatgaagtcgatagaaagcctgtttcgcacacttcgatccctgtcgatcgatatcgttttcgtttgaatgatcactacacatcgttgaggacgagaagcggggagaataagagttaattgtggacgtttgaatctcagtggtaacagcaaatgtatgcctgtcaggcggaaaccggcaaactacgatggaacccctacggagggaagcaagtggtacggtgggagaggcgatcgcagctgctactcgcatttcacagccccgctatttgttctctcccattcctgagtctcccgttcctgacacgagcgaagtccttagcggcagaaggaatgacaagttgacagaggactgtccgaacagtcaaaaatgtttcttcccattctgtcgtctttatctgaaatacccccccctcccgggcggctgttcttctctactcaagttcgtggcgctgcacagtgcaaaagaaaactggcaacctcattcataataattccaggtcagtcctcctcttacaattccga

SEQ ID NO: 859 - DNA, 1871 bp, Toxoplasma gondii
  source 1..1871: mol_type = genomic DNA
caagacatctcggtacagaggaaagcaaggctgcagcttctgaagcatcgggaaatgtcgctcctcgcagactcgcgcccactgcggctttccactcgcctgccaattctccgcaaacgccgccgctcgcgactccgaaggccccggccgcagacgcgccgccgccgccttcgcagccgccagcgccagccgcggcctgcaaatcgcagacatctcgaaagagaaagggagaagaaaaggagacaggaaaaggaaagaagagagaggggggaagagggagaagaggaagacaagagagacagagacacgaaaagagaaagagctggagaagcagagggagacgaagaaagagaggaagaagaaagaagaagaagaagaagaagaagaagaagaagaagaagaagaagaagaagaagaagaagaagaagaagaagaagaagaagaagaagaagaagggtaatggcgaaaggcagcggcgaaggagatgaagcaagcctaagagagagaaaagtggaaaggcggaggaaggaaggagaaaacgaacgggcagaaaaaaagactttcgggaaggactgagagaaggcgaagcatgagtcaaaggagaatgaagggacaacagaaggaacgggaggaagaagaacgcgaactatagagggaaacggaaagggaaggagaacgagaacaagaagagcgacaaaacggaggaggagaacagggagatgataaaagaaagagaagagagaatgtaaaggcgtaaccagtagaacaaaggggaggaagaagagaagcaactaggcaggttgacaggtgcaaacgaggagaatctcccgcgaacaacagagacccgacgtacagccaaagacgaggagaaagatgaagaacataagtcgaggtgaacgacaccattcacgcatgcggtgaaacttcctcgtacgtgtgacgcgctgagagcagagagacaagaaaataaaggtttctccagtgttctgtctccgataacgagcagcacaaaaaaggagcgagaactcaagaaaccagtgcacaacaggcgttgttgatacgcatgtttcggtcttttttcgcgtttcctccgcgcagaatgccagtctcataagttgtgtctatgtcttccttttcctttctttttcttgtctttgaattacacggttcctcgcagttctgcatgcgcatgtgaatcgttcgcttgttgtcgcgaggaaatgaagcctcgcacagagacgaacgagcgattaaatgaggagcgcggagagatttctcttgcaaccagatcctctcactttcttcttctcttctttctctccgccctcccgctgttcgtgtagttgcttcttctcaactcgtctcggtctccccgcctcgctcggtcatcagcagaagaaaacggtgcaaaatcgggtgtttttcacgagagagctgcatccccaaagatacgcctccctctcaatttttttcaaacgcctcaattcttattcgccttcgtgtttcttcttcggcagcggagagtccattcctgtacctgctttccacctgcacaccgacatcacgctctgagttctcgtctcagctgacagaagctggccgctgtgcttcctctctgcttctgtcgaattctgctagcgatagacagtcctttcatgccatcgcaagccggacaatttcctggaggtgaaggacccgcgggtcgtctctctccgtcgagtttgtctcccgtcctcgagagacagagcgcgctccgtctgcggcgttcgctctctgtctctccctctcttttcgtctctcgctgtctccctgcctcttcttgcaccttctccgctccggcgcgaggcggcatctcccaggctgaagcacaa

SEQ ID NO: 860 - DNA, 2112 bp, Toxoplasma gondii
  source 1..2112: mol_type = genomic DNA
gagaagtccaagaagaggatgcagaagacgaggacagcgacgaagaatacggcggcgtaggagaacaaggagacgaaggaatcgagagagaagaaggaggccgcagcgcgggagatgccggtggcgaggagactctgatcagggatgcggtacgggctacatcgcagcagcagcagtggagacagcaggagcagcaggagacagcagaaacttgatgacggagaaagaagggaaatccaaagacctgcaggagaggaggctcgaaggcttgtcgaagatgcaaaagtttcttcagcaggagagaaagacgcagcccgccaacatcgaccggcggcaaaaaaggcgacttatgttctcctggggcttccggactgacacctgcgaggggcagagtgagagggagagaagagcaggaagcaggtgacagatcagacgagggagaagacgcagaaacgaggtcttgcggaggcgtaggggcttgactgcgcgaagagctgcaacactctggcgtttgagtcgcctccatttcggcacgaaaatcgcaggcaaagcaacgacctccatctgtctgtacactcggcctcccttggccgccctctcacacgagggctgcttgctgtcagcgcctcctgcgagtcctcatggatagaagaccttccgttcctcctttctcttctctctttcaatagactcgtgacagccgcggagagagacagacggtgggagacagacgctgagagactgaaagaggaagagtgacagttggagacgaagggataaaactctgcttccggcactcaacgactttcgcacgaaaccgggacggtcaagcccgcatcccaggaaattcgactggaagcagaagccttgcatgtgcttctcaaataaagaggaaggaagcctccaaagactgacgaacaaagacgactctcttctggacgagtcaagaaaggattaagcgctgcgctctgaggcagcgtagcgtggatagccacacagagtatgcgtacaataagaatcagagataccttcttgggctggagtgagtctagtgtgtcaatatatacctgcacaagtccagagagatagctgcacttgtaacagaaaacaaatgtgcgcagaaagacgaaggcccgattttgccgccgatttttctcgtactgttcgcttctacaggacccgccagacgttccgaacccgctgcgattcgcactattctttgactacgcctgtcaaaacgcatgcagacacgaaaaatagtggattcatttccagcgtgtgtttcttcgagggtcataagcgcgaaaacccagaagatttcctctcaaaagcggagctccgaggcgcgcggctgcatgcgtcgaaaaggatttccaagagaggccgttcgctgtctgagcgatgcgtttgtccacatctttgtgtcggtttcgcctttctctattctttaaggcttggtcttccgtgccgcttctcaatctcctttctctcgtctccaagttccctttcctctcaatagatgtgtgtctctggtgagtcttgtcctcgcgagtggcatgaccgggcgctaggactctttttcggcggatgccttcgcctgcttctctgttttcctcagatgccaaatgccaagccggcctttgtgggcttgcctttaccctttgccatccttttcgggggtgtctgtgcggaacctactgggagatcggttttcgcagttttctttgtgagtttccaagaacgcagtgcgcgccttgcgtcggccgcgcgcctcgagcgtcccttcttccgcttgactcccaagaaactcgtggaagaaaagataattcaaggtgtttctccgtccgtggagaccaacagaattttcttcacggagtcaccagacgtcgtcagttcacccagttccctttcctgcgttccaaacagcgcctgaggcggtcttcgtcacccggagagagcctctcagtcccgacgcctcgaaacgaacatctcctcgcatgcatttcacccctgtccgcctttctgtaatctattttctctgaaggggcgcctagggccgtctttgcaggttatgtggtcgaaaacgagtttcttactctgcgcagagatgca

SEQ ID NO: 861 - DNA, 2863 bp, Toxoplasma gondii
  source 1..2863: mol_type = genomic DNA
gaaacagagaaacttcgggagaagggtgaaaaaggtgagggaaaggggggatgcagagcagctcgtcgattttttttcaagaaacggggctgtcgctttcttgattgggtctgtggaagagacatgagtttcgcaagtgcagatgtagaggggagaaagtctgcaagtaagaaatgaagtttcaattcgccaaatgcccaccgagtttcctgtaggggtgcgtcgtgcaaatttttcttgttcacgacgacagaacgcgattgccgccaggtatttaacttttttaaagtcgaaacttgctctcgtaaccccgcagtcgaaagcggaacggctattttcgacaacgaaggtccttccgatttctgatatttaagcacctggaatccggactcggattccagctatgataaacagacacggatattttgacgaattctgcaatttagcatctaggacactgaataggacgccatttatgcgatgccaacaaccaaggtcttcatgactgctgtacaccattccccactgaagagtgcctagggcaaaccccccctggactctttctcggtgtagccacatggtccctagaagggcgtggagagccagaggagaaagttctgcttcatttcagagaggaggtcggtgtgtgcgacccgacgactcgcagtggcaggagaaagtggaaagtcgtgggcaaacgacacatggaaaagtttcctcgcgtctctctgagcgaggcatgccccaagcatcagcgttacgccacgtctggtgttcagtgaaactaggccggtgggaattcgttgagaggcttttccatcgcctttgaagtttttcgcggcttgtgggctctcccgctccgctctgtctctcttcgtgtttctacccactgtaggtttaggaaactggggagacgcccctgaaggaacgtcctgaaaccacactcggaaaggttcctcgcagtccagcgacttcactcgactttcagagcgaagtcgttttcctcaccgtcttccgcggtctgaaagactgcttcttcctccagtgtgtgtgtttttgtgggtgcgtgcgggttttctgtgttttatgcacagacgctacggggacgcagtttccttttgtgactttcagcgccggctccgcgctgtcaggtttttcggatttcttcaggcgacaccgtggcagcttgccacctcccgctctagtcttttcggcagttcctgtgcattcacgttccagcgagtgttcctttggcacgccggaaaccctcgttgtcgagaccgagcggcgtgggcccggctgccctttctgatttctcgcgaagcaaccgcgtgttcggcgtttctctccgagaagcaacctggtttcgtttccgttgaggaggcccttgttgtaaggcagccttgccttcctcggaacgcagaaagccgagagtcgagctgggtccacgcgacactgcctcaagtgttcccacgcgttcgtctcgatattttgtaggcgcggatttcgaggttctgtctggtttcgggttccgcgggtgttagaagacgacagtctcgtgcacagagcgagctgggagatccttctgcgtccgttcctgctgcaaaatcgagcgcgactctagatggcctggtgaatttctaaccgagttccaatcaacagaggcaaatgatacaaggttggcctgtgaggttcagtgcccaggaattcgcactgtggacgcttgcagagcggttggcagaccgaatgtcaacgtagtacgaatgtggctgtagcaaccttttgcttgaggatgcgagacccgaggatttgtgcgcttcctctgggattccccacgtgaactgcggaaatatacaccatcctgcttcagatctatatggacccagtgtgctttgtcctaggctagtttccgtctgtaggcggcaaaggttttttacgccgcgcatgcagtggtggaaaaatgcgagaggggggcgggctcgctttcaccacagccgcgaaaaatatgcggaaatgcaagccgaaatttgcacacgcaggcatctctttgtgttacgcccagcgagaaactgcagttttctcggacactcgaatctgggtgcccgcccatcgagatacctttgtcttaacgcggtgtctcgcggacccctctctcaattgcgactttgaatgcgtttcgcgagacgaaaaggagttctttgtggaacctcggtgcctttgcccttttccccggtcctttctctgcatgctgcgtttccttgtgcatatcctgcccactttgtgtacgcgcaagcgctgagttgaaagatcttgctccgcctcttttccgctttttttcccgaggtagaagttagcaagcagaaagagccgtacgtttcttgtctggtattttcggtcggctttctgttgctttctttgtggcgttttccctttcgtccccctctgttttccgcgttttctggcgcgtaacggcagcacgcgtttctcagcctcttcgaacggcacccgctcctttccagatatttctttccacacgttctctgtcggaaatctccatttttttatctctccggcgttcggccatctttggatttccgcgcagcttctcgaacggcggacacaggccgtcgcgctgctctgccgagcaccagaccgggggcacttcgggtgtatgtacacctcgcttctcctgtttcccctgtcagcgagtgagacgccgaaccccgacgatatgcccggagattaagcgctttcgtctcttcaagcattcactcctcttgaatcgtgtcttccgttgtctaccgagtttagtcactcttgctagttcccttgactttttcgctgcctcacagtgtcgcaaaaa

SEQ ID NO: 862 - DNA, 2370 bp, Toxoplasma gondii
  source 1..2370: mol_type = genomic DNA
gggagcaacccaatgaaaacaaaagcaggaacaagaagtcaaatgagaagtggaagatgcgccttaccgcaaccgctcgcgtggttgcacatgatgatggttcgacgggggtggtaattcctgggcgggcggttgaggaatttgactctccagaaaggcagacagaacatggctgtgaaaagcagacaccacagattccggcaacaaacacggaacgcagatgatgcgacctccgaccggcgtccacccaagaaaaacttgcttgaattcgaagaagaacgtccagtcgataaagtcttggatgccgaaaccttgtggaaagaccaggacgacagcggcaaatggcagacaggcactggaaggttgactggggaactcaagtcagacacagggaagaaaagcagttcacaactcgcgcagactgcagctgttccgcgctgtattcttgtaagatcagttgtcacacaaaattcggagcggcactgcggcggcgcgacggcgacgccttggcgcaaatgttccttagacgcgaccgattgctcttctcgtctttggtggtgattccccggcgcaactgtctcggtctgcgtcttcacaggggaaggctcttgccacaagcgaggatcgagcaacagcgaccgcgttcatacagacgcgtccggaggaagaccaagaaaagtcttcggccgagaacaaagagaatgcagagacagagaaggaaaaaagctgaaccttgaacagaggagactcacccatttccatgtacgcctggaatgtgaagctcaaaacgcggcggcggaggcctttgatcgtcaacatcaagggcaggagaacgacgagctcggccaattcagtgaggaaggccagcagaaagaaaacggagacgaccaggtagaagtaaatggtcatcaagactcgcagcggcgtggacgccatcttgccaccgtgagaggacaccggggcaaagcggaggctagtcaaacttgtcagaagcctcttttcggcttcccagagaaccggcagctctcggtgaactgaggcgagaggacagtctgtccaagaatgcaggaatttgcgtcaggggcggcaaaatccgacggaaaaaaccaagagacccgcgaagcgagtggtggcgcagcgaccgtcaaagggagcggtgactaaaccagacggagcgtcgaagcagcaaaggacgaacggtgcggaaggttttcttgccaaactctgcgtcacgagctggcaggaattgccaaccctcaaactggcgagacgggaagaacctctgcgagacgacgggtgacctcgtcgattccgcctcagaaaacgcgaaaccgatagtggtgaggacggagtgtaagaagaccgcttccagacaaacgactcaaaggcgaaaaagatttccaagaggcaactggacagacggggggaagcgacttaaaaacctaaaaaaactcgccggcaaaaaccgatccgctgcctgcgatggatataataggcggtttatccgaacgccgtcgctgccagaggagatttgagaggtctgcagaacagctagaggactttgcgaaggggcgcgtatgtgtacttgaggaaaaaggcaggtgtgtgtcacggttttaccgcaaaaggggagaattttccattcgaggcgccggatacaatcgcttggcatcgtcggctttgccggtgcaacctgcgcgcgagcggcgcagcgcagtttcagagcttgctcggacatgtttcctctcgctggcgcagctgcttcgtcctgagtgcatgcagcggtcttggaaacattccaagatcggcgctgtcttcactttggtttttcccaggaccgtggcttaccagaactgcgtttcgcagctccacgcctcgaagtacacaaggtctcaggtcgcaaaactctcgccggcccagcggactgtcctcgcttgtctcacccgccgcggtctcttcttgtggaggcttctgccggcgagttttcttgaaaaagccaagcgactgcggactctgcaagactccgcgcaagtcccggcgcccatctacctttctggacggctggctgcacaccgcaagactccgtgacggagcgacgtcgggcgtttcgcggtctgcgcttgtcggcaaaaccttcacgatccacgtctggggacagtggcgaaacggttgtttttccgtctgtctgaggcttgtactccccactcgcgaccttttgtcggaaactcgcttgcgactttcgcagctggaagctgtgtgtgtgaaccattccgtcgcgttttctgcgcaggcccctcgaacctggggaccccggcagactccgccgaaaaaccatcgcacggccgtccttgccctcctcgcccggcagaa

SEQ ID NO: 863 - DNA, 2219 bp, Toxoplasma gondii
  source 1..2219: mol_type = genomic DNA
tctctcctccatatttctcacagatctctctctatctgcatttcgatgtctacgaatggatgtcttgtctcgctctctctctccctgcatctcttctcgccccttcgcccaatctcctccctcgctgcctcggcttcgcggtgcacctggaactcgtggacgaagtcgccgcggcagatcggttccgccatcgtcaggaggagctcggtggcttgtctgttggcggcggagaaagtctcgaggagaattgtgccgtcgggacagacccagagagggcggtgtgcgtggtcgacttttagcgccagtttcgagccgaagtctctgaagcctccgactccgagactcaagctgtcagcggttagaggcagactgccgtacactccgccttgtgcagtctcgctcggccgcgcatcctttgtcttgcccgcgctcttctccgccatcccctcttctcgcactctcagagcaactgggggggcgactcggggaacctgagccgccggccaagtccgcgacgcgcgactctcccgatcggcctgcgaggcttcatagaggcaggtgtcaggatcccagtcttcgtcgtcaggttctgaacgccgaaacctcttcgcggcaggcggactcgacgcgcggaacggggagcgcgcctctgaagaaaaggtccccgaacaaggaaacgcgccaggctccatcgttccgtcgcaacgggagcagaaaccgttctctcaggcaagagtccctgcttccaacgcggatacttctctccaccgactcctcgtctccatctccgctttgttctctttttctcctccgtctccacctctctctggtcttttctctccttcttccctccttctcttctgctgctcttcttttctcctccccttcttctcttcgagttcttctgctctgccgtttttctctcctggcaaaagagaggctccgaagatagcagcgaggcacagagaacaagaagaagtcgcttctcagaagattcgtaagtgaaaaagatggacagttgctgttcgtcagcgacgaggcgcaagtttcggcggaaaagacacctagcacgcagaaagactctccggagaaacggaaagcgccaagacgctggagatcggaagctgcagaagaagaaagaggggaagcaacgacagacgacgcccgaagccgagacaggaagagacagaacagaagaagttgaagtgagggtgtgaaatgaggataggcgcgcgcgttctcgagattccagataatgtgcgaaaaaggagagagagaagcaaatcaaaaacttgggagaaagagacgagtgacggatacgaaaatacgaaagaagagaggaaagtcgacggtctccgaagatatcgttcttcgatcgtttcggcgcgggggaggagaagagaggacggcgaaaccaaagaatgagagtttttcttcgaaaaaagagcgaacgcgcgtttctctgtatcgccgattgtcttctttatcaaagtgaaggactctctctccctctctgctctcttcggagggaacgctctttttccagtgactcttttttcagttcgctgcatgcgacgctttttccaggtttgctcggcgctgctgcactggtcggcgcgcttttctcgccgtcgaagaaaaactttttcttctccctccccagaggaggggaccttctttgtctctctctcctctcgctcggttctcgtcgccctccccgcgttgctcgcaaccgtcgactccgtgcgctcgtccgcgtcgtgtcttctcagtgtgcaccctggcgaaccactggcaaaagagagcagagacagccgcgcaagcaagaagagagagaaagaatcgaaaagagcggaacgagagaagagagcaggagcgtcgaaggaagactcgcgaatgaagacgagaaaaaaagaccaagaggaagacaagacagagaagaggagcagattgagaggaagagaagaggaggttgagaggaagaaaagaggagaaggttgagaggaagaaaagaggagaagattgagaggaagaaaagaggagaagattgagaggaagaaaagaggagaagattgagaggaagaaacgaggagaagattgagaggaggagaagaggagaagattgagaggaagaaaagaggagaaggttgagaggaagaaaagaggagaagatagagaggaagaaaagagattggcacaagcttgcatctctgtgcaga

SEQ ID NO: 864 - DNA, 1591 bp, Toxoplasma gondii
  source 1..1591: mol_type = genomic DNA
gatttctgcgcgaacgacatgtccgtcgttgtagccgagaagaaacgcgaagtgtttcctgacgaggaaccgcgttttctcttctgtcgcctcgcctgtttcctcttgcgggtctctgcgctcctgccgggccttcaccccgaaggcttcgtggactgcgagctcgtcgacgtacatttccatgaagaagttctgttcgatcagttctcgccaggaagccatgcgctctctgttcaaggccatcacgcagagcttccgcggcgtctcctcagcgacgccgtaggcgatgtcgaaccgactcttcatcaggcggtcgccgcgcagaacctgccccagagtcatgggtgcgtactcgaccgtctcgggtgtgcagacgcctagcttgtcgtagaagttgtacgtctccagcggattgaacagaggccaagccttgctcacgcagacggagacggcggatccagcagcatgcgcagtggcgtcggagaggtacgaggaggagcgcgagagcagagacgaggtcgcgagcttgtagaagagaagaagaaaaaacaacagcgcgagcgcaggcagcacgcaagagccgggcgtctctcggcgctctttctcgcgcgcagacatccgtgaattccgcctgccttcaccgccgagggaagacaactcgatgccgtccttcatcgtggagaccgagaagaagacgcggtcgacgtccgagtcggcgacgaggagcacagcgagagacgaaaacagaccgagagacagcagacagagaagcagggacttgggcgcgtctgccacacacaggcacggggcgatacagcatacgcgacggtggagaaaaaggagaagacagacagcagagagcagagcgaagacggaggagagagaaggggggaggaagagaaagaaggaggagaagcgggagaagaagcggagaagaaggagaaaacgaacgaggagacaaagagagagagagaaagagaaagaagaaaagagagagagaaagggagaaagagcgagagaaagagcgagagagagagaaagaccgagaagacaaggagagagacaggtgtagaagaagaggagaggtcgagagatcgaagacgcaggaagaggtctgggaaggtgcagcaagacggattcgggatgaggtcactctctcattttctgaagtttcgccgtctattcccttgtctgtcttgtcttcttttggaggcaggaccggcggatgtgcagagagtcgtgagtgaccgcggcatgcacaacaaaagagaagctgcatgcagttttctgtcggtttctctgccgctccgcacaggcggatcgaagacttttcctctccactcttctcgcaccttgtctcaggcgcatctgacagtttcttgtgtcgaaaaaagacagaacgaccgcggggctcttcttctccgccgagactcgccttactagctacgcgcaacgcgtctgacagtgaacagggcgcttgacgccgcgtcacgagaaggtctcttggtccgtttctctctttttcttttcttctttttcttctcgttttctcatgttttcgtctcctcacaggccggtcctcaaaactgaa

SEQ ID NO: 865 - DNA, 1429 bp, Toxoplasma gondii
  source 1..1429: mol_type = genomic DNA
acaaagaggaaccaagagccacaggactcaggaagcttctgggagaggctgaagaagagacggagaccggtggttctacgtcgacatgccgacggggagacaccgacaagccaggcagtggcctaggcgaaagaaaccgatcttctctggggtcctacgccccctaagaagacatccaatgccggactcgactgtccaccggatttgtttgtttcattgctggatttttgctctgttttttctcaactttctccccttgtgtcgttgggtcgaagctctccggaaagcacaggggaagccaaaacagttgaaagaaaaactgcaaacggctttggaaagaaaaccgataaacatttagacaaaacgacgtttcctagctttctctaaagaggtgcgtgtgtccagtctacgtcgacgtctccaaaagcaaagattgcttcgagttggagatgtcgacttccggcagactttcgcttcccccacgaccagggacagacgagaaaaagacatcgccaatcgaagctggtctccgtagagacactccacaagatactccttgtgttgaccacagggggactaaaacaggagatcgagttttttgcctggacgttttcgagttgcgacagaacaggcgcttagaggggaggccatcaaagcgagtttcgcgggagagcagcacagtttccatgcagaagcaggttgttctatgctacgctggatgaggcaaaaagccttgttcgtgacgaaagtctggcgttgcagcgaactgtctcctttgatcgtctactccccatcacagcaaatggcttctgcgttcttcagacaggtccttttctgaaacctagacacctcgacttttgcagtgtgacatgcgttgagctccagttgtcttgtgactcgaaaaagccttgttctccaaaaacgcttccacgattcgttgacttccttgcacattcaacagactcatagagagcgggagctccacacagacctgcctgcatacccctacagctgcgtacacagttgctgagatgtaagtccatgctgaagtctcttgcgaaatcaatctctgttaacgagtactcagatccaaatgtgtgcgtagtttttgggatgcaaaggcagatttcgtctacctttgagacataaatgtatgctaatgcatattgagatccaaatgcatatttatgcgtattgaggtagaatttggagagagtggcgagctcggctctcgtgcagatgcgtgtttccaagctaacgcgaggtaccctcatgcacacatgtaacttttcatgcgagaagacgaagagcggatgcgcgaactacgagcagaccgaaggagttttcactaatggttcgtggaagcaggaaacatgattcggaacatgattcggacggctggctgggctcttgaggtctgcgttcaaga

SEQ ID NO: 866 - DNA, 1365 bp, Toxoplasma gondii
  source 1..1365: mol_type = genomic DNA
tcagacggaataaattgtagcttcttctagaaatcacttgacgctgcgggcgttcgaaactcctcggctattacacagacgatgtgttaccaggataagtgagctaagcggatgtagaactaaggtctgcaacgcccctaaaaatgtaacgtggacagacagggataatctcaaaaaaacagaatgcgggctacgcgtgtggcaggacaaaaaggcaaaaaagggtgcattggaaaaaagacgcgtcgcgtttcactttgcgggctctagccacgttgtcagaggatcaattctgcaaaagaaagtgtctacgcacgccgcgcatatcaaatgcttgctccccgctgtgcgggacaaactttgctaacaagacaaagctgagatccactttcttctgctgtctacatgtcagcctatgttcaattccaacttaaggtatatgacctccgtcattcacgtaactctccaccagcatcgtctcaaatggtagtccatagcgtatcatggtcggccactgtgatgcccataatcattgatgttctagtttagttgatatcgcgagcatggcactttcttcggcaaattgacattagcgaaaaagattcctttttgaagactgtgtgtactcattttcgtggccaaacgtgacaggcgtcagacgacaaaaaacaccggctggagtgtgatatgacagtttctgtgaacttgcttgagtatcggaccggcggcggtgtgttggaagctacagagttttcagcgaaccaggtttgctctgatgaacctaatttccaccgcatttccgctgcaaattggtgtttcaagttttctagtgagcgctttcagatgttctgctgacgggcatggagttagcatcgcatgcaggtcggcacacgtacggcggcaacagagtatacggtgtctttaaacaaagcgaatgttggtagcaggatatccgttcagtggaacaatcttacgccttttgtacattccattcaggcgcgtgaaaccattcaccaatctcgtgttgaagcctgatgtgcagtttatcgcatttctcttttttaagaggcatgcaacggcgaatctttttttgcatgcgagtagactgcccggttcttcgtttcttccgctgctggctttccctccgattttcttgttcttgcttcaccattaccactgccaagcctctgtgaaggctccattcttcgcagtcttttctggggcgggtttcccttctgtggcgcggactgtctgtcgactgagtacccagctgcttgagtctccgaccggccgactcagagcacatacatcggtgcaccaaacacgcgagttttctggaaaggaagggtgtccttggaagagaaa

SEQ ID NO: 867 - DNA, 4444 bp, Toxoplasma gondii
  source 1..4444: mol_type = genomic DNA
gatctttttcttaaagttcatcatcctggcgacagatcggagaaatcaccagaacgtcctgaaggaaacacgcaagacacagccacgcgtcaatgcagaaaaggatccggacaccaggtgcttgcacatccagatgaagaaaacgtccatcgaccacagcgtcgaaaccctgaaaatttggcaaactttctgcgtgcaattctcatcaaaccgacacttgaacatccacaggggcactacatgcacgtacacccagtcgtcaactctggttgtagcaggcgacaaaaaacgcccgaagaaaaacttctggtgcctgccagccttcccccaaactgaacagagtcttcacgcacgcaaatacacccatgcacaaggttgtacatcatacaagccacatattcgcgccgacccgcgacagctgcacagagagaacagcggtgtcaagtacgtgggtgggcgaatcgagaatgagagatggctgcgcctttcgccactggaagaaaacgcattttgaagaaaaaccatcgagatgcaggaggaaaaacgtgagtgtggctgctcgcgtggagttccggtgcgcgtagagccaccacacgaacgttaagaaacaggggaacacagcggggattggccagcctgcccctcccggcaaagagccagcgattcggagagacacagtcgagagactttcattggaaaaaaaagaatctttgcggattgcccaaaggaggacatggggaactgcgccgtcgattcgtcacagccggcacccccattccctggcaggctcaacgctcgcgccagacgcccgcactcgatgtagacaggcgctccccggcgtatcccatacgcagaaatacagatattcaggagcaaaatcatagggaaaaggatatgcgcaaataaatggtgggttctgtgggcgttccagcatacatacagatgcacgcgtaaatgcggccgtttcagcggcgctgcgcctctacggcatacccgaagcgacaggaaaaggcgtggaaaacgtgtcaacgacctttgcaaagcagaaacggattgcagagaaaagccagagacacgagacccgtcggagttggccgaaacgcgaagaaaactgaaacgtggcctgctgtggggtggctctgaaatggcgccctctctcgcagtcgccaccgcgggaaaaaggaccgggagacagcgaataacatacgagagacgaaggcagaggcacagctttttttccgtcctcgactggggtgaaattgcccttacctcgtctttagagcagccgaatattcatgtttttgctccagcacagcacaaaggggcgaaaaggctaccccatcgtccccatactaccagttcttcgctggtctacacagtgagggaaatattttcgcatgcatttgcctcaccacgtggggacggaaaaagaaaccatcatatttttgcaaagcacgcgtccgtatatagaacctaggcgcgacaccgcagatcggcttatatacggagacttgccaaaaacgatcgtagggagttcgttagacgtgtttccctgaactaacaaatgtgacaaatgtgcgaccagacaagacgcttccaaatatcaacacacattcgcttcttcattttaaagtcggtttttgtgagaagaaggaagataaaaacatgacgtaaggacattgtgagactccgaaaatgaaagactggcaaccaggcgttggacgcatcgcccggtacctcgatcggcttagttcgcgatgctacccactccacacaaaatgtagtaacatagccccgcaatagacgtactacgtatatttttaaaatatctgcacactggaattgcatcaaccgttttttacggctgctgtccccctatttctcagggccgacaggatggaaccaggaggtactggttttagaaaacgatcgtacagcctcgcacaagctcgcttacaagaatttgagcctcgttgccggccttgggaacacacaaaaagtgagaaagatattgtgctgagcttctcgtgtgaatgacggcacaaggcgaatgccacactccactctttttctctcatctgtcttttgaggcagggccctcgactgaaagggggtgaagttagaatatggacagaaagatacattacgaggacacatttttttcatgttatgcatacagcatccccactctctcggcggtgtgcaatcttttttgagagatgtaggatctccaaatgctagacagttttaagagctgtacgacggtttgagtagccctgacacggtgtgtcctcacatggtcaatgggaagccagttgttccgactcctgcgtccacgttaaatacgcagatgttaccagagccattcgaatggattttggtgatggagtttcacctcaacaaacacagattctgtttaatttctgttacgacaaatagtacgtaaatggctatgcgactgaccagcagaggtgtacctatgaggcgacgaacgaacgctcactaaattgaaaaaacttcactcatgaactgcctgccatgtggtctttcatctgcatgttggcgacaccttccagaaacagcagcttttgttcatgtgtgtagaataacacacacaggagcattctgtttccagggagtcgcatacagctcaaactcatgacagctgtccgcttcttttcctcagatgcagttagggaaatgactgaagctgttgttgttgccacctgtgtgcacgttaggagattcagcttcttctcaacagtgctgtagacaaattgaacagaatctgcgtcaggggtgaagaaacagcatcacacgtaccgtagaagctttcagaatgtccaggtgtctctatgcacagtgtccggcaaatgtattccactggaagagcacggcggtcgagcgttttccggctgcaagcaacggcacgacctccactcgcggaagcacatcgcattttccttagcatggaagaagctgtcaacggcttcaacgagtaataacgcacctgggtctgctcgtaagtatctagtgagcgtgcttgacgcattgatgtgttgccgtggtcggagtctcatgttgagtctaaacccgccactgtggtagcccggaacactctccccagctcgtgttggaattcctttaaagctttaaagccacttctttgaaggagcatagatgagacctgttgttgactctcatgtttgacttgggacaaagaagacgtgcacaagtttgctggactcggtcccagtggcctccccccggacatcaattgggacaacagcgaaaatgccacttcagaatacactcgcgttgtgtgtggatagttaggagcaaggctgtctctactggttcactctagccgagacgagctttagtactgctttaatgaaagctagtgtcgacacggtacgggtcgattgctcataaggccggcggtgtatgaactcaacgcccacagaacaaacatctgactaaaacaggctcacgttacaatcctaaccgcctccaatcccgttaaccgtagccgtgacacacctgtttagcgttcgaattaaagcccacgtttcttttctgaactcccgactctttttccgtctccaccagattgtggcatcgcagcagcaatggggagttgaccgatgtggaacaacgtttttcagtcatatagaggcatttgcagttgcatggttcccggtacggtattactgtagcgacactgtaagtagcttgcaccttttttactgtttttgctgtgccggccgttttgatttcccatcctggcgttggctttctttacactgaacaaagagaagtccgaaatggacccgaaaccaagcttccagtcgacacggaggcatactccttttcctcttgctttcagtctttcctcactgaacagaaaatcctccggccctcacgtggtgctcgctccagtcaaagcacctggcgtttctgaacagaaacctgacgcattttccggtgtgcctcacacagtcgacagagccgcgactttttcccgcgatgctctcagggggcgactcggcgaaacccacttcagtataaacgacaagacacttccctccgttggccatgagatactgtgtctaacctccagaagacacgaaagaccgtcgagcggcggtacgagcggcggtacgaggcgctgctgtgtggcgtaacacacctggggggtggcgacaagacaggagcccgaaaatccaccgcctaccgggggttaggcgagtaggagttgccccgctctttcacaggacacgaaggctgttgaggttctcgtacagaagtcctctcgtctactgagacatgcctctgctttcactttatttatttccataagactttctagaatcacaccgctttcgacagcgcccttcactagagaactttgtctgtcccctttctcacgtttcaggcaaca

SEQ ID NO: 868 - DNA, 1714 bp, Toxoplasma gondii
  source 1..1714: mol_type = genomic DNA
ctcggacagcaggcagtaggcgagacatttgagggtgcgacgctcacgccattcctgtcctgagaggagtgattctcttccgactctggggagtctcgagaagagcctgttgatggcaagggcaagagagcgagagacgccatgcttccccgctttttctctcctcgctctcttcagtgcgaagtctaacccgcagctggctacgaacatacgccgggggaaaaagcgaagaaaagcgaatctccagtcgacagtgagacacttgcgtgccgctacagagaagaaacatgtgagttaaaaaaatgatgaatctcgaggatccgtcatatatatatatatatatatatatatatatacatatatatatatatatatatacataagtatgtatgtatatgaataaatgtgtacagatatgtaaatgtatgtatgttcacggttactggcacggcgcgaagcgtatcgacttgcgtaggtacagctgaagattaaaggccatgcgagaaaactgtcagtttcccagtttcttgggtgtttttgacacgcacaacaagcgagtcgagacgtgtatgcgtttgaggcattgtttggattcgtatgaggaagagtgagctttccactgagaaaaatacttggaaggcgttaattcgctgtgcttcgtccttcattgagacgaagcttccgccgagggggtcgacggcggggaagccgagcgagacaagcagagacacaggaaatgtctgtggctcttttccaacctcgcgtcgcctgggtacaaaggccagagaaacgcgagacgcgcgcgtggacggacatcacacatgacaagagttgcttcagcgaaaggttgaagcccttctcgggagcgaggcggaggcgtctggtctctcgcgaggacctcgaatgcggagctctccctggcgaagtctgggggctctactgtccgatcgagcgagctcgtattcagcgtcgctctctgtgcagactgatgcgcggacggctggaagcagcagccagagagaggccgcgacgcgtacgagacaagcgcgagtcgccaccgaggcaaggaagaaggcaagagaagagcgaaggctgttgttgagggacgcacatgccgccctcgcagcgaagcaaggcggcttccgtgagccgcgaccttctgtcggccttgttgaagaagaagatcggtctgaggagagactggatgtcgcaaaatctctcgcggaaagagctgctgaaccattgggttatatctctctgtctgcatgcacaagaaggagcgcgcgccttcgcgcattttcacggcgcgtctctcacggcgttgttccgcgtcctttttgcggctttcctcttgtctctgtagagcgcgggagctctcgcgaggtcgatgaggcgttgccagtcggggacagagagcagcgcagagagaacggtggggttgcagtgtgtttctcctcatcgtggggccaggagagggtgcgggagagcaactgcgccacggagaggaggtagggaatgaggggaaacaggtgaaggggacgagtggtgcatccgtcagttgcagttcctcttccagtttgcggagtcgcggcgcagatcgcactcttttcttttcgcttcagaaaactcttcaaagataagtctgtctgtggcgtcggttcacgacagatctctcaaccttgtcgactttcaactctcctcgctcgagacaaga

SEQ ID NO: 869 - DNA, 1681 bp, Toxoplasma gondii
  source 1..1681: mol_type = genomic DNA
gtcatctgcgcagttgacgcgccgaaactcgaacgcgtaaagaaaaaaaggaaagtctgaaccttactcttcccacccaaatttcttcagaatggaggctccgaaggaagagtggaacgggcgagactgtacaccgctgcccttgaggaggcgatcgtagaatttcttcgacatttttcgttcttctacgcactgtgcagtgcaaagtctgggcaaggagacggccgagaggcgactgcgaactcccgaaaggagacgaaggaaaaactcggggagacggcgaggcgcgaagaagagaaattcggaaagaagacgcaggagtgtaagtgcctccagactgcagagccaccgaaacgttcttcacgggtgctcaagaagagagtcgaagagactcgaggaaaggccgaaggcgcgactccgcagatgaacatacaacgacgacaagcggggaagcgcgcgggaaggaggacgaggagacctggtgagtcaggcgacaagctcgaagtgaactgcgagtccgactcaaacgagaagaaataacagctgctggtgacatgtaactttcagaagagaagcagccagagaggaaggaacaaacaagacggcgagagtggggataactctcgccgaacgcgccgtggccgcaacctgagtcaggccggtgagagagagaagaggagagagaaggtggactttgaggaaaaaattcaaaaatgacgtttcgcgaccagaaaatcgagagctaagaacatgcatgcaatgttatctttgttcagcgagagaggtcaaaaccgtctccccacattgacagatttcgtcgagaaaagcgaggagagagaacgcgagattcgatcgcagaacgagcagaaaagacccaacgtccctgtgtaatctcccgcctctttctccccttcctcactttttctttttcgctgcatgtagggagaggccggcaaagcgcagggagagaagagggccaaggccggaccggcgcgacagctgacagaaagagaagagagaagaggggggagaagactgctcagagactagtgtgtaacgcaaaggagcgtagagttcgtcgtgacttctcagcttctgtcttcttcagagagagcttgtccgttttgtttctcgattttcagagagacgcgggcaatttccgaggaacgaatacgatgccaaggttgtagatatacacacgaaaaacacacacacaatttaaagaggcaggcagcgacgacaaagaaccaacccatttcggagctgtgttttccttgtctcttgttgcgttttattgtctttgtctcctctctctgaagtgaaagaaagcgctcgctttctcgtacctttgtgtcaaaatcctctttttttctctcgctgcacctcctccgtccaaggttcgccgcaacttctcggtttcgtctctctgtgtctctttttattccatcgcgctccatttctcccctttctgcttctttcttgtgcgtcggattccttctcctccatcggcagaactcctgccttcctcggacttctcttcgtcgctgcaccgccagtgctgcgagcttcgccaagggtgtaccgtgtcttcctcctcctctgttttcaccccttttttccgtccgtttcccctgcttttccccccgtttcctgtcttttttcctttttcttttcgccagca

SEQ ID NO: 870 - DNA, 2764 bp, Toxoplasma gondii
  source 1..2764: mol_type = genomic DNA
atgtcgcatttgtagtgcacagcgcgcccgtcggagaggagtgtttgacggcgtctgctctgtctactgtgtttcatgtttatttctgacaagcgagcgggagagggggggggcagtgagggcgttggacacagtttcgtttttctgtgctagacgatgccgctttctttgtttcaagcgtttttctttcatcaatcgcgcaccgacgccttccctgggtcttgccggttcgctgcctctgcgtactagttgatttgttgttcgcgatcaagagacttgcccgaaacggtcttggggactggagcaggcacccgtcgaggtggacgttgggtttgcctcttgaatgcctagtttctttttctctagaagacttcagtggagaaggcgaacttcagaagctggaaaaagggcatgcagccgtctcttcagttccctgggtgctgtcactgctccccaccagacgacagagataccgcacgttgccgcatgcgcgatatcagccactctctcttgccggcgacattccctcaacgatgaaaaaacacaggaacgcagagggtagcggggaagttcgcgtctgaaacatgtacagctctgtgtcaacttagatgcaccgaacgcgccgaaccagatgcgctggagaagcaagttttcgaatatctgtcgagtctcaggggtgggctctctcgcagtacatctccaggcagggaaggctagaggaaggagacacagactcgacgcagacatcttccttgagacagttaaagacccacacgtgcagcaagaaccgcagatctcccgaaacttttttttcgaaacttcacaggagaatcgacagtttctgcgaaggaggcccgagaccgagtccccaggaacgaagcgcttggttgccctgccgcaccacaaacagcgaaagacatgtttcaatgttccccagtccgaggtgctctccacgtcacattttatcttgtgcttcataggttggacgatagccgcttcacatgtcttctacgtttagtggaatgagtcgagcggcgctggggtatggtcgacaactcgaaacaccctgccgaagaggccttttcgccgcagagataatgacggatggtggtcgacaagtgagatggaagtgggcgacagcggccgcgcgatgcagaatgctgaaaagcacaagcaagtaaaaaatactaagaatcgacgctttattcatatatatctatatctatctatatatatatatatatatatatatatatttagatatttatgtttgcttgtgtgcagacgtagagatgacactgtagagaagtcgagggcagcagcagctcggcaactccttggtacatactcatagagtgagattttctctttcctgtcacgatcttcgctgggggggcggcttgactgtgaaatcggtttacgaagggatctcgttcagcgggcgagaccggattgtcgttctgcaggtagatgccttcctctccttcgatttgatgtgaaaacgacatggcaatctttcaggaacagcggccgagggaaggactcctcagtcgctgttatgtgagagtaaaccggtgaccccatatcgcgcacaaacttggaaaggcgttaggcatctcgtctacagactcggaaaaatacacaccgagtcataggctgctttcctgtctgcagaacgagcgaggaaatcttcaccccacgacgttcgacggaagaggtccctgaggtgtaactctgttcagtgaaaatcaaagaagttttgtgctctgtgtagtgccgggcgagtctctcaatgaagaacggagtttttgacaaaggcccatcggctgcgatgatcgcgagaagaccccgcgattttccagcgttggttccagtgagtctctctagcaaacggatttttttctctgctttttaagtttgtgtgtcttgctagcctgtcttggatgggtatggtggcgcggtgcctccagggagagaggaaacgtggaaggggactgaccatccgcccggagaggaagtcgaaaagacggggggaacttggacgaaaacgccaaaaggagagtcttatgctgtggtaaaagtagcagaaagggagagtttttcctctagagaaaatttggagcaactgagcatgaaaaatcacgaaaaagtctctggaaacaacgcttcagcgtgctcacggggtgaccctgtgttgcgcccttgtcctcgcttgcagctcttgtgttttctctccgtttgtcgttttttctccattttcttttcgatccgaattcaacggtcttttcaatccttcatgccctagcgagtgtgtcgcgccctcaactgtttgactgtctccgtcacaagccgtctcgccgtcacgttctttcttgcagccttcttccactgcgcgtctgggaacagcctcccttcttcctctcttctcaccgcttctgcgtcttcattttctcttctcaccgcttcagtcgttcctgtggagggtcctctccgtcagcttcggctccagtttcctccgcccccctcacctggcgagcacactgtctttttcgtctcgtctttcctttcgcttgctctgactgttccccttcgctatcaccttttctttgcatcgtggcgcgcgattcctttgcgcggccgcctttttcgcgtctgtcctgccgccttgtgcgtgagccgcgctgcctcgctgttcctgctgcgccctgcgcctgttaacgccggctggtgcttgctatctcccgtctctccctcttctccacca

SEQ ID NO: 871 - DNA, 4455 bp, Toxoplasma gondii
  source 1..4455: mol_type = genomic DNA
tgatgcacgcggacgcatacccgtgtactgaaatcgatgaaaacgcacacaacatatttgtattcacggacgcatacacgcgcgcagatatgaaaaagtagacgccccacgacgctgccttctggctcaggagtcccggcaacaatgcgactggaagaaactcctgtttgtggttcggcgttgaggaattcgcaagcacatgtcagctccgttcacaaagagctggacgcgtgagccgacgcgagggtttgtcttcaaagcgagggtccttttgtcgcagcgacaacgaatccagaagctccacaagcgcatgcaaccaagagatgacgcgcaggggcagcgacccaggacaggctgaccaagatcaaagagcttcgtgcacacgacttctcttcaagcagaaagtgtacatcgttcccacccaagcgtggcggatgttggcaggtccgcggtaccaggcaaagcgggacggaggcatgcgaagagagacagggatcacacactccaagtcagttcacatgagacaagactggaataagacagagcctttgtcccgagatctctctgggtcaccttgccacggcgatccatctccgtcacacgcggctcgagtcctgtcttttccgacagcgacgcatacacatacagacaagtggcgcttagacacaggcacgcatctctaggtgtggagattcactttggtcaacttccagtcttggtttctccgcggagtccgacaccctgccgcgaagtcgcgttctccgacacgactctcacacacaggtgcatccctctccgcagttcaccgaatgcacactcaaggacgtatacatttaaatcatttcgggcatttccaaactgagcagaactgggaaacggacaaaatcctgctggagacacggcgtccccccggtcgcgatttcgaaacgcatgccacaaccgcagacgggggactcttgtctgtaagctcgcgggggattcgtacgatatgttcttgcattcctttccgccaaagaattctccgacccgtcagcagattgagtcgcctcaattttccttgttcgtttcaggaaccaccccttgcacgcggagccagcccctggggagatacgcggtcacacagcgcgacaaatcgctcgcaaaattgtcccgcagacaagtggccgggacgttcggagcagaaaagtgggaataggacagcaattcactcgcgcaaaaagaagatgaaaccggcaaaattcgcccggcgactcactcgcacagtctaccccccgcttctggggagacgagaggaacaagggtcggtaactcgcgaacccaagtacagttgacgaacacgcgcggcggcgtccaaccttccgtgtctctcgcaacgacggtccaggttctttttatatctcacaccgacgtgggacgatgtgtcacacgattcctgcacccaaacagagaaacgaatgcgctgaggacgagtggatcgaggacggaggaagcacgcagcgagcatcaggcacactgcccgatcgaaaggcgggaaaaaggcgtcgccgcccgacgaaaagagtactttgcgttgaagtggcaccacatgtgaaagcgacaggaaaaaaagagcacaaaaacagggttttcaaacagaacctcgtagcatgccccgcacgcgtatgccacggcaagcaccccgatgtcacctcatcccccccgcacatttcgaaatgctgagtcgactcacgctgtgaattacggagcagatgtgagagaaaagagcggctgacacacacgcgttttggcttacttgtatgtaagcaagtctcattgacaatgagtaccgaacaaatcgtcacttggatggcagcttatctgtcagatcacgtgtatgtgcaccaaggcgggtggctacacgctatgtttcttcgcatagtcaatcgagctctgggggagagacgcgggaaactgccacgccttgctcgcttgcaatttccggagtgcccgaagctcggggaaagtattcgacagaagtgtgcacagaacataccaaaacgccttctgttgtggcgtttcaacacaagggaaatcctatccagcagtccagcgcactcacgatgtttagcgcgcgtgtctaccgcggtgcctctgcaacgatagcatgaggcactctgtcgatggcgcgaggtggaaggcaaaacccaactgcgcgacgttgagagcacgcgtacctaggctgtggttccctctggtcccgcagtcgactttgaagacaatcgggacgacaaaaccgttgtcaggcagttcgcaatcaaacgtcaagggaattatctgcacacaaaaatcaagcacgcggggaatcgaatacgtcgaccgacgcacgaattaacgcaatttgtagtatcgctgtattgaccagtcctgcagaggaatcagagtacgtctagttgaactggtagacacaaatggacaggcagatatgtccggtgtttgcgcttcatcagggcaacaaacagggggtttcctgtgttaaacgagcaaaggctgcggggggggggaggcgaaaatgatgtctgctggttttttccggtgtttctcccgtctaagcaataacttctcggcacaaggctggtaagttcccgtcgacggtggacagacaacttcaagggagcgactaaaactcgcgtcccttagcggctctcgccgccttactgaagcaaaagctacatcaataggtggcagaggagatggctttcgttcatgagaagcattctcagcgaagaatctataaagtggccgctttcagtgcccccgaactcagacctggcgatcctggcgtctcctcgttgccccttttagcctgtgtttgcaccgaatatgtttcttggtgaaccacccggcactgcactccttccagaagctttcttcagctcgttttctgcctcctgcgtttgagtaaaggggaggtaccaattgaagaagggagatacgtccgcgtccgttctgtccaccgactattttttacacaactgttaccttgaaacaggcagttccggcggacacagattaatcacacaatagcgccgcgtactccctccttgaagcccgctcaggcgccttcccgcttggaggagagagaagacgtaggggatcctgaggcagaaagacggggacaccattcaggacaaagctccttatttggaaagctcctcgttttgctttgtcgaaataagacacccgacagggacacgcgcaacagacatgtcgacgactgcatacagaagagcggctgacatgtatgtgttcttatcagcagaggttcaagaagagtctgggatttctgggggccctcgaaaccaggagcaaatacgaattcggagtcgccgatgcgctgtgcgtcagctgtctctgacctacggcatatttccgtagaccagctcagatttctgtacctacaagagaactggcacctgtatgcgcgaatgtaaggttcggcgtgtatacgtgggggaacgctgtctggccattccgggagggaaaaagaaagcgagagaaaaggaagagagtctgtggttcgcgggaaaacccaggcggcgaggccggaaagcgcacttgaaaagaggacaagggaagaaaaagcgacacccatgagagcacaggatgcaaagcaagaaggattattgtgttgatggctgggaagccacggcgaacggcgctcttcgtgactgccaggttcgctgggccaggaaaacccacgcagcgaaggcgctgacagccgctcccctctcgtaggtcggaccttcgccccacgcgtccaccgtccaccctgatttctcgacaccttcgaactgctggaagtttctgattgtctaatgcacctggtaaggcagctgaaggaccgaaaacggcagcaggcgttcgcagggcggcttctcatgtaattccgttccacaaataacgcgtgtctggtcgagattgttttgtacactggacctctacccttgacatcgacagtccttgtccagcgtgtccccccccccccaatcgtaaacacgctagacgccctcacgtggaaaagggcacaccattcctgcatgtttaacctgtattcaatgcgtgtcatgccctcgacgttgcggctggtccttcgattttctgccagtcacgccgccacagaacacgcgcctgcggaattcttaggatgatgccctagcagtttcttcttgggggggtacaagagcaactatcgaaaacaacaggggcgaccccactcagctcaagacgcttccagccagcacaggagtccacgctagctgaattttctcagctgctaacgactttctctcccagagcgccttcagcctcaatcaaaagccgttcgtctgcgaccaccaacggctcgcgagccccgaccctccatctacccttctacgtattcgagaaacaacttactactcgagacgtttgcaacaa

SEQ ID NO: 872 - DNA, 4225 bp, Toxoplasma gondii
  source 1..4225: mol_type = genomic DNA
acacatgtatttatgcatgtacatgcatacatgtacagatacatatatagctgtagatccctatgaaaatctctccaaatgatacagatagaggaacaggatgcaaggttaagcgaagaagcgcgagaggaggaacgctgggaaaaagaaatctattctgagaagcctggtcaggtgcagaagcggtgcaggatcagaggtcggggagaaaaagaagaagcaaaaccttgaccgttgtcaagacagcatgttctgtcttgtgcgcctccatcgcaaatggacatcgagagagagagcgagagggagaggtcgcattcactccccaagagacttgacgattctgaagatgtcacctcttggtagtcgtatgttcgcgcatgcatctgttggacgttctcccatttttttatgcacacaagacgcaaagggccgtctcttttctctcgtcctttcctgtcagtatacgtatttttgaggtgtctggacacgtagaaaaaaacgtttctcctcacatttttcccgtcggctgtccagagcgcctgttccacgccttcgaacgtcgccactggctttcggatgtcctccagcggccggccgtgttcgtagcggtaaagttcagctgcatctttcgtgagcgcgagaaactcgatcggcagcaacttttccttgtctttcttgtcctcttgcgtcgcttctgccgggccgaagccgtcgtctcccatcgttcctttctgtgaagacgaggcgcgtgctctagtctcttggtctctcgcgattcgcgtcgactcttgcccttcgcgccgtgtgccagcgctgccgtttcgtttctcccggagcgactccaggccgagtcgcaagggtgtccgcagaaacggcttccctctgccccgagataacaggaagagcgggagacaagcgaaaacgtaagaaaaacgtcaggaaagcggggaccgggcaggcgggagaaagcgcagaaaagaagcgaaaacgcggagagggtcggagaaacgacctacggggaaggcgggggcaggtggacagaaagaagacacgacaacggagaaaagagaacgggaaaagaggacgaaaacgagaaaaaagtggataagacgagaaaaagaagactcagaagacggaaaacgcagtctgccttcgcgcaaaaacacagactgcatgtggcgacgaagggtgtatagtagaacagttgaacagcagacgaagagacactgtcacgcattccacacaccattttgaagcgtgttttcatcacttgctggagtcgtcgacgcaggaagacgaacgaggggtataatgccgagcgtgcgacgcaaccgactgaaaattccgcagattatgggagaagaacagcgtcaggttctgctcccgcgttccggggggaagcccaggcaggcaggctctcgtgactctctcgattgcaagaagttttctcgggagaaggaacgggaaaaacagtaagaaaaacaacatttcccacaagaatgtcgaggcaggcagagctgggactaaataggggctgcagagccggagatcgcagcaccctgcagtttcctcacgtttcgcagacttcatagaaacctcaccgaagtacgaggcatttttccacggggtagcggcgctgcgtttacgctttcactggatattcgtttcagtgttaactatcaataaagtaaagaccacgggagcgacggcaataaagtacgtaactccggagaggctgaagaaagtttctcctctatacagtggcgaacatctctgtaagatggaaaatccggaaacgctgccgagcacgaggctccgtctggtgtccaaacgccagctcacttgtggggcgttcaaaagtcccctgtacagctcctttagactgcggaaacacaaaggctgggctgcactatggacagcgtggaagccctgttgatttccatgaagcaagcagtgaaacgaatctagtgaaggcggaaacgtagtgcatattgatcgtttgttgtcacgctaataaaagaagttccatcgtcagtgattttcttgcttcttcctgccccaggagaccgtcgcggctaacgcgtcgggtgcacgagctccgctgttgttcactcgttgcttccttcaattatttgctctgtttcgagcccagacactcgcctttctctgcctgtgtgagctcccagactgtgacacggaaaaggttgtcccttcgagttgaccggctttttccgttttctttccaggtgctgcttcgccgctggttttctccggcactctcagagggagcagctagcaaactatacagagctttgctccgccagtccgcggcacatatctgcaccaccgggctgatgattcaaactgagccacgaaaaacgaaatgcagagataatctcagaactcgtcggtgacccgtttgagtttcagctatagggaaaagactctgcgatcacggacgacacggaaacgccatagcgaggataggagcacagttctgtttcatattgaactccacacctcctttcctcgtgaaagtccacgcaaacctttgaacgagaaggacgccaccatcacacacgtcttcaggcgatttctgctttcaatcaagactggagctctccggtcttgaaaactcacaaatcgcacttcttcgtgagataactgtttccgggttggttttgggatctccttggagagcgctggtacttcgttcgccagttctcgtttctcggacgtctccaccacggctctgaaacaagggatgtctccaacgtttgcgattcacggacagaaactcaagcatgaggtgccacatgcccacggcgatccagaggacagcagccctccaaacgaggtagagcctgttggttgctgctttttgccttggaatagttgtggtagtccgtgcaacttctcaaggtagaaagctgcggtaaactgcggcaagtcgcagagaatgctctggaagcaaaacgaggccggtagagtagtgttctagagttcgcgatggcgccagcatcgtcccttcagtggtgtgcaattggcctttaaacacgcattgaaacaacaaagtgaaggcgacctgaagtgagtcacttgccgctggatggtgaacatcgtcgttttggcataaagcatcccgcaggacactgacaaagagcccgtccgtggcgtaacaggctaccctactgtaagccgcttctgtcagaaagaatgcctcaaacggactgaaatgaaaatcgcggcgtttttgctcaatttcccttcagaagcattcatgttccctacagtaccaatgcggttactacactataaaaagtaaatcctgagggtttctgtccaccgacacaacgaacaccatacatgtaagctgcttgcttcttcttttctagctgcttccgtttatatttcatcagaagtcagacactgacaactttccgtaccgccgtctggctccgcgacaactgtgtcgtcaacagcgctggaccgtgacagcagtctccaggttgcggaaagagacaaagtctgttgaatacagatatttcatttggtttcagatgtcactggacaccatgtgagagcagcaaaggccgggacactacgtgtttgctttgaagtctacaatgaaaagtcttgtccccttcagtttcttagatactcgaagacttctggaaggagcctgccgacaattcgctgcctgagaaatcccgaacgcatgagggaggtcacttccttctaagaaaaataagaaaaagtaagcaaaagagtgatgctcgttccattctccggataccttcccgtcgcttgaagcctctacttatcgtgtgctcctcgccgaagcgccagccttccccgaaaatcgtgtctgcaccgtgcacgtattgcgaacgtgctttcccgtagtcctgcagaaaagaggtgtgcttcaaatagaacgcgagttggagacaaagtatgggaaaagaaatacaagcatctttgttgtttgcctgtctcggctagacagagacagccctaccttttttcgcttgcactgcatgtgaccttccgctcagctacctggcagttccgctcacggatgctcgcaagcctccaaatgggtcctgctttagctggtttgtggatcatagtgaagaaggtgtcgttttctgggaaagtgcgttcactggcgagtagtgattcctcctttattccctgtcaacttatcccttggcttccccga

SEQ ID NO: 873 - DNA, 1675 bp, Toxoplasma gondii
  source 1..1675: mol_type = genomic DNA
atttcttccagagaactggacttctcaacctgcagcagctcgtagtagcagacggcttcgccaacgcgcccgcctccggccatcttttcgcgcatgcatctgcgacccgcactgccggcagagtgctcgtcagggacctttcgaaaactcagaaaaacgcgagtcaggaatcgacggagtctctgacagcaggacgacagcgcctcggcgacgacagtgcctcggcgactctgaagaagtcagacgagttgtggaaggctggaagcctgtcctgcgtaagtctttgtgagcggccggaaagcgagagagcaccgtgatgttcagagagtttcgaaggaaaaatgggcgctttgaaccgcgctgcgagacgcagcctgagggggctgtcgccggagagcagagaggagagtcagcttgaaaactgcagagagagagagcagcaaaacggcgaagacttgcaaagcagaaaagaaaagaagaaacagagacaaaagagagaaaggcagcggcggtgaaaaagatgaagaaaacgagagaaaaaggagagacgcggaggagcgagacgacagcgagaacgcgagacacacagagattgaggaagaggaagagatggacaagagaaaaatccaggaagcgaaagagaagaaggagagcgagatctacgaagaagacacgagaggccgagacagaaggaggaagacaatccagagagactgaacaagcaggttagactgaggaagaactaaaaggtacgcgggaagaaagagatgaagaaagaaaaaagtcgaagaggccgagatggcggcgaggacggatgagagagtgcaacgacgaagaagagaggcaagagaggacggacgaacgaggtacagcgagagatagggaaagacgaaagacggtaaagaagcgaataataaggatgtaggagagacagggaagcacggagacacggcgtttgcagagagaacttttctagagagaaaagataaaaatgccagtttcgttcgactgcgttgcgtgtatcgtctcggagttcgaggagaaataggaggcgagcggtggggcggggagaacaggcctctctccctccttcctcgttctctcgctcgtcttcttctcttctccttcctctctttcgctcgtagaatgccgtaccttcccctctctccctgcgaaggcaacacaaacctgccgcaggcgaagaacgccgtattatagggcagaagcgggagagaagaagagacagaagagaaagaagagaaagaaagaaggcatcttgaggtggacgcatgaagcgtttccgagagaaaagaggaacaaagcggagcaagaaaggaagacggaggggagaaacgctccctcccctcccctgaagaaattcttctgttgctcggcgcatctgtgcccagctgcgcgactttttccggcgcaactcgcgtcgcgaactcacgaaaagacgcctttcttcttcctcgccaacctttctttcactcgtttttctcttttcagtctctcagttgagagacaggtccgacttctggcttttcccctccgttagttctcctcttttccccgcgttttcctcttcttttctccttcgccggcttgacagccttctctgctggctgcacacacggcttgcgccaggtcactgcgtcgctcgaaggacgtcaaa

SEQ ID NO: 874 - DNA, 2984 bp, Toxoplasma gondii
  source 1..2984: mol_type = genomic DNA
gacaagatgcgtctcgggatgaactttcgctatggatgccttgaatgttatccgaacaatccgttttcccctcgccccgcatcggattcgaatcctgtcgagctggcaggcgctgcgttcccccgaatttctctccaccgttctctcgagggcggtgagggtgcctagaacggcaggtttttgcagtagcgcgtttctcagcgctcgaatcaagtccaccgcctccgtggtcgggacgccatcctgccgagagccagaggcgagaaatggcgtggagagaaagggcgagctcttttgcgggcaaagagtggatgcgtcgagggtctttggctaagatggtcggcagccgcaagagccagtctcccggcggtaacgacgacgctgcgtacaagtgaaggattgagaagaagacgtggggtgagtgctcaaggtggaaaaccagggagcgccggagacactctgaaacattttgagacgccaggcgaggagaaccgagaggcgtgcaaactgtcgtacccgcagcgaagaagcgcttcggacccccacggccgtgggaacgatatgagggcgagacactcagactcttcagcagtctaagtagctcgttttcgctcataggctgcagtgagttcttgccgccgacaggactcattgacggagcggaggacacatacgcaggagcagcagacgaggcgaagcggcacgctgaagctacagcagagagcgcaaacaagtcccgggatcgggggtgtgcgagtgccaaggacgaagggtcgccttcgacagaaggcagccacgtcggcaagtcggcggtggactcgcataggaaacggagccgaatcttccgggcatcacagcgccttcgacgtgatttttccgacgatggcgagggagagcgtggctctacaccggtagttccgcgccgtccgttcgaggaacgtatgcagtcgcggcttcctttcgtgaggtagacccccctgacacgacgcagttgtcggcgacccgccaggaaagacagacaggggaaagaccgcacgccgggttcaggaggcagtatcggccattcgaaatgatcgcggatcagcacatcgactgagttcatgcaaccgagggactgcctccggacgacccccccgtgggagaggacactggccgtccacgagccattgctggcgagtggcacatcgccggccacaccagcaaggcgataactgatggaaggcatccatggcatctcagcggaatcaagattctgctggaaaactcttgactgctgagtcaaccggactcagagagcagcgctggtatgcttgaccgtctcccctgccggaggaaagggtcgggtacccgacttcaaacgagcctgcaaagaggagcagtccagaggtgagcagagactacaataaagatgtctagaagtaaagggtatccgttaccatctagatgcacatccagcaaacccgtttgcgtaaagttggtctgcgagatgtccgcaagcagctgcgaaacgcgccaagtcttcatgcctttcctgtcgcttccccgagaggcagacgagtcaaatgctttgcactatccctgtgttgcacgggaatgtctttgcgtcgtttcacatactcattgacttacttgtgccattaacgaggactacaagattgaatttcgtaccgattccgcttgcttcttgccgcacaatgctttcgtgttgacacgtgtagcgctatgcctcgagcgccgcgcggtgtatagacaccaagggctggtaaggaacagagagcttgccgtgtgccccggcagtggataccggaacagaaacggcgccttcgcttagtgtgcgtctacaaattacgcgccgaaaattgcgtgttcatctttggcgttcgttaggggtctttctagtctctatcgaatggtaagcctctccggagagacacttttttagcggaaatcgaggcagccgcaagactcatagtccgtggtgtgttgcgtggaaggttgcacgcgcgctccagctgagtccccaggcaagttgataccaaccctggacagagtaagacggtgcatctgggagacgctgccacagcatgcggctccaaaattgtgctggcagcaccgcatctcccgggtgcgcgtaccatcgtgttaacgggacaccggagagagaggttgcttcacctggtacatgcaatctgtgcaggggtctgggcgtttgtgcatcaggactcagcttttttcatttctgcaaccgcgtccttccgcgttgcatgtgacgcgatgacccattgcgacctcttcctccggcgaacggccttcgcaggggctgcgtgccaaccgaaaaattttccgaaacaagaagctgtccagatcgacgcgtgcctccctcgagaaaatccctgagcctccgttgtccccttcttgggtgctgtctcggcatcccggctgccgacggttccggcgtccgctttgccccccgttttcccgtgtttcgtaaatattcgctctgggcactgcgctgtcgcttttttgcactgtggggtcggtttcccccgtaaattgcaccggaccgtcgctcctctctttttcgcgtgctcgttttctgcgccggtaggttggtgcggcagagcgactcggggggctccagagagttggcagctcggcatcgttctgtaatatccgtcgcgacttctgtacgtattaccgcatcgttagttgtccacgcattgtcgcaccgtcttgttcacacgaagctcctcatgaagtgaggacgtagtgatgcagcttcagctcactccctcaagtcctgccatctgctcggctgattgcctatttgcggtggccgtgtggctggaggcggggaagtcatccatttggcagcacgcgactgggtgagaatccagttttgagaggcttcggcaacaccgtgtcaattttacagtcaactggctaagcatcattggaagactcactcgaaagtcccatcaaga

SEQ ID NO: 875 - DNA, 2217 bp, Toxoplasma gondii
  source 1..2217: mol_type = genomic DNA
acagtcttcgttctacgagttcctcccatgcgaccatgtacgaagcgagtgtggaggtgcactgtggcattcgcagagacctgagacgggggtgtctatgtcggtctcgaggagggaggcagaggcgaaacgaggccatatccttgtacagaaatcggagagttacggataaacaacctgcgactcgcgattccgaacaggatctcgaaggccagcaccgagactgtggagtgtccagggtccagagagttccagaattcggttaagagatgcagagactcaagtttttcgtgagcgctgtcacaccacagccttcagggactgctgaagagagcttcgagagtattgaattgcgcatgcacacagtcggcgctacctttctagacacacacacttgagacgcgcgggagacacgagcatggagagccagttgcgcgcgcgctggacgcgttgggcgtcgacaggagcttacatgaacggcgcccttccccattgtcggacttctcgactgtctgtttcggaaccacgggaggcgactgctctccaggaatcgacgagaaaggagatccagaggcgcgtctttcagacagtcctccttcgtcgtcgaggacaggggcaagaccgcgcggactcggagacgtcgcgaggtgtacgtacacccgaggtgcgcgcctcagccgagcgcgccaagacagaatacgcacatgcgacgcagctctccctgtcgctgcttgctcggcttctccctcgctcgtttgtgaggcaaaggaagagccttcaatcctctattctgctcgacgtactggctccgctccgctcgctgtctgctacctccgcccaagagaaggaagtgcgactgtggatctatcacgctgcgttccttcgtctcctctaactctcagctttgtctcctttgttctcttcttcccgagctacaaggaagcaggtggagagggcggaggaagtcgagggcgcgtcgcgaaccagccgaagcaggatggagaggccggcgatttccgcgaggaaagtggaggacagaagagaagcaagaaggaaaagtgaagaaagggaggagaaaaacgcaaggaagaaggcaaactcgagaaaggagatcgggaggaggccggggaagaaagatgcagggtcgtcactgcgagagaggcgctttcgctgaagagaggacagaagaacaggaacgagacgtggatgtcggaaaagactttcaagcggtagaaaggcaggcgaatggaagaacgagaaacacagagaggcaagtgcaagcagagatgaaaacacaataggaattaacttgttccctgtgctttcctcgcgcaaagaaggcgcccttcagccaccggtgtgtctcgcagcgttctcgcgctgtgcgtggtggttagttgctcgttcgaggagtctcgcggaggaaaaagttctccaaatgcagcaaaggcagcgaaagagaaactcatcaaactcgacctctgaaacgcgtatgttgtcgtctttctgggtcacaactgtccatctgtttccaccgaaaagcgaagagcctctctcccccctacgagagggcgcgctcgcatgctgccctccgacgacgcggtcgcgaaattttctcgccccgcaaaaccgacgctgcatgcgcgagtgtgcttcgtaaggtcgagcgactttctgagcaatttgaatctccttttttcctgtgtttccgacctcgcttctcttcttcgcttcgcgatcaactccagtgtccgtacacccgagagcgtcgaagagctctacttatccggcgtctgcttccccgtcacttggctcccgccttcgcgtcgttcgcagttgccagattttttctgcagagaacgacagccgaccgcgagatttcaccctcttccgcttgctcctctcgagtctcctgaggcatctctgcggcatctgtacgccgaacttgccgctcgcagtccctgcttttctgccgcttccttctccccaaataaacgctcctcgctgctctcaacaagaatcagacgctcttcttgctccttcggactctctttgtttctcgcttctccattccacctgcgttcctggtcctctcccgactcggtgtcgcaagcctgcccccgcgagaccgctcggcgccgttttccacccgtcgtcgagtctctctgttcgttgtagcttttcatctccgtctttccctttcctcctttttcccca

SEQ ID NO: 876 - DNA, 2139 bp, Toxoplasma gondii
  source 1..2139: mol_type = genomic DNA
tgtacttggaagtgagcagctcttccagttcggtccagtcatattgccacgccctagccaccgtttcaccagcgtccgatgcaggctcacctagccgatacctgtgaccgttcatatatgagttgctattacatctgtcggccgtaacgacacaaggagatgcagctggaggcaacgggtttgtgagcaccattttgactctgtcacggagtaaaaaacatttattcgaactttgtacgagcgcagtcagtagaagtcaaccacgcgtatcaactacgctgcaattacagaggacagggacagggaaaaaaagtcgaagaggttgccggtgttaggagatgacgagacgtttaaacggccgctggctattgttcgggcatcgttgagccacaagcgatcaaggtgaaaacaaagttaaatagttatgctggagcgattgccctgctgaatcttcagatcggacgaacagtcattctggcccactgtacttgatgtgttcgatgtaaatcacactcagtcgcgtgctcggtagcaatcaagttgctcttttctctcctttctagacacggtaagaacgcttatgaacacgcatagtttttgctagaatgcagcgaccagatgtcgcaaggtcgtctcccccatcgactggagaatcaagaaaaacctgcgttgatcccaaacgtactctgtggttggtgcaaccagaagtttcatactgatcaaaagccagtgaacagctgggggacattgcaggtctggtgcttcaagaagcgctgaagaagaaagtggcgaaaccctcggcagttgccttggaagaggcgccgtgcatgtaacttctgaagtgcgtagtacctggctcctaatgctgttttgtgtttcgctgtctgggcagcagtagaatgctgtgccagaattagccactattttagacatttatttacacattttttttctgatgaacttggcttattcattttttcaagtcttgccactgggtggtggcatgagactcgcttagatgtatgtgggtgttgcaatcacgctggatgctcggcttatttctgagttttttctggttttgacaatgggaacgatttcagagctactatttcacgtggtacggctatgagccactaaaaaaacgaagaaaaacgctgtttgcagaaacaatagcaaactgtttttcgtcatagtaactcagcgcccccttgcccccccccagcagtgagatgcaagacaatcctctctaccacagcttttgttgcgtctgtttcaaattttcagcgctcgcgaaaggcatcacgaacaacattatgagaggaagcaggtttgtggggctggcgggtgcaggaatgtgttcctgcgaaaaaggcctctgctgagaaggtcgtggcgtttgaaaaatatccgaggtagcaaagacttgtttcagtgctccccttttgaagacctgcggcggcagtgcactgaagagtaactccaaatcaccgcggtgagacttggttttttccgttatccttcagaagagtgtgttttcgtttaattcgtcacagaccacgaaaaacgaaccatcgaagacgatcactgcgtccgcgtgcatctggatggatgacccacatctgttgcagccgtcgcagacatgcatgtcccgcgttcgtgaaattctctgcatcagcggagtgatcaggaatcatcgtctcagcgggatgacgttgcggagcaggccggctcgcggtgggcagtcagatgccgaaggcgtgactcaggacggcttgcgctcatcgcagaacaggggtggtgcctgcattgggtgcggttggtgatcctggttggaccggtggagatgcgcgcgcacgaaggggatgtgtcagaaacattttgtttgttctctgtgaacttttagatgtgttaaaggcggcgaatattagcagagggtcctccttgttggattctctcttgaatttcgccctttccttctctttgcgagtctcgtagagaacaagcactcgttcgccgtccctgacgacgcaacccgcgcagaagacatccaccaaacggtgttacacaatcaccttgtgtgaagttcttgcggaaaactactcgttggcattttttcttgaattccctttttcgacaaaa

SEQ ID NO: 877 - DNA, 4673 bp, Toxoplasma gondii
  source 1..4673: mol_type = genomic DNA
ccagtcgtcgattcggcttgccacctattggcctcttcacttcctcatgcccctcttcatcagcgtgcagagctcccccttgccccttatcgtcgtctagggtatgcctactagttctcttcgccaactggggttttgattccgccttcgctcgttttccagcttcggtgtcgacctcattcacttgtttatctgcatccggtctccggttgtctcccgtttcccgaccactccttccttccgagtgctcattcatatcttccttctctgcgagggagaacatgcgatcccactgaagaacttctgccatatgcttgagttgttgttgttggaggcgaaattcattgtcgctatgcgcctgttcctcttgggcagcgagtgcctccgctttcgcctttttcgcttgagccacacttttcaactccttggcgaccttctttgccagagtggctctctggaaaacctctgcaggttcaggactcgactcttgcaagcgaggaaggtctgcgtttctctcagaattgacattcgcccgcatatctctgttcatgcagtcaacactacagtagtcactatacttccccgtccatgatagccaggcatccttcttacacatcttgcaatacggccgagctattgatggattgtattccgccccagccggagttacatcctccagtatatagtcgaagaacgtttgcatcgttgctacctctactaaaatgaacaaagtggcaaacgccgcggagccagctcaatccaccagataaccacataaacacttcctgaggatcaagcactgcacagtggttttttctgtgacaacgcaaagagatagcttgacgatcgcttcattcggcggcatgggcagaccctcacattaccacttgcgcgcacctttatcatgtaaggacgatgggcagcttcaatcttgtcgtggataacaccgcactatgatgcttttttcccaggacttccagtctgcagagtgactgctttcaaatgggccatctgctagcatctcacgttgtttgaaggaggaaccgatatccgcctgcaagagtactgcgggaagccactaccggacaagtgtcctttggcatgtttttcgtccgagcaaacagcttaaacgtgtggaaaaaacgcgggcgcctcgtcgtcacgcattgcaccttctgggtgtcgcttgtgacacagttgtctttgttgcgacggacggagatgttcacttccatacgggcaaagcccccatcaaacgacaacgtgccagggagttgctttcttctggtgccttgaacagtcaaaacgagtttctgctgcgaggtcaatgggccgtagccgccttataggtccaccggaacgatggatctctccgccagcggatcactcgcgacgagcgggagtgccagctgctagacatctaacctctaacctcgggatggtccggtcattgtgaaaaaaggcacctcaacacaacactatcttcttcccgctacagcatgctcgtgaaacagatttgttttatagaataagtttaacaccgcagatatcaccacgagagaatcgtgcgactttcgtggttgataacagctgacctgtgcgatgtcacgagctaggttcgcactcgcgtcgaccggtccacgtccacgtccctcctggaccaccggtcaccaggatgcttgtctcgataataagactgttgtcgtgaaaccatgatcgggctgacaaacttccctgtcgcctttctctgaaacgacgttaacatgggccaagaatgcgaatacggtgcccgtgcgtgtgctaaatcttcagccttatggtaaagcgatcgccactactgcaattttgggtgtcccgtcaccccatcggtatgtataatggtgtgttcctgtatgagaattaatctggtgcccaaattcgccccatcactgcggttgctggcatgagtcacaagaactcctttggtaaaatgccgacaatctgtcgtgtgtcggtgtgacagcatgataacatcaggcaaaagccgcccttataagctaaactatgttctatgacactttttcacgagaagcttccaccacagcaccgtcgctaaagttttggaaaacgcctcgtgcatatagagtccgaagcactgcgcaatccatgttgtttagtcgacaaaatgtatcatgaatgctgagatcacgtaagacgaacgacatccagcggcgaagacgccgctcgtttcaacaaggcgcacatctaccagtcagtgcactactgctaagtgacggcatatccctccgatgttttcctctgtatcttactcgttttgcatcttctgctgcaaatctatcagctcacatgtccatgatcaattccacttatcaaaattttcacattgttataatatgccagttggattcctcctcttctacgtgtggttacgatgattgctgccaccagcacaaaacgaccgtgcgtgggagctgaaagaaacttcaggaaatccttgactcttgaggattgtttctccatccaacggtcaggacattgtctcggccttccagtcagtaaatttgctacatgctgctcgctgaaaacgggccgacttctcctcaagctgttgtttaatacatgctgatattggtggtaaggctggttcctgggaggttggatcctgtagaaaggaattacccggacccaataaagtgtgtcggatgacgcctcagacagtaatgttgtatattcaaggaaactgccaacagcgtactactgaccgcccatctcggacacctgacagcataccataccgtgggcgtgccctgagcgctgtcacactcgtgcgtggcaggatgctcctcaccgtctcataatccccacaaaatattccttgaaacacctaaaactgcaaaagcggtgtcgtacctgcagcattgagcgcagctcaaagtagtactttgcgtatgttgacggcttgacgacgacctcaaaatggagcaatgaaagaaacgctgcctccattttgttcacttcttcaacggtaaaaaacggatacagatacgcgaacgacgcgttcgttagcacttggtcgtcccacactttctgcacacacaaaaactcgcgcctgcaacatgtccaacttctaaccagcagtttcatcgctacacgtggcttcttcgcttagccgctgaattaaaaatgacgcacctgagcgactattaaagctgtaaagacgagcggcctccagttcgaagcgcgaagaggcattccggagaaagcgatcagacggtttatgaagaggagggcaaggacattgcattctggagagtattccgccgcctcgtacagcacgccaatgaagtctcgaatctcctcaacagttggacaaggttcgccctgatgcttcgcaatggaggccctcatctctgtctcgccggagttgcctgaaggtaaatatgccaaacctcaggaacgcggctgccactcaggacaaacgctcactcaccatctaacgaaatgagtcacatactgtgaattgttccgttccgactgacaagatatacaggcaagccttcagcgggtttttacatagctgagagcagatgaggaatcatcgcaacgattcacatgcgtgctgacgttctacaactgagtttcaacacattttcatgcctattcggaagggccgacggactccatgatcttactgtcgcagtacgcgtcttcatcgaaaactctccattcgggtttctcctcaacggcacgcttctccatatcgaccgaaatctgatcttgaagtatggccgcgactgcagtgatcatcttctgaacgtttggctgagaaactgtagaggtcagcatccagttactgttatcggtcatactaagtctgtccccgctggcagggagtgggggaacgctatcctcagccataccgtgtaacggaaaatgtcactatcagtggtggtcccgggtctcggtaagtgggtaaaactcaaaaaatgtagcaaagaagccgcctccagccacaggcgtcaacgagggcggaacaacccccttgagaaagattattccaaaaagcgacagtgtgaatgagggacctgccgtccctaccaacaatctattgtacttccccggagctgatggccctcccatttaccagtgaggttcagtctacaagcaacacagcgtcatccttatattgccaaaaacaacagcaagatattagttttgctctaactgcttacaccccgactacttcagcaaataacgcacatttccggtgctgcgatggctcccaactgcatgtctgtcttttcttttgctgtccatacttggccgtgccacgagggtggggggcggaaaagggagcaagtgagctgtgtgttctgctggcgtatcagagacgccaagctacgctgcctcacctgtggtcacatcatggcgaatagagtctgcttctaatggccattgacagagctgtttgtctttttcagccttccaatgaaatgtggctcgaagcgaagttgaaccccgcacggtccagccagtgtctgtacagcgtgtggtacccgcggcacgggagctgtgcaatctggaatcgtacccaagcctactaacactttcgaatgaggaaggccatttaaactgcagtacccttttcaaacctccaaccctgtcagcgacca

SEQ ID NO: 878 - DNA, 1511 bp, Toxoplasma gondii
  source 1..1511: mol_type = genomic DNA
ctcgtccgacatgcttccactttccgcgtagctttggacaaagtcggaggttcgacagacgtcggcggaagcggcgtgaaggcgacagttaaggcgaactccgacggcgagatgttaaacaacgaagcaaacgagaaggggaatgcggtcgtttccaacatagaacaacctgcgaagacagctccgtggccagacgaatgggcctgtgggtgtcctgtgggctttggaactacctcctgcaagcatggatgactggcgcgttacaggacacatgctggccatgcttctacgcacaaagagctgaagaaagcatgtgtacggggaggaggaatgcttgcaaatcttgccttgtgtgtctcaggaattcgggtggagtcttaatcggcaaatatgttcggtaaatcgtttgagagttctcctaagacatatttatgtgtgactgccttattgggtggcgacataggatcccgattgatgctaaagatccgtgtaggatgctgtcacaccgcgcaggtctgcttccgcctcttgcagatacgcttcgatattcggaatttcttttaggggattcgcacatacgttcgaaatagaggccggagcgaatgtgcacggatcaacgggccgcctgtcgtgacgaaaaccgctcttagtttcgctggacgacgacgctgatgagacgcagacgccgagaggggggctggaaccaaaccctttagccgcggaatgaggagctccacttttcctttccaaaagcggtgaatgtgcagcccttaggctctggatgactttcacgagtagaggacggtgagccgaaaaaagtctttccccagtaaccactgtcagcgctttgggattctgacggatgggaccggtgggctccagtcagcagccaatgaggcttcctacgtcttcgagggagcgcgaagttcgatagtgtgtggatcgacgcaaatttatcggagaaagaagcacgtccgccaaagagaagttcggtgtcttgcgcgcttgccgaagcaacggttttccccaaggtcaacgagccacgaatccctggtggtgcagaagaaaataccgccgagaaggcagacggccgatgctttgcccaacgggaaaagcgagcgactctgtgacaaccacaaatgaggaagcgaagcggttctttagtgacacccgacactcatgatgtccgttagtcgacacggtcctacacgcgacgaaacgtgcactgaagggcaagcgccgccgaatacagaaactgtatcgcaatgcagagaactaagaagccatacattcgaacgggtttctacctcgaggaatgcacggcaatctagatctgtggagaatttgcctaacaactctgacgtcagccgcggagacgcgacaggatgtcttcacgcatgcaaccgactgttcacacgaaaaaaaacgacagcgttaaacgcgccgagtgcttagcttccgctttcttccacagactccttctctacccatttgcagtgccttttactgta

SEQ ID NO: 879 - DNA, 2200 bp, Toxoplasma gondii
  source 1..2200: mol_type = genomic DNA
cagcaaattataggtcactgacgagagcctcatagcggtaagatgacagctgatgctggtctgcgtcgacatgtaacaggagcagtgagtaaattggtcagcggattcacggaatattctcgtatcggattttttcggtgtggcacttgcttagtaactcgaacacgggctgtgccaggcatgtatcagtaatgctcgacgtcctctatagtttgaccactacaatcggaaatgttggacgacagaagggcgatggaacttcttttaatcccgcaaaacgggactgcaaatacccgtcggggacggtgtggagtggcagcaaaaagagccatttgaccggatctcttttcgacagcagcttcactcccgtttccaatggcaccgtacggaaaatgaatcaaacaacaactgagattacagttcctggatacagcgtgaaaaggggttcctgggctcgaagaattaaagaccttcttgtgccgcggtataaaagtcgagagttggactacgggttaagtctttcagagtctttgattgttccaacttcctcgccttccttgtcgaacatcagtgtgacgttgaaggaggaacaaagtcggatctttgcatgttttttatactatgagttcgactcttcgtatagatcttgaaggtgggtgtctgatcgaagtggctatacatgttcggtgtttttgtgatgaggggcgaaaggactgcgttgtcccgtagatgttggagcttgggatggccctacagttgcagatttcgctgttcagaggaaaaagttccgtcgcttgtcctgcatcttatgccagagaaagatactatcacggctctgttccagtacgaagagcgtcgcaacattgtgatgatgacgtcgacaaacattcacgagttagaaagcaacccttcgtcttcccggaggagtgcagtggaatacctaggcgaacgcagtgacaaaacaggagacgcttccgggtggaaaagcatggatcagcgtgaggcagatctgtcttgtcgatcgtccggaagtcaactgtgcttttagtgccttcatcagtcgggtgctcacagaacggctaggccgtccattagtgtctcttttttgttgcaggctccttcagctgcatgtccttctcagacacaagtctcttctctccgtgacaaaacagaatctcctccgtacacttcatagagccactgccctttcgcgccaacaaccgcttcgggttagttcactgtcggttctcggtgtggcgttcttccacgaccccgtgacttgtttctcgaagcagtctgggagatccaaattcgcatttttcgcagtgcctgtcgaatttcggaatcgctagacgggcgtgctgcgtctctgaatcccgaccctcttcgtctctggatcttatctcggtgcacatctcggctgctctctcgtctctctactctccagcgccgctgtttgcatgcgcgaggtaacgtcgcttttgtagtgccgccgatgcgttcctgcagaacgtatcgcgtccgctttccctttctccggaaaaactgcgtggcagccgcctctctgtctgcatttgtcgcgagcaaggaaaaaagactagaagatccagctttctcttcagagagaagggccgtgtgccggcacaggtaccgctgcctctctcgtctctagttgggtgtcgatgtcgctcggtagaaaggcaaatgttcgcagcggagttcctcagtagatgctgggattttctcgagcgtcatttcattgttatctcgtgcttttcatctgagtaaagcccccgggtttcgcgtcgtctcacccagaaaacggctgtcgagcgcatttacgaccaccgcctgcggtgctcgcgataatggagaaggtccttttgcgtccgtaacgcgattaaacgcaagggtattccagggaagactcatgagaagctttcgaacgttgtcgtgcctcctttcgcctctggtttcccggagagacggccttcgtcagcggggctcctcgtcatggttctgctgagttcccttgtcgctctcgggcttcctgcgtctttctcggagcatgacccgacggcgtaaggcggaaatttgctctcagttccagttctcttgtgtgtttcatggtcaccatgttaagtccgatcgtttagtggcatccagcgtagctccgttcccgtctgtcctaagtccaaca

SEQ ID NO: 880 - DNA, 3643 bp, Toxoplasma gondii
  source 1..3643: mol_type = genomic DNA
ctgttttgtagaattcgagaattcgttcagagcgattcagagagttactggcggtcgtgtcagacacgcgcggccattctcagccgtaccaactcgacgactcacctcagggacgacgacaatctttcatggagtgtgcgtttcaccgcggaagaggtgtgtgcttctggatacaacctgccgtttcttcccgcggagtttcgtctgctgtgggtggatatgcaggaagatgcgagaaagagggagaaacagagaaactcgcctttttcgcgtcttctcgtgggaagcagagggaacagagtgttttttcttccagagaggagagactccgcagggagaactcatttttctcggatagtgaggcagaggaagatctccagttgatgccgtaatggaggcttttcccggaactggttccgtcctttttttctcgagaaaaaccatgctttcggtcggtaccggaattcagaaatcgacttttggcctgggaccgcctcaaggtcacaagccggcaatgggggggtttctctccgtccacacaagcacatttgggattttctcgcgttgcaactgacaaatcgttatccccgacaaatgagttgcaaggatccagtgctttcgttttcgctgctattttcagctgaaaccgaccccagttgtacgcggcacgagcgtcttgacatgagaaaaaagttttctctcgctgttaatacgagtgattaccctaattcatatattatgcctagaacataaccgatatggagtaacctcagtgtcgtaggatgctgaaatccaacagttcgcgccaccccgaatagtgtcttgcagcgagcacattatgttttttacttgagagtatagagtccacgagttggactgccggcttaggtcgtgaaggtttttcgttaccgaatgcaacttcctttgtgtcagcatggtgtcaagaactttccggttaccatcgagacgtacaggagccgactgccgggactccggagggtgtacctgcggaaagctttgcttacgatgatcacgtggttgagccttgacaccacaatggaggtactgccagacaatgacagtcacaatccggagaagggttacgtagtcccgatactgatcaacaccaagttgacttccaggtttaactgtgtaaatattacattgagagcatcggaagcagaggcacacaggctcaccagggccgggccggggaactgtcgctacaggataaaccagagattccggagtaagcgttttgggctcgtatctgcaaagcagctgtgttttccgacgtagaacggctactttcgccctcaagagagacccgtatcacggtagcgactgaatacctatttcatcttggtgtttcagggccgtcaatcgtcagacatacagcaactgtcttgcattttccagatcgtgaaggcctgcacggcactcctcattttgttattcccggatccggaacgggttgtgttacctaggacactctctgtgtcggcatcgaccgcgcgcgaggcgaggcatttttcgctttggctgagtattacgcgacgcagacccaaaacgggaacgaccgactgaagaggccgcctgtgccccggcggccgacatacacatcgagaacggacacacttgcagcatgtggcaaaaacacgtcggaaagcaggattcgttgcgcaagttcacgcgataaacaagttctcggttttctcctccttttacccacgccactttcttcgagtggatcatgcgggagatccccactttttcgtgaaaggatcagcaggtgacctcgccggcgtcgtcgcaccctttttgtgggttcataaaccgattttctgaatctgtctctggatcttgtcgtgtctgtgtgtttgctggggaaacgaccaggaaacgagctgggaaccccgtggctgtctgccgttattacctttcagcggaaaccactgccacacacacacgcggccgacgccgactgctgctcgacaggcacggtatctccgatctgtccacagtgtgtggtcagtgcccccccccctccgtttgaggaactgcttttccagccgttggctgcaggcgtttgctcccccacgactagtggaaaaagttaggtttccctagactcaccttggtcactcgctcttcatcaggactggcatatcgtcgttctccggaccgttttcttgcgtgtctcctcgtttcctgaaacagtccgagagaaaacgacctgggaaggtacacagaaaaacgggggggctgcgatcgcgggctccacacctgtatttctgcgttgcctggtgcactgccacgacgttcgtccaacggcatcgaacacctggttttccacgcggaaaagcaaggacggatcgctcccggtgtcgacgattgcgcctgagcaaaagtttttccgtgtttctgccgaaagccggaaggaaagagcggaagcaaacgcacccgacagagacgacacacagcgcccgccgcgcaacagcagacgggtgcggcgaggacgatcctagtgtctcccaggaaggcgttgaacgtctctggagcgtcccacgggagtcgccagtgggttttccaagatttcttgcctttgtggaggcttcccagggaaaggatctgcgttccactcccgggatccgagccacaaccagacgctatggtgtggaagcgacacgattgacgcgacaggcgaaaacgtggacgcgcgtgcgtgcaggcgacccccggctgcctcgagttgtgtctgtgtgtcttctcggagagaatccgcggctctggaggcatccgaatccacacaatggcgagaccccagttctaggaagcaccgcaaaccgtccgcgagacaacttccccgcggcctgcaggcgccaggacgcagattgccgcccacgcccgaactcgaccgagagaggcgtgagaagctggatagaagggtcctgggaaaaaaggaatctcgtccgccgctctggggacaaaccccgttcggattcgggaatgtgtgtctagatcgaagcgcggaccgcctcccgcccagactgcgcgtggcgggttggggacccgctgttccgaaatcagagttaccggccacactcacagaatcaaatgagaggaatctgaaggactcgcacgacggcccaggtccctgggagactcctgtcgaagcccgtcggctgggagcctcgtcgatctggtgagaaaaaagctggaacggtcgggaaactcgaagcggaactgcgaagtcgcagggaatgcacgacggaagaaaagacccgcgggagtggctgacccatcgtctttctgccaccgagaactgtctgactggcgaagtctgattctccgttccaccactgaagggaagtcatttttttatcttctacggcgacgcaccgttgcacagcggtcttagtacagcgtttctctactccacgtcaaacctattggactctagagcgccgtgaaggtgctccgagaacgagggattccctgcgctctttgcagacttttctgcggccctctcatggccaaagccttctcccgcagcagcccctgactttgtccgcaggaactcagcgagttcgagtccggtggtagaactgaacgtctgcacgagtcgtctgaaacgccgaaa

SEQ ID NO: 881 - DNA, 2139 bp, Toxoplasma gondii
  source 1..2139: mol_type = genomic DNA
ggaagaagacagtgaagcgctggacagattgcctctttgaggcgacgggggcaggctttcggggagaagccggaggagaggagagcggaagccacagacgagacaccctgcccggcagcaggggaggcgacgaaacggagaagagacagagagaggccgtcaagacggtcggaggaagagatgaggaaggagatggaaaagaaaggacggaagggaggagaagtcagccagggtgaaaggaagagcagtcgagccaagaggccagtcaaaaaaagatagaacatggagatgtttatacggattggactgtgtacatcctagcgtcgggatggagggacgaaacagtctcaacgatctacgcacgaagacgctgcgttcatttttcgggtgtatggacacctgaacacgcatgcttttctgcccgtttttttatccgttcgtttattcaccattttcacatgatgcacaccactttgcgcgcagcggaagaaattcgcagagaaacgcggcttcgctgcctgcgggctgtggtctgtttcgcgtattcacgttccgctgtgtttttcgaggatacgtctgtgtatgttcctgagtacgcgaaggaacgcaggcaaagcgcgtcgtctcttccggctcctgatccgtcacaagacggggagcagatgcggcggggagggacactgacaagcggagagcgacagtggagatggcaaagaagaccttcagagaacggaccgaagaaaaggagttcgtgtgtgacagcgagctgaagcgttcaggcgccagtttccaactggcgtgaatgcatcccctcaaaaattccaaaaaggagggaagctgggtcgtgctttccgaggattttcggctcttctgcagacaagggtcgagagacaagtcaggatggaaagcgacttggggagttgacaagtcgttgcgtgtgtcgtaccccagcaacgcgatagctggcgcctcagaggagttcacgagacaccgttttcggaatcgcgtgaaattcctggaaaagtggagagaaaccctacccccgaaaacgcgcaaagacggggaagcgcgtggaactcccgcaacagggaaaagcgatccggaaacgcgagaaacgcagctgcatgtttgcatgaggcggcgcaaatcctaaacgctaaaccatctcggtagtacatccacctgaggcctgtcggaccgcgacgcttgtccgtgcacaccggaaaacaatactctttcgcctcatcaaaagtccgttcttcgcgagttcttcgcggagtctccactggagagagtccggaagagggacgaaaccagcaggttcgccagacgcggagctaaccgtgaaaaaggcccccgattcccaagaagaagcgcgatttcgcgcaagagaaactgcacagcgcgttcttggaatcgacgggcgaacgttctgacggcaaacggaaggcaaatgaggcactttttctcgaacaatctcatcttcttcttcaactcgggacgaaaaactccctcgtggagagaccctgtaaaagttcgttttctctgagggcagacagcaaggcggagagttacggagagacggagacatatctgcgcgccgccgactgatacccagcgcgtctgttctacatgtgaaccacgaaaacatctttttcttgatgaaggatgcttttttttctttttgtggaggtcttgtccttcgtgtacgcgctctggagtcggcgaaatctccatcttccaagagtgaggaacacagaggccatgtccgcttgaatgcacgaccagagacggcaaaggcgtgagagtttaacgagccttgattctctcagtttccttccctcagcttttctttcgttctctcttcttgtgcctcttttcgcgctgcctcgccatcgcactccagaaaacatgagatgtcctccctgtctccagaggggaacaacacaacgcatgcgcgaagagttacacgaggccctgcacaagagtccaggctccagagaagccattcattcacttatacatgtttgtatattcgtatctgagcaggcgcagttttgtattcgtatatggatatttggatatctgcatgcggctccgaatcctgatgaaatgtgtgtttcggtgcatgcgaggtga

SEQ ID NO: 882 - DNA, 4195 bp, Toxoplasma gondii
  source 1..4195: mol_type = genomic DNA
gtcttgagcggtgacaagcatggcttcgtagcaccgagcgagaagcatccaggtggcggggtcctcttcgttcgcttccgcggccttcttcagctcctgccgcgcgcgctggtaaagccttaagcacgccgcaagacctgcgccccctgcgtcccctttcccgccgtctccccccttgcctgtctccttcccccgctcgacctcttcgacccacaggccactttgctcggcctcggcgagcagtgcgaagcccatgaggcggtgaacttcgaagttctgcggcagcatgcgcaacaaactctcgagaagggcctgtgcctctttgatgcggtccacgccgccaagcaaaaggagacactgcgcaagtcgaaagaccgtcgccggatgctgcggccgcagctgttgcgcgcgctgtagctccgctacggctcgccaggtctggccctgaagctggagcagccagccgttgaggtagcgctgttcggcgaggaggtcgagggagaatggcgggggttgggcggcgcgaaggaggccctcagcctggcgcaggtctccgccaaggagagagcgtgcggcgagctggaggagaacggaggcgtcactgggcgagcagcggtgtgcggccagaagcagctgctgctgatcctcgtgctgggacccgcccgcgggaagaagcagcgccaggccacacagtgctccttggtgggtagggtcgattgaggccgctcgctggaaggcccggcgagcttcagcgtgtcgagacaaacgcagaaaacacatgcctgccgcgaagcggagatctgccccgtatcgtcggggacagaagcccgcggtaccctttccggagtgggctgcctccgctgtaggggaatcagatgctccggaagacgcgaggattttcgccatgatggggtccgaaacacaagcagcctcaaccggaggcactggcgagtacgcgatcaagcgacagtagtacacaagtgcatcttcccaccggcgctcgtagactgcgcagctcgcaagcccgagaagcggcgctgcatgcagcggcgtgtggacagccgcgaggcgaaagagctcctcggcacctcgcacctccgctgcactctgtcgctggagcattccctgctcctgctgcaacccagcataggccacctgaggcccccgggtgccgtccttcgccccagatccggacggcgtcggagtccccaaccttcttgtagatcccagagatccgggcactcctcgagaagcctcacccgagcctggggcgggggtcaagcctgccgggttgccagagggtgggtttgcggcgttaacgttgagaaggagggccttcgcgatcttcaggaacgccccgctgttgaccgagagaaggttcgggtctttacgcatgaggagcgggacgtcgacgccccctcccttcttgcgcgaggcctcaggcagccccgcagccgcctcggatttctgtctccactcttcactcttgaggagttcctcgtggcgggtgacttggtcgcgcgccctcagcgctgcatgcgtgtggtgggccgccatggccgcgtccacgaggacgcgccagtctccgtcccatgctgcgcggtcgccttcaggctcccggacttcgtctttcgcgtctgtgccctcgccggaggactggagggagccacgatgaagccgcgaggcgggacttggtgcgggtggcagctccgtcagcggctggttcgatatgtcgttgttcgagtacagtacggtgttggcgcagtagtcggcatcttggagaatcgagaggaaggaagaggcgttatggttcgcatggaagtgaagcgcgcagtccagccagtggtgcagcacacagacttcacgcttgagcatctcgccgatcaaccgacactccgactcgtcttcaaacacagagggccccggagcaccaggttcgcgtgagccggccgcctgcccagcctgccgagatggagacaccgccagatccgcgggcggagctgctggaagaatcacatgcgtgttggtgtctttgatgggcagatagagcagctcgccggcactggaagatctgccctggcgatggcgcaccatggaaaaagcggcttcttccatcttggcgtctagctcctgggagcgccgagagatgccgaggcggtagaaacggagaggcgatgtacaaaaatgtagggtaatcgtgaacagaaagaacctggagcggctgcacgcagccgacagcttactcgtccatatcggaaacctcactccatcttctccgctgcccactctcggttcggcggccccgctttacgtgaaacggggctttccctacaacgtttctcaaaggtgtttgaggtaaccgacgccttggtggggacaacaaatacgggggagacaatgcctgactcaggaaactgcaacgcgttttgtccttttcgtcgcggtctcaatctgatttacgagtgaaaaagaaaaacactgtgggaggaataagcacatgagttagccacaactccgaagacgaaagtgtgtagtgtcttcggaagagtcagtgaagcgggatacaggaggagaaagtcataaatctgtggagagaggaagacgatgaccggccaccacgcacacttctggggggcgacggtgttagaaaggcagatcgaaacaacggaggcatttgcggctcagcagaagccgttgtaaattgcaaacaagggaacgtattcggcgcgaatcgaatgaatccggaaaaactcagtgatggaggatacagtggtttgggaaaggcctctgcccccctgtagcaacatgtggagacgctgcgcaaatccagccccagctgaacagaagcggaaggcgacacgcatatcctatgacgcacaacgttctcaactcaaaaaaaaagtattggcaaaggtgaagaaaacagacataattccacagaaatccgcaaacggggcgccccgtcactgccgttctctggtctaccgctctggcgatgccagtgcggagcgtccccacgaacaactagattaagcgaacaaaacacggaacggtcttgacgaacagtttccagatcaagaagaataaaagcgaagaccagtaaacaacgcgcaggtgtaacattctcgattgcctcgcaagttcgcagcgcctctccccctcccagacgctgtgacctgctgtgctgcttctttgcgaagagagtcagcctagtatccgtgttaaggcccatcatattgcgtggactcgtcgatgcgaattcaatgagaaatgcgttatgttctcgaatgttttctattgaaaagcttacaggttgcagccgaagagtcttcgccgatgcatcgcacatgtcgtaaaagacatccaatacgcttacccgtcattgtaagcacattttccgcattggattggctgcgacgggttccatgtctcttctattaatgatacgctctcagcgtgaagggccgaggagcgacactccagctcgttgtggccagacatcgacggacgcacggacctcgctacagagattgttgaatgcgttcaagtgtgtataggtgtatagggttttgcttacatactgtatgcgttcacgcatgcgtggttgttctcaaccccgaagcaagcgaacatcgagagaagcgcggtgcgtcttggcgggacctgcactgataagaggaagacagcggtctttcctatcaaacagtcgctggccgctgacgtccgaactcgaaacaggtctgatttcagttgtgctgaaggctctggtagcaaatcgagggcttatttgacagcggggcactttcagtgacgcagactgccctccatcgattcttcgctatacatctcccactctctcccgcgttcttccttctggaaactgcagttcagtccaagctgcgattcccttctctctcaacaacttgtatgctgcgagtcaactgatgtttcgagagagaaccttgtgtaagcctatcacagcggtaaatcacacacgtccgcgtttccactaaaagccaggaaatattaagcaccgctttttgttgcagatgacgtctcattgtccttcttgctgcatctcagaattgcggtattccctggaacgacccggactcgctgaacaccacccgcttgcccgattattgccgccggtctttagctgaattgcgtccaaagagtccgagcgtgaccaaga

SEQ ID NO: 883 - DNA, 1213 bp, Toxoplasma gondii
  source 1..1213: mol_type = genomic DNA
caagggtgtgtagcctccagacgagtacttgtagctgtgcaaattttttagccccagagggggaatgtagtgtccaaacaccatctcggcggttcggtgaaggactgaacacgaaggacaggcgcgcggaggcagcggaaacgaaacagaggacgatctggggggacgcagcaacggtcacatccacccctcgtttctccccgcggcgcctctacaggcagtagggcgtcttcttcgatgaagagtcaacaacagggccgcttcttctcagcaccgaaggcagtgcacgcagaggcttgaaatctagacaggtgaacgtttgccggagtggaggggaggacagggactggacttgtcgctattcacgaaaccccgcgaaggagtgcgctgttcgtcgactggcacaagcgacaccggttcgacttcccgtttgtcggtacagcagagttcactcaacggcgaacgcctgctcagcaacaagggggaggaaattgtccaggaaggccccgcccctttgacgccgtgctccacggtttcttaacacaaggcagatgggactacacgacgacccaacgcagagcgataggagaaatcatacatgtggccaggtcacgaagaaagagatgaggcaggctcacagtccgactgggggtctgcgagctatcgagcctcttcaacttagcagagagaagtcaaaggaattcacagagtctcctacagtagcatgcttgcatcgggcaggaaacaattgacactggaaaagatcgaacaggacacccccgtcagagaaaaactgtcagaaccacccggagaatgtcgaacccatgccgcacacaaaaagtgacctagaatttcgcagaagggaagaaccaccgcgacaaacagagggccgcatatttatgatggacgaataccgagacgataaaaacaaaagaaacacgcggtctccccgagaccacggaaatggggaaagagaagggcggcaattcacgggacgagttcggcgaccgcacatgcactcgaagcgtgagtttctgaaagaaagaaaagcgcagcgcttctcaccctgaaacaaattctacttcggaaaatggtgtggaagaaagccgggatgccaggaagcttgtggcacacacgaccctatgcagcgcgtgaagcaaaaaagtcttgtcctgctgcagaaagtacagagagcgacgcagaaaaaaacaca

SEQ ID NO: 884 - DNA, 2923 bp, Toxoplasma gondii
  source 1..2923: mol_type = genomic DNA
aaaaaggagattctgcgtttccacaatggaattcctggtctccatcacactttggggacacggaacacaattcccaagaaacatctgccgtgacaagaccatttgcttacactgcagaaaatctgatattttctcgccggggctgccttgcagtttgtgcacgaagtggaatgcaccaggcccgcctgggacagtttttccgtgaggttgtcactcgccgggctgagcgccgtcgcctctcgcgatgttttcccgccagtcgcctcagaaaactctcgctgtccgacgacgccgaaacccagcgactgcatccagaaagaggcccttcttgccgaagaaaagattccgccttcagagtcagcaccgtactcccccaggagtggcagcgtagcacggatggaaagccaactgcagcgactgcggcaagaagcacccgcggtgcagttcagatgtgttctccgtcggcagtttgtcgttcttgtttccgcgtcggtcttcgctacgctgcccgtggcaagatcagggaggcaaccgctaaatcgaagccctccccgccgtggccagccgcttaccaagctctgtgcgtgtgaactcatagatgcggcgcagctagcgctttcgctaagaaaggacacattccgtgtcgactcagaatcgacggcagaacgcctgcacaaaaacaaaagaaccccgaatcagtcagtggtaaacccccagtcactccattgacgcacatttgggcatgcgtggacatggttaaagtgcacacactataaaggcgcgcctttcaaacagacccccggcgaatgacggagacaaaactcaggatgttataaagcacaatgttgcttccagtgacttgcaacgctcgggtttatcgctgagagttctgcgccactttggaaccgaaaacaagtggcagggcaagaaagatcgagcagaggtcactcggagccagcagcaccccgtgatccctctacggcttatagacacccgagacagagtcctgtttgccagtctgacaccatgtctcggctcagacttggtccgctgaccccatgcaaaaccaccgatgcccattacgccgcagccacacacaatccatgagaaaactgaaggacgacaaggcgtcgcgacacagtatatattccccaggtcgtgcaagaggttcctaagaattccgtctgcccccaggaccaacgaccactgcatcgtcctgcgtcggcccgggttcgaacacttacaatgttcggaggctgcacgctcgatggcctccacgagtgctacggtgcgcaccaacgatcgcttccggcgcttgtgaaggtagagaacggttttcgccgttgggtttagagcgtcgttgagtgcggaaagagacacagggagcagctgttccagcagcacaacacggaaccggatgccccatcggccgtaaaattgcacccgctaggcactgctttagtagtacatcactacgtagagaagatgaggaagccataatgaaaccgggaaacgacatcagccggagaggagggtgtggtaaatcagcggaccacctctgcgtcgccaggaacagtaaaaactgtgtgacagccggtcaagaacactgcacctctaggttgaccaacagtatctcgaagtcgaatgaagcaacaccggatttacgttctttcgcagacatcgaccgcttctactccgacgctgaggccgctaactgctcaagcggccggtgttggtacacgtggagaggtgcccagctctccttgtaggccactgcctgccgacaaaattggattcggcgagtacagtgctggtatcgtatgttgttaaacagagacgaaacggaaaagtagcagattcctgagctaccacactcgacagtcccctggggaccacgcgcatgctcgatgacccgtggccgcgctgtcgcacagggtacgctgtgtagaacacgtaacatcgtttttcttcagacaaacggcagcatccattaccgcaaaaacaagagagacaaaatgtggcaaagctccactggaaagactagcgcgatggcgcaactgcgctataagaccccacaagaacctcctttacgaggaaccgcggagactccctggcacacgcagcagcgtcctcaactacagactcgaatatccctttcaagcgaaacttgatcgtccttcctggactcttctgcgacacaagaaacagcgtctgttccaaacaaagcgtaccacaggcattcccttctttccggcaatgcaagtgtcctgccggtatggcgccggagacgcgccgcctagccaaagcgcacgcacaagcatcgaacacgaagtagcgaggcccgtttgacagcatgccaaagggcggaattcgctcaggctgtaaaagaaggatgtgtataataatggactgcgtacaacagtggttctgacagcttcggcaggtttatctgttgaccagtggcgtacccggcgtcgcgggtcttgctgtgtcaaaaaattactgcgaggaacgagcaattcagcgttcagtgatgataacgcgtctcctggttgatgatgcggcagataacctttgtgcacataaaacagctctgcgagtgactagtcttaacaaaaagaaccaccgaatcttactgatgtggaagaatgaaaagaagacgcagggaaaagaagaaaatagcggtgtgcaaatgtatgggtcaacactctacgcaccagcggcaaaggggctttggacattgttgcgacccgcggtcaagcgacagctcgtctggcacgttctttgaatctgttcccctgcgtggctcttgtctccccagccgccacatgcgatgatggcatttttgcattgatgttcttttttggaccagaaatgcagacgatctgcggtttgtggcattgggggtaagggaagataacca

SEQ ID NO: 885 - DNA, 2532 bp, Toxoplasma gondii
  source 1..2532: mol_type = genomic DNA
agaaactcgctcctcataatacatcgtttcgcttgcgtgttctattcatttaatctcggtcgtttcagtacagaactggggtgcgggagacagagtgaaaaatctgtacaaacgtttgctctcaagcacaccacggcaccgttgggtggttttccgctgctggtggggaagagacctcaaaaatcccgtccttctggagatacggatgaacgcagaaggaaaatgtggcacccagcagcacactgaatgagtggccgcggcttcgcttcgataaatacgaaccggataccgaccggtctgtttgtactttgctcctcgttacccaatgtacgaactcatcggacggttgcggtcggacgagtgggaaagcggtaaacataaaaccactgccggaacacaaggaaataaccgaatatatatatatatatatgtatatatatatatatatgtatatatatgtatatatatatatatatatatatagcaggtgcccgctcgaaaagcgcttcatcaaagtgtcaggtcttagaaaattaacgactgggagaccgaatgaggaaattttgtggtatctatcggtttacacagacgtgtatacactcgcactgtgcctgacttgaatgctgtagacgttggtgtctaacaaggtagaacgcgtggtttcggtggaaaggtcatgttctaagctaaatgttggccatatgtatggatagcccatgtggatcgttctgctctgcgggtcttcaattcagtatctcatgtcttttcggtctttccttggaaagcagtgtatactcagtgtgaccagggtgaatcaccgggggaaaaaacctaaaatgagtttgttttcttgctgacgatcggaatcatgtggagctgggtcgagacagctgtccctcgtgctatcggcctgcgccctccccccgcccgacacgcatctctatctcttttgtgtgttcagtaggcgacgtggtgagtagtctgcagcggaacccgagtttgtcgttctttcttctgaagaaaaaagtcagctttgtgttcgcatttccttcccgctagaagacacacttggtgtaaaaccaagactgtgccggggtagctgcagcacaacggtgccttttgaacaatcttttttgacctattctacccgcgatgggtgaaagcggaagtgtctgttttgccttccagcttcctctctacaacctctggatgctgtgtagacaggacggggtctgaacagcgatttgtgccactctctcgaacgcaagcgtttggatacgaagcaaagtatgggatccaatttgctgacaaccgttccctcctcgagagatgtgtcgccgaactgcagatgttgttccccgtccctattaaatagtatctattgacaattgttccaagaagaggaaagaactgcaaaagatgtcttcaccttgaggcaaaaggcaacacgttttagaagcccggaagtgaaacgcacacctccagtgcgatgctccagctgctccgccgaaaacaaggcgcagccaaactgcagcacaggcttggtttactgtcagatcgatggcgctctagaagatcttcatactattttttttctgacgttgttgtgtcgtagaacgggccttgttcctgtttaggattccaggtctgtttagggacgcatacacgcattgcttaaagtgttctgaaacactctcgcctgcggcccgtcttgttttcagcactctctgctgtgccccagagcaacaataactgtacggccatggtttttgtctcgaacagtggagttcccgcggtctccactagagcgatttggcctttgagaggaagtgggcgcctccgccgtcggtttccactttctgcggtggaattgtggcactatatgagaggatagcttgttttcgggcgtttttcgactctgccggttttctcgtttcgcttttggtttgcacatcttgttctgcagaccgtccctgttgaggattccggtccatggctttcgatctaaatgcgttttttgttcaaaaacagattttttgcagtctgtttgaagatcgctgagaatccccttttcgactgttcgtttttacctgtgtgtagacgctagactacgcgtttcctgcgactcaacaactatatactttgcatccgccggacgacgcaaattcatggcttggtatatcccgtagcgtctcgaaccgtgcgagtttttcctaagatttcgacttatgcttgcctgcttcccaacaaggagactggatcgcttccagaccggaaaccaatgctctgtaggtcacgaagacccgatcgttcatgagacagtttctcctttctccgtcttcgtccgctcgccatgtcagtgtttctcttccccgttctgcgactcggtggagaaagttcttcctcgtcaaagagaaaagaggagagaaacctcgtcccgcgggctctcctgcgcttgccgtcgaccctgccgtatctgtcgaagcacctcaagcaatttttgtctcgaaacaatgcgcccgtccacacaaa

SEQ ID NO: 886 - DNA, 5014 bp, Toxoplasma gondii
  source 1..5014: mol_type = genomic DNA
tttcacttataatttctacagagcagtactgctccaaaacagactcgccgatcttcgcagcatgcgagaaaatggcacaggatgctggctcctcttcagaagcatatcccttcggcggatgcaggtaagagccgaagcaaaggcaccgttggcagaagcaaagaacgtgtagcgtggcacaggacttgcgtgtcgcagtagtgatctacgcggagatgaagcagtctttccatcctacgtacagtgcaaggtgccggattcggtggggtagccgcagcgcgtgtttactattcgggccgtgcagaattccagaaaacatgcgtactagaaaggaatcaccaaccagaaccttgcttatcgtgagtaagcatctttctgtggtggcgtggcttaacacccctgtccgctctctgccttgcgctctcgtcaagaaattcgtttctgtataggcaaaactcgaacgatatatgatgtgaaacacactagcagaaccccagttgtccagaaggtgtgcagattcctttgggtcacaaggtcaacgcaatattctctataggggcctccaggggtgcgcgaaggttgtatacactgttcctgttgatttattgtatatttacgtctacaggagctttaatgaagagactggcagtccaggaaccgctacactgtacgcggctggcaacagggtcaatccctctctatcgctcagtttaaccggcgcattagtgattggtagtttttgggcagcgactgcgtaataatccactagaaatttgaaataaacattaactagatttgggggatgccgtgaagtagctaaaccgtcgtgtctcgtaaaacgcaccgtaagctgtctcaacagtgtcggcactcaaagcctgcttttcctggcttcgatgtgtatcacatatattaccattttcaacgttttgctttggtaacaaacaaacctggatgttaaaaacagaggaaatagtgaaaatatttttcactaagtgaattgggaaatttggaggacaccactgctagtggaatccctgaaacctgcactttctgtattcttgaacagtgtcaatcccgttttttgagactcgactccgctggtctatagagcaaaaacgcagaatcattttatatctaaagattttttactacaggctcttagtcgttgaatggatctcgggcgcgggaagggctccacgcgctccaggctcctgccgcctgcatagaattgttgatttcctgatatgtctcccgcaccataccggaattccctctcgattgggagccgtgaaattcagtactgggtcctaaggagaagggagagaatgcaggagaagggaaacgttttggtgagagggtaccttctccaggggtaacagagaatccgccgttcacaatccctgctcccgggctgccgtttgtcacggtgtgctggtagtctgtagttgggaaaaaactgtttggcaaagaaacaccaatccctgctggtccaccaaactgcatactcggcactccgcgtgccatactcggcgacgataagtcacctgagttgcccacgtttccgttcagcggatgggggccgccgtcgtctggaaaaacacctgcaattgcgcctgtgtaggacaggcccatgccatcgagactcccggctgacgcggcagttcgaagagtcggcgaatagactcccccaagtggagtgttgtccaccatagacaccgacggcgtacggtctgcgttgcctgccatcggaatgggtccagctgcagcggcaaagttggggctgtagagcgatccgacattagtattggcgaagcctgccgcaggatcaatactcatgcctcctggaaatactcctggatacggagagcccgtgtacgggctacgtgatggaagcacaggtggcagatacgtgccactcacgtcgcgcatcatgctcggtgacatcattccgaatccttcaatcggagagtacagcggagacaggctttcgaaagtggagaacgctgccatcgccggagagtttatgaagtcctgcaaactccacacacttcatcctactttgactgcatactggaacgatacaactcgattcacactgcccaaattactcagggactgcccccctggttaaatccgtccacacgtgatggtagtgattttattgtgaactttttcttttctggatctgctcccaccagctcaaagcacacatggacgaccgtcggcgtgcatcagctcgtgacgaacataaggatgttctgttcgtatccttgattcgcacagcagtgaatccagtgttagttgggagaaaaagagatatgcggacacacgatggtagaattccgaggtctgataagcgacttacagaacacaagactaatccatcccgcggactcaacacgagaagtgcctaccatatgaacttgcgaatgatatttcccagaagacaatacgtctggagctccccaaatgaagttctgggggctggcctgaacgtctttagctgcaggactgtcagcgtctggcagcatggtcgtcgctgggttctctgtcggcttcttgcttggaacgtcctcctgatgtgttagaaggggtccatttttttcatttatgttctcctgctcctcctcgaaagttccctcagttctcgagcgtgttccgtccgccagtgtaggtgagtcaagagtagaagccgctgcactgttacggtatccttcgccctccatactgtctgctgcgatagcattctggtcaagaagtgccggccccgccgcttgcttttcgtctttgccagcaacctcgtcttgcctttggacggtatcgtcggaatctgtaacagcggcagataacgagtaataaccactttgcgttgactcaaagcgtgttaaaagcagacgacgaactttcaccgacatcatccggtaggacttctttataccccccggtctgcgtgttatgtagactcccttgtgtctggccgtacactgtgtcgtgtcgactctgagaacgagttgtttctgcactaccagtagaggaggaaaggggttatgctgtcgatgtagcaaccagttcatccatttggttttcggctgctgcggcgaatctgcaacgatgagttcatgttcttcagtttttcttcgtgagacactctcgacgttccctctacgcgaatcttaccgctgttactcccgacgacattgaggtgatttttctgtttttctgcatcgccgagtgcagcgtgttgagaaactgagtttgcttcgtctttttctgtagtggcttcggttgatggatcactgttatcttcaacactttctgccgatgcaagcatggaaacgaggttcctcccgtcactctcccactcactgtcaaccggatctgggcccagctcggggttcatattaccggtctcttccatcccggagttcgtagctgcattaacaagacagtttccacctccatcgcgacttgtttcgcccccgtgtttcagccggcaagattcccgtactgattctgacgggaccgcttgtagtgatatgcccatattcaggtgtgtggactcgacaatggcattgacagaggtacagaacgttgctagcaacaaaagtgctagaactaacgacgactggtcgtggccaccgagaagcatcatgaaagtgtctaacaacgcgatgtaggttggtcaaaaccaccgggtcgtgagcggctcacttgccacttcactgacagtaaaaacaaacctgaagattacaatcatagagaggccgcgagggtcacaattttctttttggcacaaagaacgcgtcgttttacatccacctgcacagtttagccaaaactcggtatcaaaatgcagccgcttcggagacgaaagaagggcatattctttctcaccagtacacatgaggtgtttcaagttgtatctgcttgttatgtgcaaacttccctgctgaaaactctcagaggtgtcgcggtgctctgttcattctcaaaaggttgacttgccaaggggatcagcagcgctactgacaaagcgcactgcggatttttcatgggaattgcgttgggagcctcagagccgttgcaggttttacgtgccacgtaccgtccctatactcttctaaaagggctttcgtgatgtcgagatcggtctacggtcgcacccagggtccagccgagtcactaacagttttgccttttcgtgacttcgttgcactactcagaagtgtaaaatactcaccctgttcgaaagctgttcgattctcaactgacgcattcagcagtgaaagcaccgtgcagctgcaaaaaatcgcatccgtcaaaagccattggcaccgaaggttctctcctctgaagcgctacatgccttaacaatgaggcgcacatggctacagtgacacagatgctttgtgtggccggcaattgtacacccccttgtcaactcgtacagcaatgaaatcgttgcgcagaagtacacaggagagaaaggctggactagaaagctcttgaactaatcattactgttagatgcctgtttgcagaggttggctggtctcgcgctcggctgaagtaaaaccaacagtcggggcacgtcaccggctcgtgaagaggtttcggttcatcgcttgcgaataaatcaactcgatactaagtgttagacagtgggttgactcacatgtgcttaaatggtgctgcagatttgcagaagtggtctgaaaacagccgagcaaagtcgagatcatgccgtcgcacgaggtgaaaatgttcaaccactgtcaactgttttcgtattctttacccactgtttgctatgcgacttcgggaagcttctttcgcatttctggattctcaccggaaaccgcttgcgagacaaaatgccacgtagtggaggcggccgaagccgactaaagtatattccgtaaaacacctgcatttcaagaggctacccaagggattgcaagttgttctcgttgttctcggtgcttttcccgcctgaacccttcacacatca

SEQ ID NO: 887 - DNA, 4007 bp, Toxoplasma gondii
  source 1..4007: mol_type = genomic DNA
aaaggtcactgagttcaaactctcgttgccaaatcgagaaagtttctctcgccctcaggagagacgcgcctccgcgggaggcgtccaccattttctcagagactgtgtgctctcagtgaaacctcatggacacagaatgcatcgaaactcgagaaagagcgacttcctcagcaggctggtggagactcggggtcgtggttttacgccaacatcgacggctccacctacgcagttgaaagcagagtgaagtgatcaaactcgtgagttaggtatcctttgcaaaccttcttgaaaatagtttatttaattcgcggatcaggaatttttttcgagccatcgagaagctccgacacaggttattcctctcagtgctggtcgaggcctgtgtctgtgaccctcttgatcaaaggactctctctgaacgttccctaatgagcaccgagtgactttcgagaatctgcgaaacttctcactttactgcagtgttctcgcagctcaaaaaaggagcagtctctgctgcacttcaaagaaaatagtctgagcttccggcggtagcctcctagagaaaacagagtcctttggggttcggaagttctaaaccacctgagttgacggcaacaacttttcgacttgcactgtcggatagaaacgcctgttcggtgcagtggcagtaggtaagagtttttcgcatctacagaaatgtttgatgccttcttcatagagaagcgcgttcgcaattccaatgcaagtccagggtcgtccccaccgttctgcacaagcatgcgggggtgtctgattattacgtcggcttcgcggtccgcgacacaacgcaaaaagagtcaggaagtcacatctccagagaagtcaattgaatgggaagatccgcgttttcaggctcgaactgtgaacagttctatagagaggaacgcaacaaatccgactggaggaaaataagtatctgtggtggccaaaatagacttggagaagcaagcacacgcgcgaggtttttaaaagtcgtaggcaactgaaggcgctcggtcgtgaatgatatcacttgcggtttttctgctcgagcggaataaaatggggaaaagagcaatttagcaggagtgttcgtttgccagacacagtgagaaagcatccaactgcgcgtttgtttccatctgaaaagaaaggagatccgtatttttctcgaaccgtctcagctgagcgaactttccctgttctacgaagacgaaagagaaagagcgtgtatggaaagagacagtgaatgctttcttccagcttcgcacaaatacccacaacgatctagaaagcgaaagaacgaaggcaaccctgtcgctgacattgcctcgctcgatcagaccgttgccacacaaagatcccgcagctttcaacgcctaatttccctcacgaagcgaagcacatattccttcctccaatgaatgtctgaatacaagaggaaacaactgtgtgtgcagcgggaagttgcctcgctcaagttctcgacctgaagagaactcgatgtttcattacaccttttcgaggtgagaatgtgacgcgttcgccggaaggaagggagcatagtggataaactgctttccttccctcttcttgtcgatggggaaacctgagactagagcgcaattgcgagttatgttgcctatgtactcttttcgtcagattaggagttcgctgcgtctctacacacatcaaccgtaaaccagcgctttcttccttttcactgagtctacaaaaggccgaatctctgactgcttcttcttctgtgctcgatgcaagctcccctggagagtttttctccgttacgagtcgagccagcgagaaaaaaaactgccagaggttcccagtgtgtcgctagcgaattcgaaagaaatcgcttccacctgcggcgggaacaacaggctgtccaaacagtatcggatctactggagaagtcttagacttctttgtccaccccagggctgtagagtgtctttcgaggagcgctcgaggccacaatcaccgttttaaattggttgtcaagccttccatttctgccatgaccttttatccaggttcttccccgcctcagcagaatgccgaggctttaacatttatcaacagacatgtctccgtcacttttcttcgcgtgcttcagaaagaaacgaaaaaatgacaccaatggtccaaggaggcacactttcagctcttgacaatcgaatacgctaaccacacatttcagcatttaatgcatagtatatctatacatatatatatgtatatgtgcctgtatgcgtagtaatagatatgtaatttgacatatatttttttattttcatttcattttttaatatatttttgtgtacgcgtagccttctgccctgtgcgcctgtgtgccggctactcttgtttttctaacgtcgtatcgcctttatttcgagattgtgctgcgcgctctcttgcggaacaggttgaagcgtcaggttcactctcttttgactttgttcgccaattcgcagagaaagatcacagcgaaaccaaaagcttcagctctctgttggtttctacagagcagctgtctcgccacagcgaatccgagagagtgtgcagttgagttgatgccgcgggcgcggagagtttttgcgggactctctcgccagcgaagcggttcttcatttcctgaggagttaccattgtctttgaaactcccttgctgctcagcttttcttctttggattcctagcttttttgtctcgcgcggaagtccggatttttttgtttcctgtcggatcacctcaccgtgacagcctcggccctggccccccgtgcgcgaccctgggggcgcatctgacggagtctctgagtagatgcgaattcttcagcaagctgcgccatttgtttaccggcgttttctctgctttctcttcttcctgccttcgtagtcgctgggatgctgtcatcccctccgttgaaaagcatttttcgcggtcgaacgaggctgtccttccccgtcagcctgcgcctaaccgccagcggcaaaggcagaaaagcctagagagcagctcgccatttgaggcgttcccctgatgagctttgttgaagtctcgactttgtccggacagcgagaggacgcgcgcgaaatgcgcgaggcgctctgtctcgtttcgtctctttcaacgcctgaacaacgcgccgagagggagagacctcgggggaaggaaaaggcgacaggctaaaggacagaaaagagacaagacacagccgcggatgtgcttcgcgacttcaagacaacactcgaggcgaggagagaaacgagaggcttgcgggtggggagacaagacagagcagaacgaggaacgaaaaagtgacagacgaaaaagaggaaacgcgttcgtagaaagaaggcgaaaaaggacccccgacaaagtgtgagaaggcacaacggagggagggagactgcgaaagagccaagtgaagttctgtctcaggacttgcaggctgggggaaacgccgaaactcgcaacgcatttccagctgtacgtatatttttgcagggaaggaagagacactaaaaaatcagagaaagtcgcgcggtttctgccgaggttcatatttccactctcaacgggaacagagtttagacaaaaaacgaggatcgccagcttcgcctatacgcggatgccttctctctctctctctctcgacctccacatgcatcaccaatctctctgtctatctgtgaatctatccgtctcaatgagtctgttttcctctaaatctgtatctgtatttctctaccaacggttctctgtgtccttctctctctgtacctttgcgctaaagactgctccgccaagcatctccctctcctcacccggtgatgctctgtctcttcctgcaagtccctgtctctccgactggcacttgcttctcagacgttcgagcaggaagccttgaacctgcctttccttaaccgaatgccaggagaaataaaaactccgaaaaga

SEQ ID NO: 888 - DNA, 2725 bp, Toxoplasma gondii
  source 1..2725: mol_type = genomic DNA
actgtcatgtctgcgcatcttgcgcgagtcttcgagtggcgaagaaagcggcctgagcacgcctccttcctcgacgtccctgcgttctccgccgagaaaagagataaccggagatgacgccggagagagagaagagtgagagatgagcgttcgacttcctcccacttcgcgtcccttcgccggtgtccccctgtctcttctgcgacatccactcgaagagaaattgaagaaaggaacaaagcaaggagatgcgaaaacgtgaaaggaggacacgggaaagaatggagcgacgaggcagtcactgtgagacgccgctggggaaacgaccggagatatcacagttgaagaggagagcggagagacacccgatggggcaggcaggcagagagtgtggcgcttgcggtctctgagaacaaagtccgttccttgaactacctgtcgtcctacaggctgcactctcgtcgtcagggaggattgctgtcccatgaaggttccgtgcaacacctggcgagtcgccgctctgcccgcctgagaggagagagacaactcaactaaacacggacaaaggttccgccacattttgtccaccgtggcggcaatgcgcaggaggcaggcgttggaatagggagaaacttcggagagcaagagcggcgataaagaagagctgccagagccaaagggtgagtgaacgtgacgaggagaaaaaagaagggcaggggtaagttaacgggtttaaggcagttagaggaaagcgtgagcagcacgccggcgtaggggtttcatcggggacggactcgccagcgaaacgctgaaacgactgcggtccctccgaggaaaagagggaagcgtgaggaggcgcgggcatatgctttgaagaaagacgctacgggcaagcacaagggcgagacatacacggccagaacgactaaggttgtttgagggaaaaaataacgtcaacacgttggcacggccctatttagctccacagatcaacagagcgacacccaaacaccgcaattacatgcaagctggtgactctctgaaggctgatcaggagatgcatctctcgatacacaaacatgcaagtatttcccgatgaaaaacgaaagtggagaactgcgctgcagtcattcacgtgttttagaaaaaaggagcgagcgcccgatgtgctgtgcgccagtcgctcgacacgccaggggtctgtaatacgccagacaatttgattgaacgctctgcggaaagagaaaattctcggggactaggacaaaacttcgcagcaatagttcattacataggccaacagcatccgaaaaaagagtcaaaccacttctcagtggacaaaatgctccaaaaaaccctgcagcaccagccagccgctattttcgatacaaggcgcttgttgcgctgctccgccacgagtgaggcactttcatccgtcgcgaaggcaaaaattgaacacagcagacactcgaaaatgacaaagggtctttccgaatctttgatgaaacaaatcagacctcgttacgtcgaaacggtaaacatgcgactgcactgggtgtggcgaatacagggtgtacagacgctgggtgtcggatcgatgcgggcacactctgtgcgacagcggaaacacagatgcaatggactgtgagtcttttatgtggcatttgtgtgcatttccagtctaaccagaagtcttgaagttgcctttcactctctgccacccctgttttgctcaaaatgtcagttaactgtcacgtctggtcccaagaacgacattgcgaggctcttccccgaccccatgtcgataaacctgttagctgtcgaaatgcattttgatgtcaaatgtcctcttgcagaaaagacagaggcgactcctgcgtagtctcccgctgcaggtcgcatagtcggaatatcttggcatttcgcagagaacaagcgccacgaaatggcattcgcgtcttgtgcatctacacgtgttttgacgatttgcgcaagcgcttcgcatccgggtgtgcttgtcttggaggacgctggctttccgcacatgctgtgtctcgtgcgttttgctcgtccacagtcgtccagaaaacatgatgaaacgcgtctcaacacagatgacagaaaggaagacttgaaagcccgatggatcctctgattatgtcttcctccattcaccagtggatcagaaacgaccattcgcggttagcctcgagtatttccgtctctgcgttggccccacttttcaccggcggatcgttgctgcgcgcccagagacctgctgcagttcaatctgcggcgcatccgaaaaagtcgcacggaagagatgtttccagctctgtttcgttcctttcagacattcttttctcgtttgctgaggaacagcatcttgcgcgcgagtgattgtcttcaggaacaacgggacttctgcccgcgcatcccatcccgcatccgtgaaaaagaaaaaggaatttcattttcgcggacccgattccactctacagccaaatatgagctgcgcgctgcctcgaatgaaggaagcgagaggtgaaggacaacctgactcgacgagcgatagggggaagttcatcggttgctctaacaacaagacagcagctgtctgctttctgatgacgctggtgcaagaagaccacggcatcttcatatctcttgtgccaaattgaactgactttcactggcggtgaatgtagctcaaaagccgctgtca

SEQ ID NO: 889 - DNA, 3090 bp, Toxoplasma gondii
  source 1..3090: mol_type = genomic DNA
ctttgacgatcagcgagccttgcgccaccaggtcctcgagaattctttcgacatccggtttttttattgatttttttaggttatcaaaaacctgttaaacggtctgacatctcttcagacacaggcattgtcacacgtcttacgatctgggcgttgtatggacgattttgttctttcatgtagcaaaggatgcgttcagacggtgggaatgagttattcacgttatcgttcttgtcggtcttctgacacttaacgccagctcgactacctttgtgcgtcttttttgcagcgattgtgctaattatatccccccctccgttcttctccaactcagggggacgcttgatcgacagttgttcttgtgtaggagtgtctatttcagaaacggtatcgtttcctgttccacggctttcgtctgaagacgttctcgtcaagccaattgaagtctcttcattggaagggtcatatacatctgaatgtagacgatgactgtcaactcctgacacggttggaagagattccacacaaaattgtattcctgcctttgaagacgattcgttctgtgatggtaatgtgcaaatgaagggaactttttgattcagcaggttctccttttcatggtgagtatctgttgttgcataatcttcaccatggagtggtccatgagtgttagtgcttgccgatgcggacccagtaaagcagttttgtttctcagcacgagcaccagatatctcatttggcaatccttgcttctttgttgaccccttggtcctgcctcttggtttcgctggtttatggggcttatcagccaccatttcagtaaggtctttccggatgtctgctgtgggcttccccatagatgaacaaccgttgccggtcgtagaggcagaatttttgtgttcgacttcagcgctttggggattggctgaggacagtggcaactcgagtatgtggtcggatgcggcttcaagcgtcacgtgatcggcgtcggctttgtccgtcgggctgtttttcttcgaaccccttacaacatgttgattcacctcgtcgccatcaggatcagtactttttcttatgtctttgcttgccccacctttctcctcggccacaactggattatttcctttaacgggttgatttgctgtttgcttccctgaaatcatttgctctggctccaatggcgccacggtgttccgttggcgtggacttgtatccttcctgctgtaactgctcgtgccgccagtactacaatccacgccttttttcttggacttcttaactttgtcttgtttgtctccgctcttggtgtaggtccttttcctgccgttgctgttgaactccctgccaccgggaatggtgctgttctggggcggagctccagtggtcttctgtgttcccattttcgtcgttaaagaagaaatgtagaggaggcgtcgtgaagttcactgcaggggacggtgttctggatcacagaatgtcgcaggtacgaatgtgtaagtgaagccgatgtcatgagttcgtaaaaatatgacagagaactcaccaacaatacccggaagagtagccgctggtctggagatgagactacaaaactaagagaagctgtgcttccaataatcaccgtgatacgcgtctgcttgtacagccgaaacctcgatgtccactgatgcaagggatgccaatgcttctggagttctgcttgtcggagtgtacgtactgcaagattcggagggaaggcaacctgacgccacaggtactgacatactaatatcggtgctgccccctttaccgcatggtgaggaaatacatatgtatcagcgcattacaaaggtaacgtcctcatccgggcttcttcctcgccacgatgtagtcgggattgccggcatgcagctgctgaccgtacgacgtaatcaagcgaacaaaagacagtggtttactgctggtccgcaaacacaaccactcataaaacattaaatatatagccacaaacatttatgctagcactacatgccaaacaaaaaggctattattatggggtattgcgctgacagttggttctcgaacaaagctgattttcgagcctctcttccattcgaacaaacggaagaatggctggcgattctttaatatggtgcacgtagcgacttcatcgcaccgagtgtgtagtgagcttcatggcagtaattgataaaggcaatagagtaacttcgaaagatatccattaaggggagggcgaaaagcggctactagctagatcattctgtttatagtcgtgttctatttatggcggacgcgaggtgattcaggagcagccagtgaattaatgctgtccagctcgtatcccaacatttaatttgagtctttaaggtggtacagttggttgacataatatctagatgtagccgcattacgcaaaaagtagaaacttctttttagaaggggaagagtataaaaggtttccgccgccgggacttgaacccgggtcgcgcgggtgagagccgcgtatcctaaccacctagactacagcggatgcaaggtcccaatctgtgggacgtatgaagaagtgaaacgtgaacaaagcgccgcggtatgcaaattttttttctttgcgtatgtccacaccagtgtagcctgctggttttctacaccgtccggttgcgtttctgtgttcttttatgctaaggtgtcgtgacatgtcgatccgccccaagtcgatttgccccaagtgctctgcatgcgcatgcgaagctcggtaacaaagcccgtcggatactgcggcaccgttcatattggaagtactctccgtactctcgcctctgcccattattttgttaagtagaagtgggacctttgttgcttcccggtgttatgactgacgcggtgagagagaggagtgggagaagctccagcaagatacgtgtggcagcagcagactctgcgacacagcaacaacagtcgacggcaggaaaatttggtaaagcgagtgctttctgctgctttactccagtcggatcgtagactcggtgacggccagcgacacgtgaaacgttgtcgcgtgaaagcttgaggaaaactgaggcaacgctatca

SEQ ID NO: 890 - DNA, 2147 bp, Toxoplasma gondii
  source 1..2147: mol_type = genomic DNA
actttgttttgcgaaacttctttcacgacgatactcggttcgtaggccatggagccgccagctgcaaggcccgcgaagccggagaacgccgcccccgggaagagagagcctgcagccggcgcttgggctccagaggtaggagcgaacgtgtctctgtcgaagcggctggccttctgactctcgcttttcgagagaagggaagagaagtagtcgctctttccagtcgaagactgcccgctcagacctgcagtctcctccctggccgcaccgcggccgtcctgtgcttcggtcgcgcgtcccaagtgagtcgggtccgctagttgggctccacgaccgcggtcggaagaaccagagacagcggcgtgagcggcgacgccagatccgagtgaggagtgagcgaaggacggatccgaactgctcgcttgagagtcgaactcccgctgagttgagccatgcccgggcacaggttgtgagaagaaactgtccatttcgacagaaaaggaggagaaaagaaagagaaaagaaagacgaaaaccagggacagcctcttcctgttagcccgctagtgaggacgcgaggcaacgcgagctctcgcctcttcctccccgcctccaagaggctgcaaaggtcagccaagccccgaaagcggacacaagacggggccccgctggggtgtacatacacctgagaagagagcgccacgaagaagcgggagcagcaggcgagagagtggagacaaaggaggaagcgaatcttcgaggtcctcgtcactggccaatcgatagtgatttcagagacaaagaggacaagcaacagacaaaagaaaggcggagagttgaggtgaaggacgacagaacagagatgagtcgacggcggtgaaacaaggagataaacgacaagaggacaaggcgacaagaggtgagagagacggcagaacagagagggaagaggggaaggtctgaacgagtacaagaagaacgacggtagagggcgacttcttcgtgtgctgcgacagagagtgaactctggagtttccagagtggagcttttccgacgtgagtgtcaactcgaagaggattgtcagacagagaagagaacgcaagttagagacgaagtcccgaaaacggacagaaagctcaagatgctcgcgcgttcttcctctagaggccgttccgttccatgaaattcgagagaggaaacgcgtgaggactcctccgcgcagacgtccgtctacaccgcagaccgtttcattcgctcttctgttttccagtcttcgtttggctttgtgtctctcaacgcactgagaaaaactcggattcctcgcccgccgcccccccctctccccgcctggaaaagagactgccggcgattcagcgctgaactcgaaaaatcgcgggcatgcagttttttccgcgcctagagtttcgaggctcgcggcctcctctctcttcttcctccgtgtctgcggaggcgtcctcgccgcagattccttctcttttctttgtccacgctcgtcgactttctccaggaagaagcgattcgtctcggtccacgttcagcttcttgcagccgagaggcgcgccagccgcttgtccgccaaactcgaagtttttcgggtgtacgtacacccggtgttgcgccgcgagttatacgagagcgcacaggcctcttttccgcttgtgcgcaaacgtaggagggaactcggctgcgcgttctctcttgacttctctgcaccttcttcgcaagcgccgttctgcgactctgagcgtccccgaacgctcctcgtttccaggctcgtccgggcgcctgtcttcacacgcgcgaaacagtgtgtgtgtgctgtcgacgcagaccggccttttttcctgcttttcgctcttttttctcgaggttccttcgctttcctccgtcctcgccttctcgtgtggcgccttagtctcctgagctgtcagaacaacggaaactcgcggctctcgtccccgcgcgcgcagccctttccgctagcgactccgctctgcgcgttaaagaaccttctactgtcgttcttctctcccgagagtcctttcttgttctccccgtggtctctctcgtattctctttcctgttctctgtcgcgtattctcttgttctgtctcgattctccacca

SEQ ID NO: 891 - DNA, 4375 bp, Toxoplasma gondii
  source 1..4375: mol_type = genomic DNA
agtattcggcaatgtttttgagaggacacaggccctgtgcgtctgtccgaccttgctcaagttatgctgagctgctattcgcggtttctcaacagctgcatccagaatactcacactggcgtttgccgtgggaaatgctgcattagggacgtatgtggtgatgcttgtcccgaacactctcgggattcgagaagccctagctatcgaggtctgttcgttctctgcagtagcatggccgaaatgcattcaagaagctgccgcatcgggactgggatggacgggagtcgtttttttaggttgaggtcaacgtgacaccccaggctgcaaagcgaacatcacatcgatttttgtagctggggaagtgaggcgaagattttgtttcttgctgtgttgcatgagttgcatcgtccacaggcagagagaagggtcacgtgttggagaattgccctctcgcccaatccagcgccacagggtcttctgccgcggagaatgtcgcgaagcaaagtgacgccaaagcgggaccgctcatgagcggcatttgcttcaactgtggagcgacagatcacacgctaaagaattgcaagaaaaaacggaaaccagtaggttcagcaggattttctaatgctttgtgccgtacaaattataaaaaatggaccggagatgttttttgtggagctcgggtcagcctcaggtggaacaggtacaatgccatgaaaccaacacctctatttcatagccaggtcagacaggcagcgtgacgtctgacgcgagatgacggaaaggagagctgtggccgaaacacgtgcttgtgcagcatgcgacattcctttacgtttgttgttttggttgtcaacagcacggagcgctaccgttcgcattgtgcttcatctgtggcgaaaaaggacacttgtcttctggttgtcctaaatcgaaaacaggtaagggatggaaaaattggttattttaaagttactgcatggtattgcaaagaaggggcgttgcgtgtcactcaaaagatgtgtcgccgatgtcttctgctgatagagcatcagtgaggcggaagaacgtatccggctacgagttttcagagacatgcacatagaaagactggcggaagcgaaacaggaccagtgcattgatccgttgacttcattgaaaatgagttaacggtgatgatcaattattctgaacggtcatcgataattttttgtgtgacatatgccagccaatccatttcgagtttatcgcgtggtggacccagtccggatcccacagtgccaaatcattttgatgtgcattccagtgcagttgtcaacagatccaagcaatgcacatttccgctttttccctcttgttgctccaggcaaataccctcaaggggggtcgtgccacacttgtgggtcgatttaccatcttcaaatagagtgccccgaattccagcgccagcagaaggagcgatcaaaccaggaaaaacagagtcgggcgaagggcaattcacgaggtcgaactgaaaacaggaacgagaacaaacaaaagatgcaaacaacggaacgaggaagtgcaactggagggaaggttcacagaaaaatccaagagcctgatccagacgagttctggatgggacagagcgcctagcttttcgactgtttgacagcagcctcctttttttgccataagaagttccccgactttgtaacggggtgagacaatttttcgggacactgttgttcgacccgtctctcttctgaaccggtctcttgctccgtacaaccgtggacttatctggagggaagtgaacggggaaagcttatgctgtgaccaaaaagagacacctgaggcttcgaacaggtcgaatattcaacgtttttattttttcacggctgcgtgggttaattgttggagcacgaatacagtttttccgccagaagccgttcatgtagaaaatgggggcttaacatcgcaacacagcaacagacccgacgcctcgttcgttgtctttggagcttgctttctggttgactgcagggcaacagcttagaccttagagaaaggctacctagagttgaatcactttgtcggcctggctagagccgccgtgttgattccccaagagcaaatggaatggccaggcaacacaaactgaccagcgccttcgtcacatgctaagtggccatgcggtactccggaaaacgaactgggggtaacgtactgttaagagcttgaccgcggcgtttattcaatggcaagttactttgtcggcatgcgggtactgaaccaggaggctttggacagcctatctaacgaggttcagtgccctgtgtttaagaacgtgtctcgtaaccctctctggatttgacagctctgcacgagaaatacatgtaggcagatgaggcacgtcgaaagatgtggaaagaaaccctgtttttttacagccgtgacgaccgctcgacgagcgtcggcttcttcgacctttcatgtctgagaggcctcgcactctcgaacgagcacaaacgcctcagctttacgccaaagagttgggttgccatgttagcagaacagccaaaacgaagcatggacgaggccatggataagaaaaaactgtgagaaatgtggctctttcgtcgctccagttttttgatagcgagtctctagcggtcactaatttgagaacccagtccaaatcctttgttatcgtttcgaggctggtgtctcgctacaccgctgcaaagcaacgagcaatctcctgtgctgcttccgttctacctctgaatgccgtgtccgtgtcgacacgaaccgcggataaccctctgtcctatgtatgtctagcgtgaagaaaccagccacctattgcctgtccgtggaaagactgcacttggtaccttctgttcacttcttcggctcggccacacaccgaacaccgtgcggctgttttccctgggggaccttcggctcccccttgcactgctccacgcttccacggcaaaatggaacgtgccttgctagagagaggtgtcgtgaatcggtgatatgtaaatgcagatttcggtctccaacagtgtaggctcctaatttattccccagcggtggagatgtttgctgtctctcgcggtgcaagacgcgactgcttcagagtggaaggtggagggcggcacgtgtcttccataattctggttcccccccacagcttgtagatgctgctccgctcagaagacgagcaaccccggcggcacctcctgcctctgcgcttaccaactcttctctgtgcggaagacagccgcgccccgtgcaaagacgtgccagctttcaccaccggaatcgttcggaaactttcgagatgatggacactacacgaaaaccgtccctttcctggtatcgtgcctgtggacgttcggtcgtactgcattcggttctgaccggctgtgtttagttcattttaggaaaggtgtcggcctgtagacaaccattggtgtgcgtgaccggaaaaaaacgccaagacgaagcaggacagtgtgtttcacacactctataccagaggtgttcctaagggctgaccggagcgttttgctttccgattgtatacaccctctgacgcaaaatcccttcgtctccggtccttcatcttcacgcttttttaaggaggggtttcctgtaaggtatttcagttgccgctcagctcccgtctcttccccattcgattctgaggtcgagtctccctactctcggcgagaggaggcgaagccccgtgcgcgggtgatacacaggtgttccctgcgtcttgtaggcatttcagaacgggagctccgcgacgccaattttgtctcaggcgtctgtggtcgatctggagatatacgaaacggaggcgattcgtgggctctaggcgggattttcgtggaactgcgaaaatccatcattagatacacactctccagcgacttcgaaggtaggcggagtagatgccgttctttgggcacgcactgtcgtgggacctgtcttcagatattaaagcacgaatgcaatgcttgaattcaaaagatagctaaacgctgatgcctaatgccgggtatggacgacaagtggacttgaacgctgcaacagttttttttgcacactgacgaagagtcgcgtctgttgttttcatctgtagatatgttagctgttttgtggcggcatatccgtccggaaactcggccgtgggttgagcgtgcggtcaacctaaccctggcgcttaggcctgcgtctttcaactttttcgcgctgtaacgttgattccgttttttcaggttcgtcgtcctgtcgtgtacctgctcgcgacggaacaaagtccatgcgtgtggccgcttcaagatcgtgtctgccaaggtcgagccacccaaga

SEQ ID NO: 892 - DNA, 1654 bp, Toxoplasma gondii
  source 1..1654: mol_type = genomic DNA
actcctcaaatacacaagcgacaccctgaacgcgtccgtttcatacgccgcatccgaaatacatatgcatatatatatatatatatatacatatttatcgatctctatatcaccgcgtgtgtacaggtgtctctacgttcacttcgatttccatacatacatacatatatatatatatatatatacataataaaataagtattttcaggatgcgttgataggaccagtgtaggtgagttgggacgaaagtgtatatgtctacatgtgcgcagttgtttgctgaatgagctctgaactgacaaaagagccttcggagtctgcagagacgcttttgtgggtcgtgctgcagaaggagctactcttcgctctggcgcagagtggagaaggcgcgagagggagagaaaaagagcagagagaaggaagagaaaaagcaacaagggcatgctggaggcaggctcggtgccggacccgctcgacagccgaccccatctgcgacggccgccttatatatccgcacagaagcgctagagcaacgcgcgtatacaaaaacgtgcacactcccccgatatatataaatatatatatatatatataaatatattatatttttatttatatgaagatatatgcatacattagtacatgcaattctacacacatacgtctgtcgccacacgtagacagatgcatgtcaacaggtgtatgtagaaaaaaaatgcaaaataagttttttcggggaatttgtgaagactttttttccgtcaacctgatgcgtcgctgcttgtgtcttctctcttgttttccggtgacttttgcggtgtacatacacccgcgtgcttccttttttttgttgggagggcattttcatggtttccacgggggttcgcgctccagcttgccgcgcatgcagcagttgaggaatttgttttttttttctggagatccttttcttttttcttgtgagtcctttccggtgacgctctggctctcccgtcttcctgtacgtttgaggaattcctccgaactgtccgaacatgtgactcctggagaagagcggctgatctcactttctccctttctgtcggcatgcagtgtgtatcccaggcacagagttgacgggaggcgtttttgcctctggcgttttcctccccggttcagtctttctcgggcaggtcctttcttctcttgcttcctcgcggcttcttctcgcctctccttgtcgcatgaacgcgttgatctctctggccggctcgtgcaccacaaattctcagctgtctggccattggctggctaggaaggcgctgtttgctttttcggagcgcccgactatcttcttggcctctttcgtctcgttctcagtttctcttttgttttctccaactcctgcgtcctctctctttttctcgcgccgtttcggcgttccctttcttcttcctttcgacatccacgtgcactcgcaacgcgcaacctcagtatctcgccttttctgttcgcctccctcgtcgttccaagatgcttcgcgtcctgttccccactcttctctctctttaagaggcttctcgcgtccttcatccacccttttctctccctcaaatccaccttccgatctccattcttctctctctggcgcatgctctccgcgcctccggcacca

SEQ ID NO: 893 - DNA, 4723 bp, Toxoplasma gondii
  source 1..4723: mol_type = genomic DNA
gtttgagagaagacccgccgttcttctctgaaactaggagctcgaagaaggtctggcactcctctcggaattccaggaccgagagaggaacagaggacagagtatggtcgacggaagaaaggacgcggagaagaagagaggaaaggagaccgatcggcctcgtgtacctggcttgcgaagcctgcttcagcacggaggctgagctgtaaggagaacgacgcagatggcagatgtaaagacgacgaggcttcttctgttcgcggtgtcgtcttggcgtccgtcaagtttttgcgcgagaaccggcaaggagggagaagcgggtggagcgaacgaaagggggggaagcgcgcggccatcttggaagcaggagagaaattccagttcgcccttgagggaatccagttgcgctccagcggacgcgcggaggtcgaacagaaacggactctggcgcagcgagtgctgacaaagccgcgtagttcacggacacgacagaaagaagactcaaaagaaatgacaatttgcatgcacatgcatcccgttttccaagagaggatgaccaccccgagatggctcttcagttcactgaaatctgccgcctgcggctgcacgggggacgcgcatcggtgagcatctgttcaaccgagggaaaggcgggcgagctggggtgtacatacacctgagggatacaaggccgcgagaacccccctcctctgggcggggctctaaagtgcatctactccaacttctccgggcatgaatgacggacgcgttataacaacacagaaggaaaatacagatggggaagggaggataaattggaggaactgaatcctcggggctacgatgttgtagcggaaggagcaagcggagtgtctggagaggacgcctggtggcgtagggaacgccttacggcaagtgacagagaccgtttcgtctctgcctcctcctacataccgcagagagaagcagggaagatgcgcaagtatccgccatggcctcttgtgctccggaaatcggttctctcctgaggcgtaacacaaggttcccaagaggaatccacacacacacgcacgtgtacaacgtggaagacaacgtaaacatggaacgtttttgagtgacgacaacgggaaatctctcactcacatccgcggaaaacggagagcttgaccggggaagtacatgcagttcatttgacagcacgaacttggatttccgtcgtcgcgcgcgatcctgaaaacaggaaaatcgcctgcgggaaaccgcacagagttcacaaacagcaaggcgcggcccgttgccagttcgcccagctcctaatggggagggaaagcggcaaggcgttttcggggagcatcagcgaaagactgagaagaagagtcggaggaaacacgatgcgagttggaggaaaaagctaccacagcgaattccggacgaaggcgcaaccacgaataggaacccaaactctaggcgtttcgtgtgtgcagtgggcttaaggagtgaaacatgcagtttcagcgagttcttgaagcagcggaaacgcttttctgagaaatctggcgccaatcgatgcgggtttgaggtcatgcagtcctcgcatgccacaaatcgagatatacgcctctgcatgcgctttcctcggtgagcgcaacgagactgtgtctctcagttctgacaagcaggcccgcaaattccaacttcagtggacgatagacacacacggtgacaagcgactctcctttgtagaggtggaggaatcaccttttgaccttgacagactattcagggaatgaggtcagagcgaaccatgaaggttcacggaactcggtttagaacttgctcacaaaccacgacaggagtacacgtgaatctttgattgttttcgtgctcgtcgcccaccaccgaattgcatgcatcgcctccgttacagtttcagtgtgtttacatgtcgcattgaccggcttcgacctcctaagtcggcgatcgcttcacggggatctgccgcaaaatgaatcgggatgctggcgaactcctcaaggtgtggttcggctgcaagacgagactttgtcgcgcgccttccggtggaggaaggcaaagaaactggctgacgacgactctgccttttctcacccacttgcgcaagcaaccaccgtcagcttgattcggtcagggtgtcacaggccgtacctctgccgtgaagcgtatgagcatttgcgcgtaattaaaaatgcctcatcgttcctttctgcattgtcgaccgcggacgtatcaattttgtgccatgtctccattatacgagctgatacgtgtgcaaaagtgccggacgtgtgaaaacgccagaaaaaggggtgacgctgctgcagtcaacacagagtcggtacgaaactgaaacaaggcagttgacggtggggggaaaaaacagttgaatatcgtgtattagtataacaacgataataacggtaaggtgcgatccttcttggcaattaccagaatagattccccccaaccccgcgaaccaagtactcaaacaaggtggtgaacttgcaccagagggtgtttccgtcggcagaaccggttcgtaagcgtctcattcatagctcgcgaccgtcgtcgaaatcgcctcttgctgcagcaaataggagtatttcaaccgataggcaaacagttggttcgcagcgacacattcttcgagaggctttcctcttgaaagaacggaacgcatccggcgcgtctcaacggcagcggaaggcttacgcaccagctcgagctgctgagtggtccaatttttactagtggacgtcgttccaatcgccactcgacaaacaacacagtcatgccgacagaaagtgcagaaggctcacaaagcaacggtgtctaggctcaacgtggtctctcagccggacttccttggcgcatgtgccgtcacaggatcgtgtacacaaatactgtatcctctctgatggatctaccatctttacagttcttcggctggtatttggttcgccaattctttcaggttgacgtgttgaatatcaactatttttcagtgacctggccgcttcagcaggacgtagaaacttctgtttgttgcctagtgtctctacactcgagaattgtttatggcggcagtacttcaccgcacggtcagccttagatcccatggcactccaatgtttcttgcgcatgactcgtacttcaacttttttttgagcaaaacgaagtcaaaggaaaggctctcgaatgacggatagactatgctggcggcgaccgataaaattcgtgagcattccaccccggtatgcagctcttacacagcgtctgtattctcaacgggagaaacagatctggagagacagaaagcgtttaagacgaatggtaagaagtattgcggagcgaccaccgtactcacacgaaagactccaagcctcctccccggtcgtcaagaagttgtggcgcttagcgcggcaggccgtttcgatctccgaagccgctatcgatgagttttgactcgatcttcgggaaatgaaaggactcgcctgacatctgtggttcagcaacaactctgtcgaattgggcgcagttcatgttgccaggtcagtgcgacaacggagtttcccgcgtcaaaccataaatgtgcgcttaatgtggatgagtagcatttgagcatccgcgggcattttatcagttttttatttccagtttcttccccaaatcggtcgtcggattcgcgaatccttcaagactatatcggtttttcaaaggcgggcactaaataaactggggaagccagatccccttcgtgacgtgaggtgtaggggttgtttaaagccgcacctcacagactgaagactggcgaaacttcctcgcacgaggcaggttggtttccgtctgcttttaaaagcgaaagataacatttgttggtggagggtttgtctttcacagctcgcacggtgccgcccttgccgcacgcattgtcaggcgttctgagcgctcccgccaactgaggcagagcgtgaatgttgtcatctccaggcgacttggttttcacagtgaagtttccttcttcatatcgcagatgccggctcgatgtgtgttctcgcaacctgctctggactgtgaaactgacagctcgcttcttgcccacaaaacggtctgccgctccccgggtctctctggaggcgtcgagacccggacggtgcccgaagcatgcggcgcgccgacgatttcagtgcccagtcgccaccggcagtggaagcgatgtttcttttcgtgaagttcgctgtgtgtctgcgagcgcctttctgcgtgtcgccgttttttcccctattagtttgacctaggcgttttgtcgattttccgggtttcgatcggccaagagccggcgaagggaacttgcttttcgtgtcgaatttctccactggccgcttttcgcagcgttgccgagttgctctgagttggagtttccagtcctcttcttgagttctcccggaaagggtcctgtttgtgcgcctctcggctttgagttttgcgtttccacgctgctgaccgttgagattcgcctgcatctgtctgcacttttcaccgaaccagacttgcgcgggcatgcagtgtagcctccagagcccgacggctgctttctgtgtgttgtgcgtccctcggccgcaggcagggacgcgtctgttttcccgttcggaaattgccgtttgccgctgagttcattccccca

SEQ ID NO: 894 - DNA, 3823 bp, Toxoplasma gondii
  source 1..3823: mol_type = genomic DNA
tctcgcgacttgcaggcgaagccgctcctcagaagaaacttttgcctgggtgaggtcgtcgtcgccttcttcgtttgtgcgccctgctctctgcgactctgctctcggttccacggaagactggagagactcggcaacttcgtcgacaggagtgacgctcagcaagagagggatgaggagagaagccgagtagacgtgaggggcggcgtttaacgcaaagcccgacagccagctgcagacggaagcgccgtcgtacgagctcaggatttcggatgtcatgacacctgcgggttgctgcggcgcgccttgcgacgaatggcgcggaggactcgcttcccgagagtcaggagggacgggtttcagcttcgcgaacagcaggggaggagcagaggcaaatacgtcgacgcggaggagaaacgaaacaggcacagacgaagaggcgtggttcgaagagtctccttgccaaaaagcgtctccaaatgccgctggctcttgcgcagctcgaagcgccttcgcagccgccagcgcccccaacccgctcaggtatacagacacctcgagggtctgcgccggcgcagagtcgctggttcccggcgtcagagttccttctagaacgacagagtctctgctttttttgaacgcattcgccacttcttccagagagagatacgcttgtgtggaagtcacgactcctgcgggcagcggcgcgggcgcagccgaggcagacacagataaggacaaaatgccggaagcgactcctcgaggccaaccccagcaatcgacagacgccggaggaccagtagcactgcacacagacaacaggagaagagaccacaccagcggaccgcaccgccacaggcgagaagcctcaagggaacccatcgtagaaaaaatgaaaaccctagcgaattcgatagaatgaaaaatgtgggtcaaaagaaagtgctatgcaagagaagtggtttacgtgagcagcagattagaaaaaggttcgagaataaatccttaaggggaaagtttgccggagaactactctggaaaggttgacgcgaacgaggtggcggtgacggcgtatagagtcacacaagttcaggcgtctgtggtgtcaagtccgagaatcccggaaaaagggggctaacacgagaaggccggcgtcaggcggaagcacgcggaaatctctgagttcgtaagaaaagactcttttaagatgtaaacgtcattccacgagtgtctagagagcaggaagaagcaccggagactgatgccgactagcaaggaacgacgacacgcactggctgtttctatcagaccaccactcagattatacaggtagaaaaatcaaggaaatgaggaaaagacgaagtggaacagcacttgccactaagcaatacaccgtagacaaggggaagaacgcggaacgcacgccgagaacagacagctcgccagcacacacgaggtgggccggaaagtgtgaaatgcactgcttctcacaagctgaatgtgaaaaacgtagtcctgggaggaacgcggagaaagttgccaagggaaaagaacaaaaacgacggtacaaagaaagattaacggtggaacgctttaaacgcccgctgtcactcatgaaactccagccagccagtttgccaaggagcaacctcgaagcatcgcggaaaccggaaagccttgcgaaagtgaaatcttcggagtccgtttcatagttgcgactaagaagccgaatcaggaaaaaaagagcaaaagagaacagagatacaactctttggcatgatgaaagactgcgcagtgtcttgttgaggtttacccggcacactttcggcaaaaagcgccgtgtcgatggcgcttgcacactcaaattcgtgacattctcggcgctggttgcagccgcgccggaagacacaacacaaagattgtctgaggaaaaaactaagcgaatctgcggcaggattcggctttgaaaacgaagaagatccgggagaaaatcgtacacgtgctaacagggtcccggcgggttgcgtacaccaggtgcgcgactctagcgtagacatgcagcaggctgctcgacactggaggtaatttggaatctgttttgtcgctagtttttcaacaatccaataaaacgactcgcgagtgtcagaaaggagcgaaactccacacctgcggtgggctttcttcgagcacagtctcgagcttcgagtgtgccacgccccgagcggggaatgcctgtggttcttatcgttcttggggggccagcaaagtcacaggaaaggctcgctgaccgttgacagttttctgttcctctgtcatgtcacctcctcacagatgccaactgcgcgcggtcgtcagaaagatatccggcccttcaaatcctgaaactgaagagccgccgtgtacccagcaaccaaaacgaattcggcgaacagacaaccaagaaaccccccggattcagtgcagctcgacttctgctggctggccaaagggtggaagaccttatgcggccggtggtacctataattgaaatcctttccgatcggatcccatctaatagttgcggtttacattggaacagggtgtcttttctcgatgaaaacgcgggaaatggaacatcgcgataatctaggttccagaatggaagtggtggtgtacaattgcagaagctttctgtattagaaatgatcgaggtgaatgattgcactcaggagcgactgcgtcgacgcctcgagctaggcccggctcacatcagggtgactagtcgattggaagttacgactagatgaatcgaccacggtatatcacaggagactctccgttgtgctagcaagtacaggcagatgcagctgaagagtttgcgtttcagatatcgtgattacgttgtcaaatcccttcctaaaacatcaaatttcgacatttgcgagagttcgcaattcctgatgaacgagtctacaagcaacactcaatggcaactgcaagtcgacccttcagccacaatctgctgatgcagaccggaaagggagccgggggtggtattcgatgtccttctacgagaaacagacccgcttgtccggtttctgtcaaaacacagctcaaaaacccacccagtctgacccttctggcgcgcgactttttcttttagactgctgcaacgatccgaagccgaacctgctcatatcctgcgaagatagtggaaagtatacgagcatctctgctggttctttggacgtccaggtgaacatgacactcggatacgttttaattttaacttactaaagcccacgggagcgaagcaaacagctgcttgtaagcaaatttcctggttagatgcgtaacaactccacatcctttagaaatttcgtcgcggtgccgagttccttgtgtacagccgaaagaaatgtgcttcacattactcgtgaatgagtgcgcgagagcgatgagtctacggatttgtctggcccacaccttctcgacatgagtgcgagaggggccgggcgacccgtccgattccatgaagcatgcttggcgtcttttctgatacagcaggcatcccggtgacccagaccgaatgtgtgccgactcaccgggatttctgcggtgttttactgagtgtgagtcaaaaaagcgtttggtttttcctttcacagcatacgtgatcattgtatccggcgatatgaagttttgaaacccatagatgcgcacgttcgttccgttcgtgtccctgcatctgcttaaagtacgtgcggacgataattatatcaatgaattaccaatttaagctgaagatgcacttcgcgtggctaactcgttagctcgtcgacag

SEQ ID NO: 895 - DNA, 3825 bp, Toxoplasma gondii
  source 1..3825: mol_type = genomic DNA
cgtggtgcgttttgactaacgactgtagatataccctcttcaggcatatcaggaaagctacccgctaccggagatcccccttcacacgcactgcccccgcctacagcagatgtcgacggggatgcagctgctctggcggtatctgccgttgtgggcccgagctctcgcctaaaatctgaagagtttgcggtcgcttcgtttatcttacgaactatttcttgttccggttgttctgattcaagctgtggccgaccgcaccggctacaccgtgcattgtcccccgccttccgctctgctggggcaaggtttggagtcctgttgccggaaaagcattcagagagaactgatggcagaaggcggcgcaaaaggtagtcacagcagggcagtaaggagtcccgcggtcggacgtctggagaccccgcaatgttgtccgggactttcccttgactgcaggcacgggacacacccttttcgccactgcgacaacgggatctggcatcacgcgaaggcccagttgacctgacgaattgagtcacaaggcaccgaccagctcctacctcgaaggggtgaagcatccgcatgccagtacgcgattggtattcggtcaaactgcaaaagttcagagaagaaagagcaggggtagaacagcagaacggccggggcgatacagagggcactcctctacctagcacgaagctgttttgacccgacatagtggtggctttgtgtagcaagtcaaagcgttggagaagaagatgtgtctggtctgcggagaccgacgaagaaggtcgttgtctaaatcggtacaacagctcgtctcccctgtatctggtttatacagtcaaacctccgggcccgaagaaacagggcacggcacacacgcgttccagttgttcatcatcacgtgcaaaggttacaggttatagtctcctggtgaagcaacaagggagccagcacatccgttgtggtgtgcttttccaagagaaggcggtatagaagtctggtacctcagtgtagtcaagacttctcctggagacaatacacatgatacgatagacagaagtcaaaatcaaacgtaaaatggactgttaagttgtacgtctcggatggaacaaaccacaaaaaaaaacaccggtacacacgagtcacgcgctagcgcgcatgcacgcgtaaatctcgtatacatcgaagccacaagtcgcgcgaactatttgactcgttctcattgccagcgactgtttttcattaacacgatctttatcctcagtaatggttgctcaaaaggcaactttgtgtcattgatgaggaaacggtgtcggaaacacatcacattttggagcagcggatcaagacggtcgtccatagcgctgaatcagagccattcgcacgcggtcacgcccttgggaagaaccgtgcgtagtgatattcttttcagttacaagtgtggcaaacagcggaactgcacaggatcccagagatccactgcagaagaaactatcttggagtcggaaatacatgtgatggattttttcgctgttgattcacgtgtgttcaagtaccacagctagagctcgagccttcgcaaaaaacagcagaatattttgccgttgaaagctccgcttcttgacagccaccacgtgctggcaacgcagctgtgtgccatcgtgacacagttttctcgcatcctgttatgcttgtcgttagtacggaactgatgtcaacaaacgtcaattggtcgcataggatggtggtagtggcattcagaaagaaactcaggcttgttttgtaaagacattgtgtaatattggccagctcacttaagtgtcactgtttatagcaatgaaatgcgagttatgtgcagcttcagtgctacttaagggatatgtatggcagcttggttcgctaaaggctggaatgcgttttacagaaaaaagggaaacgctacacgaaccaacaatgggattagtgcaaaagcggctcccctgggggaaaatgaagtgaggggaggcattgtgttcactcggagcaactcatggtcgagtatcgcggatgcgaatgtgaagaaatctctccgctgtcagcctgtgacagtaaggtgtaatccagctgatccccgccgtgggagtccaccagtaggacattgcggcagcccccaaccgttgaggtaccacatgatgacacgattgacacagcagcgttctggttaacttgaccgctatcgccaaggtttatatcgtcgtagtctcaggttgtatgttttaccacttgatcaaaaagtcctaccatcagcaaaacgggacaatgggcggtagcacgctgacgagcattaattgctttacttattagtgcaaatattcgagcatcaaatgcagccagcaggtatttaagatgcggttcaataggagtaccgcgcatcttcggaaacagactagtgcgaatggggtcatccacggttgctgctcggcgacaccttaggcattcgaacatgcagcaagaaggcaacaataacaggagcaatggtagctgtttgaagaccccgtttctcttgccctagacatcgtctttcattttcatacaagtacgaacgttctgaaggtgcaattaagatggctgttgagaagctctcttcaccaccagtgcatcaccgacaaaggcgctgtcagtctgtccctcctcaagagggtcgtcacctagacaagtgaagtttcttgcagttcttgcctgttcccacctctgggaggttgcagagaagacatgtgtgagtctaagaggtaatctggcataaacagtggagcctattgacaacagccgtcgctgcgtgttctcagacgctgctctcgttttatctgtccagtgtccattctactgaaaaccgcatagacacagaacccaaatgtggtaacatccctgttacttttaaaggagcggtgctggtgacggatggcaatcctgacgccgcctgtggacaccctgggggaacacgtaacacaacattcaggcgccttagtcacttcaactgcgtatgtcgaaaatgtttcttgccgagcagaccgacataatatctgtttttgtggactgctctgtagacacctcttggcagttgccggtcacacactcctcgctttacagttaacagcaccagagctgccatgaaaaaaggtttactctgcatgatcgcagcaagcgtccgcgctcggctgaacaaattgcttgttgccctgtcttttgtcccacatgaagccgccttctaaagagtgaactattctcaggagattctggcggagcacagctttccgacatggcgctcgtttccctaataggaacaaaagtttgcataagatattattgcactactgctaccgtaaatacattgcaacggcctcccaacgaggtgatcgctgcccctgggacgcatccgcttccctctccaggactgtggcacttctgaaagatgcaatagcagctcgtggaaaataggtatatctgctacaatttctagcggtcagggtttggaatatcggtcactctcaaacccgcgtaatgcccagcaataaaatagctccagggaaagcccctttatctgtgcgctgaaccttaaagcggcactctgttgcatagcgaagtgttttgcaggcactagacgagggaggccggatgagggatcgaaggagagttcacgttgccacgaactgcagccacaccacggacaaatcgcgcagggcaaacgtggagttgcaatttaaaaggggagtcttgcagttgacaccttgtttagatgtggcatcctagcacccggatccaccaccccgttcccacctaccgtaa

SEQ ID NO: 896 - DNA, 3197 bp, Toxoplasma gondii
  source 1..3197: mol_type = genomic DNA
cagtaagcaaacgaggttcaaaagggccgcctaaagctcttcttttgcagcttcgggtgaataaaagagaccagcgatgaacatgttctggaacgaagcgctcctccgcatatcctgagactctccgtctcttgcccggctcttgttgactccgaaaatctcaagtccgatccccgacggaaccaggggacaccccagagacgaaatgtctcgaacaactgaggatggaaaacggaaaaatgacttcgaagaagtccaaaacttgatggagaggtaacgggctctcagccgcacagaatcgaccttctacatttaaggaatgtccatgttctctcagtgaacggaatccacatgtccagaactgcctcctcccacaacgcgctctgtgtatgtgaaaagataccttcaacactcacacggatgcaggcacacacgcacgtccatgtcgatgcaattggaggctttgtccaattgcatgaaaggtagcgctcactgggaactctaatgacagcaggacgaagggtggcagtcacagaaagtgcgacccgtctgtcgcctagaagcggtatccgagtcattaacccaagagaaaaagaagtcaataagctcgtttttgtctgctgagaaaacctgttttcctccggaagagaacaggaggctccagggacaggcgggtgtccagggggagtgatggcagtaatccatagatcacgcgtgaaacgaaaaaagtggagcagctggatatgaataggcaacgaacgcgctgccagtgagagaaaggcgcaaccgaccaaacacgaaggcagagaaactggcgatcgacgggggtagaacattaaaggtccccgaacgcgcacatgggacgcagggggaaaggagaagtcataactgaggcattggaggtacagaaaaaggtaggacttcgcctggacgaaagcatatgattcgtacgaagccacttgccccagaacaaacgcaaatccttgaaacctgcgcggacacctgactcacgtagagaggcgattcattgggctttcaggagttcggcgctgcgcttgttccacgacataccgctaaaaagtggagagcacagaaaaaaatgaactttaagtactctgtcacattttcttttgcactctctctttctccgtctttcccgtcttcgtctgctcgcctcgcctggtcacccacccttgcgcgtggtcgttgccgcggtgcttggtactaatcctcagaacagagggagacactgcgaaaaacagctcgcgagggagcttcacgaatgcagaacaagttaaatcgaggagaagtcaccttcgtggaaaaaaagggagaaaaaagccttttatcgcggaaacgctccgactcccagacaacgtggcgggctagcgacttgcgctgtcgagagacaagagggtcgcgaggaagaaacgacaaagacggccgcgagaaaagccaaaaaggccgcggactcgacgactgctcctgcgacaacaaacctagaaaacgtttcaagaacaaagataaattccggcggcgcaacgggcgatgcggcaacgacaagcacgcgggagacgcgagcgcggggaagagaccggttctcacagccaggctatggcaagatggttaggcgaacatgactttgacgaagaaagaacggaaggaacacaacaaaagaagtaaaagatcctgctggcaacggctcacgagaaagcgcttttggggcaggagcgggagcagcaagccgacagcggactgtcgaggaaacgtggacacacgttctccaggatcgattttggctcgacacaacacggagttatttgcagagcgccagggcggatatctggaaaaccaacgcaattcgacccttcgtaatgtccggtttgtgccccttcagctcttgcgtgaaaccccgccgcgggatccagccgttgtgcccttgtcttgtcgaagaccttatggaaggcattttcagtagaaattcagttgtgggtttcatctggtttcgcggaactgtgcttccgcttcagacacagatgctctctcagtcttcgcgcctgtggacaacccttgtccttcgtaccaggctctgtacaatgctacagaaattgactatagtttctattcagacactgttgtaaagaatctttccgtctcggtgcgtgacgaacataggaagtgcttatacctatggaaaggagcctgtcgtcagcttttcatttcggaaagcaatgcagcggcattccgtcaaaccgtgcaggtgccgcctgctactctgacttacgtcgagaacaagacaagtctctatgactcgtttgaactctggcgtttgtgtggccacagcaaagtcctggtgctacgaatcagactttgtctggacttcagtttgtaatccagaagccagctgctcgactcataagcatcagaacgaaccgctgtctacgcaggtcgctgacgtttcaggtagacctagcggttgctggtggagtttgtcagtaggctttggtctatcctcttcctcatgcgcctccagagcttgaaccagatgcatagttttcgacacggtacatcccatcaaaataaaggaagccggttccttcgcaaattggatgcgatcggactctcgtggtagtgcgggatgttgtcagtgaacgacagagacctcccgtggaggagtctgcctagagcgactgtaaatcacggttttttgtcactctcgtaatcacgaggggaaaaactctgattggctttagaaagatcagtagtgctagactctccgcgttcctggatggtttcttgaaatgagaccgctgctggctgaagctcagcatattatacgagtcaccttcaaccgaatctgtcggtcaattcgtatagccactagcgctcagtttctcatcgattttccggtgtggtcttcttgcaccactctcgaatcggagacacgcgggtttcctcgtgaaatctctcttgaaaccgagggtggaaacggagcgcgcggtctgtcccagcggcggcgcagagttgcccggaggtcgtgtgcgtgcgctccgctcgagaaggtcgtctttttcgtccactaaacttggatggaacggcgcctcttcggtctgtcaggggaaaacgcggctccacagggaaaacgttgcacctggttttcctctttgagtacggacagcctcgggaggttgcaaaca

SEQ ID NO: 897 - DNA, 2342 bp, Toxoplasma gondii
  source 1..2342: mol_type = genomic DNA
cgatatacgcagagaaatctcgagaaccgtggctatgacgaaaaagtcgtttctctagatggagaaacaaccgacaccggctctttaagaagttatagttttcctagatgcttatggggaaaaagggggaaaatgacacgtggattatctctggagggacacaaaaagcgctagaaagaataaagacgcgatagacgggggtgcgaaacaaacaaaaacctgcgagagatgcacggcagttcagagcagatgcgttcgagagctgttgccgtcgaacggacgaccgtagaaataaaacacaacgttgtaacccattcaacaaacgttcgcggcattccttgatatatgcacataaccgaaaaccagacgaacccgatcgcagaacagaacgatgtgctttgaaaaatatacacacacaagtatgaacagatgtgctcgtgagtctgcggctgtcgacggctaattgcgtttcggtgtttgtacacgtggatggatacgattctgtgccgcaacctgaacgtcccagttcccctttcttcttacgaaagggcactaactacacgagcatctcgccgattcagaaaaccacagcgaagaggaggagctctccaggtgccgagtgacgcaaaagagtcaaacaaaaagcgcaaaacacgacacagagcgtgcacgtgaaccgaggctgaagcagaactcgagaaccccgcctcagtcccggaagagtctggcccgttcgacgggcgcaacgggtccactttcccgggggttcgacggagagaacagataaagctgaacaaagagcgtgaagagagctttcaaacacgcgaggaacgggaggccgacacaacaatggcagctgtacacatccacagagactccggagattctgcccctgttttcgagttctattgcccccggttaaccccctaatttttttccgagttcaccactcgcggcaagacgcaatgcagggacgaaaaacgcagaggggattgttcagagacgagctactccggagaaacagcggccgctatccgtccttttggctagaaaaaaaaggtcttcggtgagaagggatgagcgacggcactatttgctctaatctacagatatcgtacgaacgatgcggatcttctagtggacaagtcctgccaatcaggtgagaataaaaaagcaacggtgcctcgcatgcaaccttcgcttgccggcagaaagccaggtgcagactagcagcaggtcattagacgaaacgacgcacttatgccccgagtgctctctctggaaccgagaaaacgcgtcactcacaaaaagccatagttataagaacagctgatctaacacggacactaactgaacggcgaggaaatgcgtccgcgaggtctcgcaaagcaaggaaagaagcttttaactcccggatgtaagccggaggaagacggcggagcgcgcacaccaggtcagagcgagaggctcgagctctatcgaggtcgagttcgcggattaaaaggaaaacggttcgggaaaagctcgagacacacggtcccggcagagctgcgcttgcgcacttgttcattcatgagatagacgcgaaaaatccgcgaaaaagtggccgaaaagcgacaaagtcactgcctgctgtttgcgcgcggcgggcaacctttcctgtgcgaaaagcgggggttttgcctgtgaaagccgcgaaacccctactgagtacgaaggtttaccgagggtcagtttctttctgacgaatttccctcaaaacgtaaaaccccgtggacaagcggtgaacggaaactggagaaatgctctccgacgagtcgccagtgggggctctgggagggaccttgttctgagggaattccgcttgtgcttcctctccgcgcttcctcatttgcttcctctgatttgtgttgattctggcggtgcctcaccagctacttcagcggttctttcactccttgactttcctgaatgcctcggtgcttatggtcgctctgtccgtgcagctttttctatatagtccgcgcacatgcacagttgcacatgccagaatgcggatagaagacacaaaaacactttcggttcagtacacatccaatcagatttgaatgcagttgttgttttcgcttattggtgtttcaccgtgctggcctccgtccgcgggcacaccacctcttttcataaaagacgtctgcaggtacgcgcaagtggaaacaggttccccccttgacgtcgtcgaaacgctggtgcctctgtagctgcatgcctgtcttgcggcttcctctgcagacctgcgattccgttcttaatcgaaatcattaaacgctaaactgtcttgaaaa

SEQ ID NO: 898 - DNA, 3441 bp, Toxoplasma gondii
  source 1..3441: mol_type = genomic DNA
cgacgtaaggtggcgaccttcatcatgtctaacagtgtcttcgacaacttcttcgctttgacatacgttatccatcaacagcctctcattggtttcaccgtgctgcgtacatctaggtggcaaatttggggatcgagagcgactagcgcagacatgtattgagcgttcctgaaaatgagctgccacagtagttcttagattcgataatcaaatgcccttgagatctacttcctgtgctgtgctcagacaagggtacctaggatagagatactggacgtcgtagaacgtgacccacaggaggcttcgcgcacctgtttcctttaatcattgcagccgctgcttctgaaatagtgaccgaatagctggttgggtcccacactgtgctgtttgctcggctccttcctctcccgacttaatgtttgcctcattccgccgatccttctcgcatccttgagacttctagagcacaagaacgatcagcgcaataaaaggcggccagagcgtgtcactcttttcaccttgagtaacagatgccgatgtgacggagaaatcgtcttctgcacaagttacgtgtatgccacggtcactttctgaattgtctaagtggtggctgtggctgtctcccaccaacgtggggaggctggaccgaaggtgtgtatctcgggacaaactgactgaaggtgttttcaacgcaactaattctactcacgttattttttgctcttttcacttatgcgtctccgcttttgtgtttttgcctgtggccgtctgtaatccattgcaatcgcagtccacaaactgtttggggtggcgattgtcttccgaacggactagaaccgtcagtgcctattacctgctacagacgggacgatcgggtgattgacacaaatacgagtctgcgagtgtcaagggggatccgataacgctcttcgttttcgttaaaaggggcatacactcgcaggaactcaagtcatatcagtcggggagatagagtgcgctttcccggctgccgcaactctgacagaaatcacgagcctctgcgaacggcctgttcctcgatctatcccagacagtacagtcgtgcctcacatctgggtgaaaaggactacgcatggcggaaacacggtatggtcgttgtgtccaatgatgttggcgttgcagtcgtccagtaaaactgtgcaagtttttccttgctgctccatccaaagttgttgacggcaatttagagcatcatcaaaacaaggcgttccggtctggtgtttcagctgaactgatctgtgacgaagctgcccagcaggctctggcgggccttttgaagatttctgcgactcagtgcgtgcgtgctgagatgcagttctgacatgcagggtcttcgcatgacctggttacactgtgacgttttgaacccccctctctcaggttacatgaaagcaatagcaatgtttctgttgtgtgtcaccttctggtgctcaacttgccgcagtcacttggaatacgtggactgtgcttcctatatcacccgaactgctgtacttcgttaagatcgactggaatggaatgtttaagaaaaaaggagcacggcttgtttgcctaactgttctgtcgcgttcgcagcagcgctgtgaaaactctgtgcatgtctgccttcgggtagtccactttcgtcaggctgaaaggcactttcagaatcctgtcgcgtggaaacaatcactgattgttcggtctgaccgaaaagacaggcagaggcaacacgagtgtgcacgtggcatgcctcgtttccaccttgcgtttgtgttcaaaagggtatcccgtttaaagcgttgcgcacgacgaaaacagcgaatcatcgtggtatccaacagcaaccgaagcattaaaagaatacattaaaaatagctgctagcagaaactgctcacgcaccagcgacggaacgagaagtccattctgcagctatactgctgacgctaagactcctgagtgtaactcaagcgctgtagcaaacaaaaccaatgagcatcgtccttcccactgaaagacacttgactacgttactccatcggtgcctctaagatgagactcggctgtataaatacatgtatatatatacatatatacacacagttacatatatgctgtaagttttcggcttcgttgagactccacaaacaggtatggacgttcgcaggtgtatctgtccacatgcgaatgtcgaagtggagcggtcgaaacgctgaagagccacgatttcgctgtgcagttcgagtgtatcccacgatgcgcaaaaatgctccagtgtccgccacgtttgagacaagaatcttcagcgatgacctcacagagcgacgccaaccctcccgcagcatggttgcctaagttcgtgagtgcatcagcgcagtgtgtttcgcgtagacactctcacggcgccaaggttgcggagtctctgtttgccgtttgttgtttctgcgtcgtgatgaaacagttccgcggaacgcggcatccacaacagctccccacaagcctgcgagagaaaccggaatctgcgaccttgtgcagtgtctcagtcacgcagaaaagggccattctgagtcctcgacactttgtcacacaccgttttcactccgccgagatctgacagaagagcaagagggtcgaagcggttctttcctgtctaaaatcggagagcgcccgcatgctgtgccatgtggcgagatctgctcggtctcgcccaaatttctgtactctaccgcgttcggggtcgtttttccgctttatgtgtgtttttaaacaaaaggcttgtgtggcaaccaggtctggcacctgctgagtagctggatgtcagcgaaccgagttggaatgcagacaacaacgcaaaatctctcgcccgctaaaccgaaaaggcgcttcttttgccgagtttgcgcgagacagcggcatctgttcccagcgcgacggcagcgttccacagaggagattccgacggaactgagtggaaaggcgcctgccgaactggaaatgaactttaggaatcggatacgggtgtccttcccttgctttctcgcctctgcaaagagccgttggtgccggtttttgccgccgtcctgctctcaggcccctcctgggtttcggcgccggccatgtgcaagcaacgtcggtcgcactgccagccccgccagaaagttccaaccaagagtttctccttttcactccgttccgctgcagtcaaagctgtgagaggtggcgcgcgcttgaagagcgggaaagacttcctcaggcgcgctgtcggagattcgcatgtgatcggagcacacatgcacagagcgacgtgtgtcgatggtgccaggaaaccacagtaaaatgcgattttcctcggctctttcctccacgacttctctgcctcctaggtctcgaagcatcgccgtcatgcctttcgcgaggtgata

SEQ ID NO: 899 - DNA, 2600 bp, Toxoplasma gondii
  source 1..2600: mol_type = genomic DNA
tggtaaactcgggaatagtgaatagaaatagatctgctacacacgatgagttgtcagtcgatcaggtagctccagacggccggggttggactccgtgttgcagcagtgttgcacactggggctgaatcgaagagaaagaaaacgtgtgctgatggttggtctgcttcactttaaggtgcatgcttatcctgcccatagttggactataattctgactgatttttcgcattctagcctgtcatgatgaggctgcatgttatcgagttacccgtccgtcttctacttccctgtgagtccgttgtaaattgactcctgtggattgccttttgcgaggatacaccccgatgtggttttttatacgatatcacaagtctgctgtacgttgaaaagagaaatcatgactccaagtgtgcactgcctttccgtctcttttaagaacaagtccagagttaatgacgggcacagtctggtttagtcactcattcaagtcttgaggttcgtgtcttgctctatatgatcaggtgaagtactgatcaactcgggtagttcttctgcaaaaggcttttcgtacagtcgtacatatgctcacacgcacttactgaaaccggatcgtgccttcgctgtccctcgtgacgttctatgcgaaggcaagtttcacagaatctgggacctagggagcggggtgactctggggggcccacaattatgattcaccgcgtatcgaggctcgtttggcagcatgcgcacccgtcgccgcttaatggtatgtgagttgaatcgcggcgaacatgcctgtatttttattgttactaaaaaccaacagaaacgagaaatgtttcgctgctgtgtttgcagaagggaagacaaaggattcattcctgtcaaagaagagtgcgcgaataagacaggtcgtttataatctggttccatgtttcctttctgcgtttaaaactaaggtttccccacacgaggacgacttccattgctcgttcgtgccgatcgtatttctcagcctgaatgagctttgcctccaacacgtccacgagtaaactatgacaagggaaacacaactgcgttgccgcactacgatactgtacagtctctgttcacgattacgtgttgcggcgtacgagttctgaccctggttgttacccgcattaagatatgtgtgatgtttctgctacattctctgacagtccgtatcctgttaatttctcggcatttctccctggctacatggatcattacgggatacttttccttctgtatccggtgttcatgcattctgtcttcagtctgttttcactcattgaggactcacgctgaacgcgccacacagagattattcacggaatcgcgtcatatatggtgatgagcaaatggtatttactcccttgacgaactcttatttatgaacctgtccagcaggcatgactcggctctggtacttcttagaagtgtttcgtttatccctgaagtaggggactctcacagaagctgagccatggatgcgatctctgaagattctgttccagatgcaattgcccagcagaacgatgcgtccgcatctggggcagctcgtgtaactgaagacgctttgcccaaagacaaggaggggaacaaggaacaactagagcagatattagaatcgaagcctaatgatgtgtatgggacagcaagcgagcacattaggtggaaagtcgaagaaggagctaccagcggttcaaataccttggccagtgcagtactcccgccgtccgacacccaggtcaattccgacgattccggcgccgcatccagatttgagcatattgtagctcttgatcagcaagcggtcacgatcaataaattcaatcctcccatgaaccgtgttcgaagagattcagctcgagggcgagcaagtgttgtcccagaaaaggaagatacgcgtcgcacgtggtacttgagaacaagcagattgcttttaggagcagctgtggctgcattcgcgtccattgctttgcgggcatttgcgttgtgcacgaaggaaggtttagcacgagggcatcaccaaagcaagaccggcgagaaagccctgcctcatatatcccctgtagtattccatttcggcgaaaaccccggattccgatcccgcaacctgcctcttctccccaccataggcaagcctgactcaaggcaagaatacggaaaaaatcttttacatgcgcagccagccctagacccgtcgcagcacgacatcgagtctcttcgacgttcgtgctctgagtttgccactgcagaatattcacgcggaagccacgacgcagacgaacaacgtaagggcattgtaggtaatgagcccaggagttcctcaccggaagcggggactctgatcccggtgacgacatggatgccagtgcttgatacaggaatattaagtgctcttattttggggattatgcatctcacactacctgcaccggcagcgcgaagaccgggaaacgcatcgctccaggctgtcctcacttccgctgcaacccgccccagtatatctggcagtgcggcaacaaaccagccagcagataggaggggacgataaaacaatctcgcgacagcacgga

SEQ ID NO: 900 - DNA, 2288 bp, Toxoplasma gondii
  source 1..2288: mol_type = genomic DNA
acgatggacagtactgaaattacacagccactcagtgtgcgcaagcgagaacggaagtgagcttcttcacctgtttgtgatctggacgcgatcctcgacaacagtgttctttccgaaagaaatcccgccttgtcctccatcgataactgtagctactccaatgcagcagccgtcgtttagttccacattgcccttcaggacagcccggggatgaacgagagccccttgcaccgttttgtcctgaccgctgggagattccgttcccgcagcttgaccagacacgtcttgttgcttgtcactcgagagggcacttgcttggcttgaggaggccattttctgcatcagctgaagtcgaagcacaacacagcatacgccacatcttcagcgtactcgagacagggcagaacgccaacttctccgaacacatacgggctttgtcagcgaacagagaggagctgaaatctagacagatgcattttgctacacacctgaagtggcacgttgattccatgcagagaaaaacgctctcgcctgagaagtagctcgttctgtcgctcataagtggttacaggaatgccaacacggaaggacatcctgaacccccaccggcaatgtgtcttcaacccatttgcgcactccgcaagcagttgcctctccaaggaagaaaacaggacataggagttgccttattccgatattctgtggatcgtctctgaggcagactacacacgatcaaatccgtcaagaacaaacgcgctgcggtaccatcacaagttgcctccagccccctgtggtttcgtaagtgcacatgaacgagagcaagataccctgccggactatccgtgatttccatcccgtcaagatagcagtgacagtctacttgttgtaacaggttccgtccacggtgacagaaaagccgtcataccgtgcaagtgatgctgcacgggagcgtacggttagccgacagatcaaccacgtggacgtgacctcgcttccacaacaaatccccgcggtctcacggctgcgtgaaccacgatgagatacgctgtaattgtgaaacaaactcataaaagtgcctgtgtgtcctggaaaacaaacatagagaaaagagaaccatccgtccgcagttgatttgaatgtttttttcaacgggacaacggggcgcagtgagctctcgcggcaaggcggggctgtatcgaccaggaaatcagagttgttcgtggtgacgatgacttacgctgcgcgtcactcagctgatcctgaattggtacgttcgcacgtgaaaacaaattcggcaacagcaggcgcgcctcagtgtctggcgcaaaaaaaaagccgcgcccccctgaccttgatgatgtcacccaacagcacgctttgactggaccgctgtaaagagatagaccggcggtgtatattcgaaatgctagctcggatgaggttccgcccccccgtcctgaggtgcttttcctatcttctgtgctatctccaacaaatcgagtaaagaggaagttatctaacgaatattcagtgtgtgtttggttgaccgactgtccaatcactgcattctttgactcaccgtataaaggcgcgtctcctaccctttgacacccgcacacaccgcatccaccagtcacgtgtaacggtttttgtgttccggagaggccgtgtgtggcatcttcgctacttccacactcactcgctctttttggcgtcacttttgctttccactactcacttggtggctgcagaaaagcgcttcgaagacgagagccgtgtgctacttgcggtcgacctctccgtccggagttcatttgaaccttacacccgttgcgcgtccgtaggccggtgcagttcctgtcttccgtgcattgttcagtcttcatgcattgctcaaacgagcacgagaaacgaggtagcgggaattgtacaggtccattgtagccaattcgttacctctgtgtgacagcggcttacacgggggaacgcgctgacgcctggttgtacggcatgttcgtgtcggcagtgatatccctgttttcgccacgatcctcacgagcacttctgcggcagtctttttgagtcacatgcagttctaccgttcaatgaacgcacgaatgacgccactgccgtgctgattaattgctgcggatggtgtcgaatcagacggcggcggccgaggtcacctttttggaaaggtagtgccaaacaaacgtaatgttttaatgcgggtgaggactcaggaaagtctgataattgtatcttacacggtccagaacgtgagacaa

SEQ ID NO: 901 - DNA, 2697 bp, Toxoplasma gondii
  source 1..2697: mol_type = genomic DNA
tcgtcgcagggctgaactgttgatgaaacgtgtctgtaagcctggggagttcttgcagcgtgggagtactatgtgtatgttgtctcttcagatgccgctcgatagctcgttgagaagtccagcctgcagccgagttagcagccctaccgccaaacgcagctttcgcagttactctccgagtgagaatccggatcgaagtgaggaggcgcagcgtcgagctctcattaatgacgatccagagcctccgccaatcttagggttggctgacatcagtggcgatgcccgcctctgtctcggagacaagatcttcaggacggatgcggatttctaactggagatcagaaatgtacaggtggacagtgaggagatatccgtctgatgtcaaacacgaaggcgggaatgcgagttgggtggtgggttggagtttgctagggcgtgtgtcattataaggagaaaaccttttttgcgaggcggatgagcagatgtcattttgaccgatttttgtgttactcggagtcaaagggcagacattttccggtttaattcttttttttccgagacataaaggaaactgaatggcaggagggtctcttcagaatgtgtccacccacagtgccacagctgctgtggccagttgtcgtacagatagagcctcttgttagaagcagcagatctcatcaacatcttgaagagacctggaagcccagtaaacctctcaacgccggcatagctcgtatcactcctgactgagcacctccgccccactgacgaggggacactgaatccagaggacaccgtaccttacgaaacttcagaaagaactagaatgttatcacctctcgagcaggccagtagacgaaggctgcaggtgttggccacctatatttttctctgttcgagcgttgacgcgacggccacagttcactcttgcggatgaaggactgaggtcgcgcgaattcgggcgttgtcttcgaagaacggcgtaatggttacttgcactgtgtagtggtaccatgacctttttcagtagcctcgtgcgtaaaacgagtttgtctactccgtgagtcgacttcgtctctagcacgacttcgggagtggttacatcagatcagtctattggcgttcagcttccttcccagtggttttgcctttcagagttgtccattgcgatctccgagtgcttgtcacctcaacttcatggggaggagcagctcggtccgcggtgcactttagggagcctatgattgtcgggacttactgtgctgcactaggggattacagaaaacaccgagacctttgttgtaggacagataaccggacatgtttgtttggaccattcaacagatcgtcctcacttacgtgttaccaccccagcaaaataatagttctttcaacgtgcttgctctagcttgattaactggcgaggctaacgtctatgaaagcgacattggcggaaggttctgtctgcttcttcgtagtccaaacaaacatgtccggttatctgtcctacaacaaaggtctcggtgctttctgtaatcccctagtgcagtttctcagtacttccagtccgaaattccagaaaatgacttgccgttttctgtagagattcagctaggtagtcgagaacaagggactcggacgacgacgattcgacgatccctcagtattcgtggcaatcttcttcgtttacaacaatggttggacacagggggctccaaacagtggcagaccgcaagaggggccccccgttgctcgcgatgctgtagatcgcagcctttggttccgtgacacagtactgccggatctggtacagtttcgttgcaagcagtccagtgtcacctcctacggagaaaccgaaattcttcattaaaatgccatcatttgtcaagctttccgaagcgtcgcatctcttttccggatgtggggcctggctgatgtttccgatggggaagcttgtccgtctcgtttgaaatgccgtgaatcaaactgttgcctccagatgtcccttgatcaagtaaggtaacacacatccgttcagctaaagcatcttcattctcagcataaacgctcgaagatgtgtcgcacaaaacggcaaacgaaatgatcgatgggaagcgaaaaacagcccgagtaacccttgaattcaacctaggcagtgtgttgcccagtcagacgttgaactatcccgatgccgatcatttttttaaacgtgagttcgcatcgtgcaattgttaatttggtctagacctaggaagacaacgtttggtagtggctgtggactgatacggactttccacgacgagctatttaagtgcgtgtcgccggcgacacaacgggagagcagtggtcctgtttggcattcaaacgactctgccgtgtggttcaaatcgttgggaggcagtttccacaagatgcgttctcctcgatccttggatcagcttcaagccccttggagggtttttcttgtgagtataattcgtcgttacagtggctagatgttagcaacgcaagcccccccgtttgactataccaagggtagatattgactgcggctcaaagaattttcgctgagtaggcaaaaacgctacatgcatataacagacaagagtgtttctggttgctggtcacttactctccgccgactagttgaaagataacagaaagggatcggtagccaaactcagggtttctctcaga

SEQ ID NO: 902 - DNA, 2435 bp, Toxoplasma gondii
  source 1..2435: mol_type = genomic DNA
gcgtaggttctgagagtgacagtgcacgaagaacctcagcgaagaaggggatttgtgactttgctcgagcggtagatctatgcattgcttaccggggtggacggcctgctgtatctgcacagagtgggaggttgtgtgggttccaccttttctctgtttcgtgtctggtgcctacgcaggtcgtcgcacacaacggcgtctgggctggcgtagctgtgagcactcttgtcgggcactactcgttgcgtcgctatgactacaaaacaaagctcattttgcttcccttcattgcctacggaggctcctggcttggtcgattcctcgcgaacggcttgactggacgctggtccgagtggggtcgggaccgcgctttgggagagttgccgccgaaagcctactttgaaaagtagatgcgtgtgcagggaattggtggagaggactggctggaagattgctctgaggagaggcgggggtgaccctttttctaaatgcgtttagagacggcgaaaaatatgtttagaaacgacgcgagccgcggaagtaaacgagactgcaacacacaaaactgccggaacccgaccagggaacaaacacatgttacgttttagggaaccaagcggaacaggctctttctgcttttcacgcggaacagagctattgaaagcgttgctgtgtaggtcggggtggtagggcggtgcgcggcgtagcgtgaaaacacgaggtgtacaccactgaagtgcccaggtgagaaggaacttgatattttctctctcgggcgcaaacggatctgtttcatcggggagtttcggtttttttggaaaacgaattgtggattatgtgaccggttgtacccgtgaaaacacacatgctgaagcgcgaaacactttgttcgtacaaagagttaaaaaggacgcttcaactgcgagtggaagcgaccatgctagatgagggctggagaagttgaccaggtgcgtgtgggtcgcagaaggtagacatggcggagcaggcgaagtcgaatgcgcaacagcgagcagggcgcgaccaatgagaccataagcttgtcatagattttgagcagtgtttttttgcgaacagaatcactttccatacaccggttcttcccggaaatcgcttccttctcgaaaacaaactcttcacgtgacacctagatgcttgaaaacaacgaatatacgtatgagtcacataatccatttttggtcacgccaccgcctccgctttggcttcccacgtactgcggatataacaacgtactttcctttgtgaagatttactttttgatggtgggtgtccttttaagcgcgctcgcatcacaaatgtcccaaactgcctttcggacagagtcggcgccgatgaaattgctgcagctagggcgcatgttgtgatctgcgacagtactctgcgtctgcttatgggggggaaaactgggagattagatgcaggcgagagagtaaatagaggcgtcatgcaagacacacggacgtgctgagttcagtacttgagttgatgtgtcgccgcagtgccgttaaagtgagtggtggcgcctaacggaagccgaagagaaaaaacataagcacgaggcacgtgaactcgaatagttgcaacactggtgtttccgaagaacgtggaagatctgtacgagacgcggccgtatacgttttctccttgggttcgtgaacgcgaggagacccagattagccccaaggtgcgggacttgcaccgggcacacttcgcaaggttcgctgttcccctgccttgctctgaagatctcttatccatcagcttattggtcgcggaaactactctgaaaactgttcaacacagctgggtacaccttctccagtatctcgtcacaagacacgatctgggcgcccgcctgcccggatcgatttttccctcgttgtggtgtgcgcactccgtctgggcacacagcagcagtatcgatctgcattcacgggagtggaccggaagagaggtgccaaatctccgggttctccttcagcacaaatgcatgccgctcaaacaacttctgtatctcgctgaatggagctggctactttttctgttgtcgcttcgatcggcgcaggtgtcaacttgtagttccgagtatgacagttttacgcagctagtttctatgtggaaagatatcgagctgctggaagttgtggtgcctacactcaagcgcacagttcttttcagcacgtcaccttttcttttttcgctttttcgaaactggagacaagcgtgttgttgccgccgctgtagatcgtttttgccctgacggaagctggctcgttggacggcgacaccccgcggttccgtgggccggtttccatcgggcgcttcctcctttcttcaccaactaagcgctggcacaagttttttcgtacatttcccggaaggtccgcatttgtgca

SEQ ID NO: 903 - DNA, 2060 bp, Toxoplasma gondii
  source 1..2060: mol_type = genomic DNA
actcaaaaatactggttttcacgagagttcctacctggagcttgaagaggccaaaggcaaccggaactttcttcataccctcaccccatgtaacaccctccatttgaatcgacttgaccttcttgcagacatcatccagatcggtatctgcatctgcgggtttgacttcaatcaccaacatagacttgttgatcacaactttcttcttcttttccgcctccttcttctttgactctgcaagcttcttcactgcttccttgtcctccgcgctctcctcacctgaaaaaaaacaaaagaacgagggacgatgagctcttcatccactatggcatttgcgtcgcccatcatgaaaaatcctctttcacgtagctctgaaacaaaaatctaacacagcatacgtctcctcctactcctgataaccgcacatagttgttgatgtttttgtcgatcaaactcgcgtcgcggatctggggtgacataggcagactggaaaaccctgattttctgttctccacaaacagggtaggaggtgaatacaatggatttcgcttctaaaccaacaatcaaagtcaccactagagaacgacatccacgcggcagagttcgcgaaactgagcacatgtggattgcgtaggcccatccgagcacggtacaccgcgctgcatgcgtagatttgcttgatattcagagatcagagcacgaagaaaagcctgtgtatgctgagcgttatactgtggctgcaagtgcctgataacgggaggcaaacgcggtgatcgcctcgccagtctatccagcaggcacccccccccctttcccgccggagagacacatgcatcgcttcactcctctgagtgcctatattattatcagtgccaacgcaccaaacaaatcaaaatcatcgtcgtccaccgcagctttcttgggcgccgcagcggcgtctccccacgtgagcgtgtagtaggtacacggggtggcgagttcgtcagaggtcgcgaaggcagtcaccattgtggacaagaagagacaaggacagagtgcagaaatatgtctgtttgtgcggatatgcacggctgcggaagtggagaagaaagttgtggtgcaaacaccttcgattctgggctcacgaacttgtcacatgctttgtctcgttacggttccgtacggcgaatggaccgactgcatgcacgcaagttcttctcggacggtgccgcgagcttttgacaatgttcgcgttcgtctctcccgcaaaatcgttccgcatgccagataccggagttgcgcagcgcaggagcattgccataagaaagacgaaatgtagaagaacgaaatatccctgcactctcatgggtcctaacagtcttcattgactcgagaatcgtgatacgttatgctcgtcgaacccggtacacactgtttgcctcatccgtttctgttctcacgagagcgtgcagactgcgtgtgactaaccgttctggggctgtctggccctcctcaaatgaatacatgttttcattgcatgctttccggaaggttagacgagaacggggcaggggaaacggagacatcccatcctcggccggtggagaggtaccgaaatcgctatcgatatctttattgttaacctcgtcggtggcatgaagttgctgctggctaaaaatttagctaccaatcctgtggagatgtcaatgctgcgctgttcccgactcttcgctgccctgaggaaatgttgactatctcgtgacaacgctgacatgcatagattttgggtcgcctcccctgaaaaagaagttgctgcccccgctccagctcaaagcgctccaattttcgcttcttttctgtgaacacagctcgtctccaaagccagtggccaactgttcccaacccccctctcgcttttgcctgcttctacgcgcagccgcagccactcggagtttttctcggagtcctggctaaaagacgctttacaggtgtcaaaacgactaaaccatgcaacggctacgaaactaaagggtagattttttctggtacacaaacagtctgagttatattttgcgtgacaa

SEQ ID NO: 904 - DNA, 4257 bp, Toxoplasma gondii
  source 1..4257: mol_type = genomic DNA
cgtacaggttttcaggcagccgcaagtgacgcgtcacttcagacaagcgcctttccagagccttcgacgagtgcagcatccctctatgcattcaagtctaggcttcttgcccttttgtgtcttcttcgtgtcgcctgtccagtggagaaagccctaccagaaatttccataaagtttggacgaaccgttggtctgttttgtacaggaggtcgtagcctcggtcctgaaacgctcgccagactccttcactcagctgcatgcagaggaagtggagaactgccaagaatgtggttacgtctccgcggctcaggttctcatcgtccagcgcgccgggagctgtagggacactcgggatgaaggactggagcgcgggaggatatcgcagacgcctcagagcggacctaagcttcttgatggatcccgagagatccccgggagaggaaggcggaggagaagtcagagagaagcctttcggagacactccagccgacgacagcggcgcggaagaaggcgaacagggggaagatgcaggcagcatttcatcgtcgagaaagggccggcgaactcaccaagagaggaaaaaagatctgggggacagaagaaaaaatccagctaacacgggcaacgacctggcgatagtggattggaagggggcggggggtatggcgaacaggttttcgaaaaaaggtgtggaacagggtgttctttggaaaggatgaaacggcaatacgggcttgcagttgaaacgaaaaagtgatgggcgaagtggatgcaaatgccgagagaaaaagctacattcgtgtgtagagacgttgaattggagcgatacacaggacctcggtcttggtcagatgttaaaacgcgtgaagttcgtcgcaactcgttcgagatcccccatatacctgcaagcgcagacgagatgggtaccggctttcaactgcatagtagagttcttgagagaaggcgtccgaaacatactttcaaacgcacgcggaattcacagctttctcccgaggagggcatgcagagagatcacaggaagaaatacacagacttgccgaatgcgcgacgacatcccctctgccctttagcgtggcaacaattcggtgttaacgacggtgcatcaagaagaaaggaaagaaagccaagcctcctgaaaaaagtcgtaaccatgcgaaactcattctcgtctgccttctttcatcgcgataagacgcaaagacaactgacctctccagcatgcgaattgttgcttcaaagggcattcacggagagagttgcattatttgctcaacagaaaaagacagcaacacttcaacactaccgtaaatagacagagaggccatctgactctggttctgtgtgcggtatcaggacgtctcgtgatttcgaatatcgaagaagacaagcaagaggaacgtgttgctaccaccgaccctcttttcagacgtagatgcgctccctttcttcctcaacctagtccgcttttgtacctgcctacccctactgacagtcttagagcaagctctcttcagatatgcgtcacaggatctgtcataatggacctttgcacttactcagagctgtatgtatcactggtgggcatgacaatagagagctatacgcccgttgactgcagaattaaagatagccccagcaatagcatggatggaaactgcatctgtccgtctccacagaccattaccaaatccaccatcgttatgtggatggatcaaactaagtttttcgtacagactgacgtttcggatctgtccaaacatttcagtgccgcgaggacagaaatacggaagggtacgcagctgcggcgtcattgccttcccgtttccaacatattatgcggtgatcaaagaatttccatccaactccggcagtttgcgattattcgtgacaacctctattgatgacgaattcgcaccagatatgcatgcttttgcagaccggagcataaattcatcagtgactgcatttccagagccgcacctgctcatacgacttgtgcgatcggaacactacacaggttctaaatacagtagctttcaggagatttgccgatttcgaagcggcggtactataatatctggcttcattcagtttcagttacaccagcgtggacgcatacggcaaatcgaatttaacggcaagctcctgcaggaaacggtgcaaggtgaaaacaaacgtctccataacgcaccccgtggttgttttcggaaaagacaaacgagcatctggtcaaccgttttctttctggtatgatctcctactccttatgtacgcgcgtcaaagcacaagaaaagatctctgtgcgcgaggtcgagactcaacacccggaaaactctagaataaattcatgtttacgatatacacagtcgttaggccgtcgcttttttttgttaccgtagttccgcgaggattcctttccactttttctttgtcagcactatttcacagcagctcttatatctaatcgatcctggaaagcttcagaaaagtcaccaccacagtttccaaccttcactggagaatcttgctggccgctgccagtgaaccggtcacttcaagtcgatatctcgatgtgctcttcaacctgttgactttttgacaaagaacatcaccagaagcttcatgtcaacgccacttgaactacgctgtgacttttttaccgtcttaacctgcgcctgtgcatcttttttcgtagcgtcgaccaccaaacattcccactgtattccagaggttgtttgcgttgtcgcgaagtacgaaagatcttgtccgacacttgccgagcactcctcaccttctctttaacaacgtttcgttttctaagccccgttcctatgcacgagacaagaccaggcaaaagtggggcgggccctctttcgcgtgaattcaactgcctctctgcgctctgtctagctgtgagattggtttcccgagcgctctggcattcattggacggttgcggttccttctgatttctgaatccgcgagtattgagctctgtggagctaccaaatcaaaaatcctctgtaaaagagagacggcgctgtggcggaaactctccacaaatgcaagacagaaaccatctgtgctagtctggggttcgctcgatcccggcagttgctaagactgagggtcgctagcgctcccggctccaccggtattttcttacgcgagttaggcggtgaactttttcgtggcaaagctgacaactacctcgcctgttggtttctgaagagtcacacgaagccttctgtgcctccgtttcggcagaagagcctccgcactcacttctttgaagtccatgtttctcctcaagacaccgctctgtgcgctgggtcgggtgtcttacccgcgagtctgctgcatcgctagctcttgtacaaaggaggtagagtggcgccggtacggactttctcttcggtactgtctgagtttttccagtttctggagatctctgcttgaacttgtctgattggatccagcagagccgtctgcggatcacataagctgtgaacggaacaaggatttccctcatcttgcacaagcttctactcggcttgaacttggctggcaggcttcgcgagtagaccgtgtcgagtcactccgaatttgtgttcgtagcggcagcccacaccgccacaaaggtgtgcttccttaccgcgaaatttgtcggtttcggcttttttctggttgcaccgttttagcgcggacatcactcgggcattgatcgtgcttagaaaccgcaagtcgcacaaacgggtctgagaaggcggttcgatgcctgagtcactaatgtgaatgttgcagtggctaccaacgccatttctccgatgaaactttcccttcgtccggtgaacccgacggggaactgctccgactcttcgaaggaactctctagtcttgtgtgtgatcttttgtggtttttttcgtcgtttctcgggatctccaggaccggaagcgtcgccctccacctcaaagtccatcgtttcttcgtttcttgtttcgctctcgatttgtttctagtgggagcgaccgccgttcctattacccttctgcactcgaagggtttttgcgttcttgctcccgccgtctttcctgaaagatttcaaaacctctgcttttcctcggagcagcccactcccgtatttggagggtattagcgttcgtgtttctgcatctcctggacgcagtcttcaaacccccatgtccctctctctcttcgttcactgatccccagca

SEQ ID NO: 905 - DNA, 2396 bp, Toxoplasma gondii
  source 1..2396: mol_type = genomic DNA
cacagccatttacttcttaaccgtcccacagtcgcgccttggagttctggcgctccctacgtgtgaagcgtggacgactggctggctctcgtgccaggtcaagccggtctctggaacttggtgacggagtgcattttcgttctcacaccagggatggggcagccaatccgcaaatccctagcgaggaaccactggaccgagagcttcttgaggaccatttcctcacaagtgctcaataaagggctttttcgcgcgtagctcgcgtggacggcaagctgatagttctcctctgtgcatgtcattgcgcaatttttgggggtgtcatgtcgattcgccgctgtttggggccagtcaaaaaaccaagctgtaactgtcacatgttaccattccaccgtcgtgatgaccgaccgactgttcgtgtgcctctcttacacattcgcctccgcgtccgcctgcccacatgtgtggcactttgtcgtgctttatgtccgtccacgctcttctggacctctccaccgtgcggcttccgtgtctagtctcgcgtgaaagaaaatgggaggcacccctttccaggcaccacgcagagatcctcagtgcccgtggaagtgaagactggggctgccggaggacgcctttctccggctccgccgcagggttgtcccccttttggcgcgtccaaggtgctcttacacagagttgttcgaaagacacttcggcggcaggacataccgaggcctaaccagtttctgctggttgaggaggttctcccctgcgatccggcggttcggcctgcgcttgatcgtcacgcctgtctgcgtttcgactgttttgtgttgtagagcgtccgtgtgtgttttcgatccgtagggaagctttgcgacagaggggatccgatcctgaggagtgtccagtccgaacaaacacgcggcgccagttggccataaaatctcggtgttctctccgtcgcgtcacgttgacaaacttggcctgctgagcctgtctgaaccacggggtgacgtttcctgtgtcaagtgaccagcggaacgcaaatcgatcagacctgagcacgcgcagctagcctcactcacaagggaatagaaacagagaacgcttctgtccagctcgcagcgtcgtatcgactgacgttgagatacgacacgcacattcgacctggtcgcctgtccaggaggggctgccagttcatagctgttgccgcagtctccaaagcggcgccaatcacgctgacatgcatcaaacaccagaaatttcaccttcccaaacacagagagcgctacctcgacacaccaattgcgcgccgacttcagactacacgtcagccgccggcctcgacatgcacgggtcacggaccaggtttgcagctggggaaaaacaacattatctaattcggctgctcagcagcaaaaacgcggctgctgccattatcgtgagagacaaagtggcggagactcacgaacaccggctccgttagagatctgaaattgcacttcctttgttggtgcgagtcgtgtcacacctcgactttggcgagaaggaaatttgtccccaaaccactacggtggttcaaaagttgtttatgtctgcggcactggatgtcttagatgtttagctgtttcgtcttcgaagcgtgatctcgtttgaagtatcgatttgattgcctgaagggggtcgatacttcttcggtgctcggacacgcagcgtcaacgttcagatggttattgacaacgtggttcgacgtcgtcgtgtaccacaggtcggggacgtacgtcatctcgctgaaaatcaggcagaatcacgaatttgagtgcttcagtcgagtcaacggcaagtgtgtgaaaagtcgccgcggtcttaacgcgcatgttacatattatccatggcctacctccccgcagtatttgcactgattctagactgaatggttctactgggaattttgatagaaaacatgcagacgttgtcaaggccatgtagaccgcctgtcgaaggaaaacgactgtgaattcgctgacttcccagggggtgcatgcgaagtgtttctagcgggggtgcaaacggctcagtggctaccggtctaaattgttcttctttccaattttcttgacttacattacacaacgcgttgacctcatgttgaattctccgctccactgctttcttcgtggaacgcgttccacgtgtcatttcgtgtaatcagcgattccctctcccgaggcggtcctcccgggcccctatttttttttgaaagcccggttttcaattttgcagtctctcctcggtctccaagagaggccgaccctctcaggtggagcctccgcccacaggggcgttccagtccacaaatttctctgaaatcggcgctcttctcgagctaccaa

SEQ ID NO: 906 - DNA, 1410 bp, Toxoplasma gondii
  source 1..1410: mol_type = genomic DNA
cgtgcttggttcatcgtcagtgagagagccaaaaaggagaatggacgaagggaagaagtgtggcaagatcggaagtttgccacagacgacgcagaccacgaggcagctttctggagctaaccttaccaatagaacccgggcaggcagaaccaggttgctgactggtcctctatgtcagggccgacacccacagtgtcacacattttggccgcaccaccagcaagactagctttggcggtgccgtcactttttctggatcttttctgtcttatatgtcagcggggagggatttaaatcggcccgcagctgtatcgagtcagtgccagacgtagaaatctagacacgggaaaagattgaccggcagctgccgttgagctcccggaaaatcacaggtacgacgggggctttccactcgttccaatctgttgtttcggcagcttgtgccccattgcttggactacacagttcaagaagtcggtgttcaacctactccagtcgagcaccatcaacctataagcggatttactcggagaccagaccggtgcacgtctgttcacaacggtcttgacaatctgcatccgaggacaaaaaacaagcatatgttctgttcatgcagctcggtgtctgacagtcacgggcatcaatgtgacacgcactggcacgttctcagcaggcaaacaggattaatcagaggcacatagactcgttacgtgagtgttgaactttgcatcgtctgtgacgaatcgaagtgttgaccattgaaattttagcatcgccaaccaacaacagtgacgctgcagtgaacattcctcggagctcggaaaaacgtgctagtctcaaaatccagagctccgttcatgattcgtattccagtggcctcttttttgtggttgacccggacggaaaaaaagagaaataaacggccctaatcctccgatctagagtcagcgctgcaaacacggcaatattgttagacgcggagttgctagactgcatcagtggaacctaacagttacctgctgttcaccgacgggcaggtggtccgtttaaaaggaaatcaattgaattcagttcttgcctcttgcaaggcgcaaatgctgtggctccagtctgttggcctcctgttgagactctgcctcgtctagcgctactatgttcaagctagccttcccataaagtttgggttcttgcgcaaatctcgcaccttgagcttgcagaagggtcgccatgcacaacgcgtatcggcgtgcgaaattttttccttgtttctcgattgtcatagtctgcttcaagggcgtcacccgcgtttctctgtctagccctgtcgaacgtccgggcggtcaaagtgactgcagtgtgcgcttcctccgggggatccttcactctaccgccacccttcatcgggtaaga

SEQ ID NO: 907 - DNA, 3179 bp, Toxoplasma gondii
  source 1..3179: mol_type = genomic DNA
accaaatacataagacagaattttagcacctgcacaagattccatacggtcacatctcccgaagaagtcaatggaactggggttactactgatcccaagaatgaagagaacgggacaagtctatcagaccaccgtgttacacgtggaatttggcacagcgctgtgcgttttgtggaactgttcttcgaaggctgcacatccaatcgcgtgccacaatgaaggtaccgctagtacttgattacgttgccaataaagcagccgagtacgatctgcaacagcaagtaaaaacatggagacggaaggtccaagtcgctgaggtagaggcaagaagagtaaggcagaaaatccaaggcggacagctctagcacgccacaaatttcgaatagcaccgattatgtagacgcccccactgcatcctcttctctcccggaattagcgagaatcaggcctaatatgttgactacttacctgctgcacattccgcatgcagttgctgctgtctgatcctgtagaacattcaagctgcatctcctgtgtatgctgctcattctggtgcttcacccgcccaacctccatgtaccatgggcgttcagaagtaccagaatcgtgggacttgaggactgtggtaattttgatttcattcctgctattcgcctcgtagatccatttgtcgcattctggcggccttggaggagcttctaaggagtggtcactgggatgtattagcgttctgtgcaacacattcaagcactcgtttgcctcacggtcgtaacacactcagggaaaggtgcgtctagctccccagaaaacactgaactacccaaaacgatacaccgcacattgggttatcaccgaccgttcgaacggtagggaagtcgcctacttgctctcttttgtttgcaggcgaaaaccagcagaaagcgccctgcggatcccgttgccgttgcttagacggttacggagcgccccccttccgcgccagttcaaggaagaagcttgcgatagcagtgtggtcgttgtatcccagtcatcgcttgttgtgctgcagatattttaggcgcgtcgatccgccttcctgaaatgactatctcggcgtgcaaaacaccaagcgaccatgtcggccctcgttcaggtactcgtttcttgtacttgtggcatgtgtgcatatgtagtcccacagtcaaagagttttttttgtatatgtgaatcgacgcaggttcctgggaaacgtttgcagccgagcgaatcacacgctgtcgtggtactcaagatacgaatgtaacccttcctggcttggtgatcgacttgatgctgctagtcttccatctcaggtgtactcacatcttttactgctggctgcagaactgtactggactcccagtcaccatcatgacaatgaccgttctgacacgagcaacagtgcgtctgttccgagactacgaacaggccacacgcaaatgccgtaaatccctcgagacgtttacgtcttttttctgtgtcccactgaaggtgacagcgtactttcgtttctgtacaagggtctagggacgcccctgccggtgcacgctgactacgtctgccttacgcacgttctgagtctttgctttctcattttatgcctaacaaggtgatcggggctgagttaatctctcagaaacccttaaatttcgcttcctgatgacaatctccactcactgggcagctgtgtcagcaaagatcccaactactgcagtcacgttttctcggggttactgtacatcgttagtctacagcctcccacccatgggtgatacacatttttgaaagattgaagcaatccgaaaagaaaagacgtagcaggaactactattgggttgactttgaacgttatcactatactgagcgccacacacaatgccttcctacattcctcatgaccgcacggtgcctgacagcctatcgtcgacccgtgtttctaatacgccagttcggatattttgccatgattggacaacttcaattcaacatgtgtacataaacggtcgttgccgtcgttacgggaaaacaagaattgagtgtgcagctgtagccttttcgtctgaaggcgccttgccgtttttcttcagggagtgattcggcacgggaattcagccgattgatcgtgtagacgcctggtgccttctacttactgtcacagttctactagagaattcccgcagattcacgggaaacgcgtcggtcttgcaaacaacaaagtttaatttcagtatccattcgccgcatgcagaaaatattggagactcccccccaaaagcgttatcgaccccctaccgctcagcgccctgtcggctctttgtgggtttgtttgtcgtgtgtcattgggaaaaaaattattgagtttcttgtctcctcgtctcacttcctagcgggatgccgttgtctcaattcaccaggacagtcagcatctcgtggctacctttttccggattgcgagtgtgcaaccgcgccattgccaactgcgaggctggcatgtcttcagcgcgtgtcctacaacgaaccccctggtctgctacgtcccctcgacaattgccatgtttagaagctgtagtctacctcatccgcgtacctgttcttttcctttctttaccaacgtttctgtctgtccctgcatcttcactactgcgttcaaggcacgcctgctttccaattagcgactttctcacgccttcagctgctggccagtcgccagattctgttgcatcgctttcatcgtaacgtctccaatgcctgagcttgccctcacctgttcgaagagttgctgagactgaaatgtccacatggtagtttgggtgtcttgagctgaagcacagacacttctctgtgaggcgggacgaacgaggcaaaatgtcatctcgggggggaaacagccttgcccgctcttcctttctacgccgtccacactggaacccactcgcgttctttccttctttcgttgtttctgcccgctctcggatagcggctaaacggtcgagagcagacgttctttgcacaatgaggaaaaacgcgtacaggcgctgacgtgtaggtgtcacggactccgtttcgttcccgccttcttatttcgggtcgcggtctcgtcagcgtagcgaccagtttgaaagaaaacaaagtgtagttcctcctttttgctggtgcggaaa

SEQ ID NO: 908 - DNA, 2599 bp, Toxoplasma gondii
  source 1..2599: mol_type = genomic DNA
tcactcggtgtgtgagtgtcaatgagtgactgtgacatttgttctgcgttgtccacttcttgccctcaccttgccactgggtgcgcgctgttctggctgctctggcgcactgttgcggcttcatccttcttcactcacccgtcttccaccagctcagccgccagctccgagtttccacacccgacgtggagaatcctcgaccctctgttcttgtcaccatcaccggctgcgcttcgctctccgttctcctctttctgcttctctagacgggtgggcacagcctcggctgaaccttcgcgaagaccgtgctctctctctgtcgcctcgcgggtccgctcctttcgcgctcccgctggaacacgcaggtcgagggagtcaaggatcgccttatattcggagtagctgccgtaccactcgaaggctcggtcaccacgggaccggaaaaaagcgttccaataggagcgcttgcggaattcttcgatgctcgagggaaggagattcattttggagcagggagaaacgcagaacgggacgagcgggaaaagaaaactcgagggaacgagacgctacatgaaaatctgataaaagcatcctcagagaggggacggggaactggacgagtgcggacgaaagccaaagacggatgtggaaccggaaagggaaatactgagacacggcgacacggagacggagacaggagacaagaggagcgggaggaaaggcagcaaggccgaggagcgaagcgacgaactacaaggagagagaaaacttcgcagcaaccacaatcgaaacaggtgcgcttctctcacgaacaaggagtggggtactgaatttcgacgaagctggtcccgaatagtgaaaagtcgcccagctggatcgccgcactctcaatgtccctacagcctttgaaggcttcatagcgcctttgcgagagttccgtcacgaagcatattatatgaagaacacaaaaaatacatatcgtgtatacgttgttttgctccgttgcagattgccgaagccgcaaagccgcaaatcgatgatcgctgcatgctgtcgttgtcccgctgcagtctcgccgagagagtggactccctgtttgtgatccgtttactgatcaacggagacggaaactcccctttgccagtgtgtttcgagcagaacgtgggatctgcttcatccgaacaatgctgtttcgaatacgagcgcgagacttgttggatcttcggcagtgcctcaagcgtctgcatgccagttttttgtgtcaagagaaaaatcgcatgcaaagtgagacgatgacacaacgctcggaggctgcactgtcgttgccactccaagctgggaaggcgcggcaataatccgtcgcttttccattcagtcctcgcagtgtgcagctgaggcacacgtcacgcaacgagtgttcgcaagccgcttgtgacttgcgaacgcctacggtaaggcgagaagcttcaagtcaaaacatttttctgcacagcgttcaccggttgctcgcgccagctagcgacgcgccaccagcggatcctgcacggaggatgcgaagtgactcgatcgactggggctgagccttcgcagagttgcgattttgcgatggaatgaacacctcgagtaagcggcacgacggtcggatagtggccattttctatacaaaggggattgaaaagacagagcaaactctcgggtaactggtggtcgttggtcctttccgcttcctcgcaggtgcacaagcgaaccgcggccaaatccggtggggtgccctgaaaactatggtttgtgtccggcgcctaatgtctttgtcgtccgctttcgagtgctctggtgtatagacggaaaaggtcctagaccggtggagttttgcagtcaccaggtgtcccacgtttcgggttttccggagttcttctgctccccggtcggcgacaaaaagagaggcgggtggatgtgcagtgcccgagtcgctttgaccaccggattgccatgagtgcttctgctgcacgaaaagcgttttccagacactttcttcaagtcgaaatttgctgtttcgacgcattctccggtcggtgtgcgcagcagggatggtctgtcctccccaaagacccggggaagtttctttccagctctggaacaaacgcacacacagtccgttcaaccttcacttgccggtgcatgtgtcggctgtttttggccactttttacgtcgaatctctgtaagtttctcaccgtttgcgttaggaggctctggagatgcgccaaagagcctcagcggaggagtcgtagaccgtctcggtcaaaattcggaagcaggaacagggtgtcgcagtctctaatgtctcgggtcaaaactcccgtgtccatggtttacccaagcacagtttcgcgagctgtctaggtttcccacgagtacccaaggaatagtgacactgagttcctttgttgcgttacgtgccgccgatcgtccggggagtgtagtgcactgaaatgacagagagccggcttcccacgcaggagagttcttgaattcccacattcgccgccggccaaacgatctcgtttttctgccacgctcctgcccatccgccagccaaca

SEQ ID NO: 909 - DNA, 1635 bp, Toxoplasma gondii
  source 1..1635: mol_type = genomic DNA
ggtatgtatgtgaaaatgtgtttcgagggtgaggagcgcgtttgtccagagttttttctcgtggccgttgtactccgtcggtgtttggcgtgggttgtcgggagaaggtggagacggttttcaagagtcgttgagaggcggcgcaggaatttcagtccttttgcatgcactgctgaagactccgttgtgcacctcctggaaggtgataagaatcaaccaggaagactcggggccgagagacgaaaagaaagaccgtcagaggatccatataagatggtcgacccctcggtgaggcaactcgaggcgcggagaggcagtctttccgagacgcaagtcgatgagcagcagcctctgcagaagcagctaggccaggcacagccagctggctgcagcggtgttttgttgttctacacgatctcccagcgctgattggaactgcgtggaaacataaagcagtctaggaagaactgaactggaaacgagtcacttttcgaagatgaacacggaacagaaaaggcacacacacacacttgcagaattttgccttgtttgtcaccagaggattcctctgcacttgcatgtgagaaaatcgacttcagtctctggcttctcttttcgtggcaaacaggcgcgaagagagaggcccttctccagggagtctaaactgcagcagtcgccttgtgtgcagccgagaacggagagtacaatagatctgaccccgccggcagctaaaaaaggaacatggcaatgcaagaagtccaaaaagtaacttttttagagatactggagagatgtcggagcgcgcgtgcaacgcctagggcggctccaaataggccaacctcaaagtgaggcaacagagagagcagacatccaagttttctcttccacgcaagatgacgtttctctcactcgaatcctacatacgccttctgcgacgaggtacaccggcaaggtcgtaactcgatcacgacggtttctcgctcatctcgcgaatctgtcggccgcgagcaaggtggaaggcgagaaagcgctgcactcgagtgagtgtatgcgcggaagcctcgtttgaggccttttttgcgttcgtggcttctcccgagacgtcttgtcgttttgtctctttttctgcatgcactccggcacgacgttccaagccccaataacaaacgactgtctccttcccgttcctcaactgattcctttcgactttgcttcgacgagtttggtgtctttccaagttccttcctcaggtgtacgaggagaaacgctcagtgccgaccagaggaactctcccccagcagctcggttccgtcctggcgggcggcttgagtggacctgcagtgtttctcctttttgtcgctgctcttcttctgctttctcgcagcgaaaagcgcgaacgcgagagactctttttcgggggcggagatgcagctgcgtctcagaggccagacagcgaagaagacgagacgtcgaagacgaaacgggcacccgcagaagacgaccggccgccagaggccgggcgtcgaaaatgcacgagattgctgggttgtcttcttctccgaagaaatgatccaagacggataaatagtcaaaggctcggggaatcttttccctggtcgatctgttcagccgcaa

SEQ ID NO: 910 - DNA, 4702 bp, Toxoplasma gondii
  source 1..4702: mol_type = genomic DNA
catatgttcttctgtgtatgctccactccgattgccgaccaacggaacgcgcgatccgtccagaaggaacctcccttctcctcgcttcgatgaacgagagctgccgcaagtctcgagtcaaaggccagcggtcggaacgcagaaggagaagacgaaggggaggaagaaggagaagaagagggagaagaaggagaagaaggagaagaagaagaagaagacgaaggggaggaagaaggagaagacgaaggggaggaagaaggagaagacgaaggggaggaaggaggagaagaaggagaagaagagggagaagatgaagaaacagaatagttttcctttctcggttcttgaggttcttgtgagggcgacagacggggcgaatgattcaccttctcggcgagggcagacgaacaaaaatgtgaattctcagaggagtgcaggttggtagggacgacgttttctgacgacgtcattgtcgtggcggaaaggaaccacgctgttcaaatcgattgaaaaaatgcggaggaacattcgctgcgattcgacagaggatctcagcctcgacacctcacggtcgccacaaatatcccgacggagatgtggatgatggaaaagcgaggttttgagaagatttcgtcctgccgtttgtctctcaagtttatcgatccacctgcagtgcctcccctacttaaaaggagagtgatgcgcaggtgtacgagcatatatgcacataaccatgtctgtgtgtgtatgaagatatcgagcagcaagcatgtaaaagctggaaaaggtggaagaggagcaccaatggcgggtctcgtttcgtggaactgtgtctcgtttgaatcgtcgcggtgcggccgttgacacagatctcctttccaggggggaaaaagaggcgagagcccttaagactcagtgaaactagaagggtacggcaggtgaaagaaggagttgaaaggagaagaagattccagaggaaacggtgtgaacaatgtgggtaaaatcctcggagagccgcaagccaagactccgcggtctcgacatctcgaccaagacctgttgtgcctcgaacttcctgtgcaactaagatagcgattttcacggaaaaccgaaaaaaagaacgcctaccccaatctcctttggaggacacgagtcgttcttcgagcaagatgagaaacagcgccgtcctttcgagttctacgaatgtgcacgctcgtcgcttctcgcctcgacttcgtctccggatttgagggctgtgtaaaatcagagaacttctccgattcacggacgcatgcaactgagatttgaagttgtgcactcaatatgctttgctgaagctttctctagccggtatcgagtgatgggagctctcagcggagacatgggaacgagacacccaaaggaaaagtgcatgcgggagacgacggcgtttctagttggacagggcagcgagatgccgcaaatatgtttttgttctgcttttcagtgtatgcgtttgcatacgctgtttcgatcgtagaaaccgtgtcaggcgttttggcggaaggcgagttgttttccgttaacaagtgcagacgttatcatgcaacgggaacagaaggtagatgtgcatacagtactcgcatatctacacatgcatgtacgacgaaatatatatctatatatataagagtaagtatttgcagatattgctggatgcgatcagtttagtaccagctgctttcaatctttcttcaatgtcaatgactaatgttggtcagatcgtcttgtgtaccatgaaaggtgttgtttttcctaggacggacgtctagccgacagcgttcgacatcgacatctgaggtccctgtggttcttggaatatccgtctgcttttttatttgaatcgagtcagttctcttgtatctcttcctatccgcgcttccccagggatgggtcgagcctcggagtgcttgttcgtttttggggttcgtgcttgggcaggggggggtcgtggactcaaatggacttcgaaactctcttgtcgtagcaaagagttttcaaacagacgccgctaaagtctggaatgtcccaatttcgacgaaaagcgtggcgttattatcatatagcctctttgggcgtcgcgagatgttttggtgcctgaaacgcgcacctgacttgaaccagacggacgaatgtttgtcttgcgctgtaattgttatgggagtgttctacaaattatagaggacacgtgtttaggcccgactctcgcctttccagcatctccagttcacatcagaaggaggggaaaagggtcgggacagcaatgacaactctcgtaccgctgcacaacgaactgcgcacctgagaaccatttgcggaggtcgacgtaccgagagtttcctccgcagctgaagagtcattcgtgcatttcttctcgtcctcgtgccggtgacaagcatcgctgcggtacacccgtgtaaaagggaagctcttcgccaggtcctgaatgttgttaaacacttcagagtatttcagggtatgtcaagcgtacatgcaacccactacaatggaacacctaagcaatggtgatggacacagtcatgcgattctgtccttcttttccttttcttgtaagcgcgtgaggaacatgcggcacaatatctggcgtctaaatgacgccaaccaaaagtggaagacaacgttcctgacaaagcaagtgttacgctttgacgaccagcaaacgtagtactgtagcggattgctacttaatacaaaccttatgtggaagatgtggagaatggcatacgaatggggaactgcatctagtcagaaggatggtagtaaaagagaggaagcatagtgaaattttatcgctgtgatggcatatcagtttaatatttccttaacagtaccggcaacagcctaaatgtgtatcgacgaggaacgtgtctttgtgtaaagtcccgacggcggagacaatgccaaagacgttgctctaaagtacgtaaagagacatgtgcacacgcccctctgatggtgacccgtggtagatagtccacggagtcaaggagtaatacgagacaaatataactttcgttctgtgatacatcaaggggtggaagtgaaggtggggtatggctactgataggatgatcggcggtttcaacatctaatgtcctttctgggtagcgccacagagcagtgttcctttccacatttccagcagtacaactcgtattataaactccccagaaaaaggtagttttagtaagaaacgtagggatcccattttgtagtctgtgacagcagggagtctagaatcggttgttacctgattgctattacatgcatgatatcttgaagtatggttcttatcagtggctatcctatccccagtgctctgccgtgggtactgaaacacatcctgcttagatggcggtacacataagcgctcgattccgggaaaggtacccagaaaagggggcaacggacgggcttctgtgttgtgttctatcgcaaaatgccgatacacctttgcaagtgacaaaacctttgacgaggctcagacgtatcggaactgaatgctgcaaagcttggaatgagagctaaaggaatcagacatttcagagtcaccgaacagtgacttaacgctctgttgccagcacggggacatggcgttgtctttcccctaacccttggcgtgctgaattttctgcataaacacttgaatacaccagcaggataaaggcgcacatgaatatatctctaccctcaatggaaacgctatgactcggaatgccggaatatgcaggctggatggtttttctgctgtagcaaggcctgttgttccgtcgcctggtgttgattcttgccctccgaatacgcaacgacttgcctgaggtcagccccgcccttcgctcagcggaagtagctgtgaagggacatgtcgcgttggataacgctttgcaacggacgtgtattgcggtactgttgccgtgacgaggaagtttttctgtgtctctaacaagaataccaataatttttgcgtgaggacgcttgcgcacaccataggctgatggcttttccgcccctctccgaacagccatctagcggcgtcgcgctttttcccttgtctcttttctcattcccatactagaagtcacgtttttgttgcgcagagtaagctgattcgttgaaaagagaagtgacaaccgagaagaagccgtcatttagcagggatttttgtgtcccgtgctgtgttgtgattatttaactcctgtgcgtgtgctcgcgtgttccagcatctcccaacaggttgttttcttgctgcagccgtctcgttcctccccgtcctcgtattccctgcagccatctccctgttttaattcatgtagtaggaggcaatcttgaatgtcttgtgttctggctttcaaggacacagctgtccgtcaagaaatctcgtcatcattcattccatgtcaatcttcaaccgtagcccattcccttgtttccacaaacagtttcctttgagcaggttctagcgtctcgttcgtttcatctcagggtgtaactgtaaccaggggactactgaactcaagctgaggactaaactgaatacaaccgtacaaggattcattatttgtgcatctgcgcatataggtcgctaatcagttacacgtatgctaaacatgctacctttccccggagagttgttttttcgtga

SEQ ID NO: 911 - DNA, 2672 bp, Toxoplasma gondii
  source 1..2672: mol_type = genomic DNA
agtctttcatgtacagaccttcattttcgaagtcgttgtctctctttcttcttcctctgcctccgaagccccggccgcctcggcctctcggcgacgccccctcgccctcctcgcgcgcaggtcttctgtctccgcggcctctcgccgcctggttcacaacgagagcttggacggcggctttcttcggctcggcctgttgctggaacctctccagtttgctgccgctctcgcctgcatgtctctcgtccttcagctgctgcatggcctttctcgcgtcctcgcggtcctcgccgcgtcgcgcactctgggccttctcgcggctgctcttcttctgctggctttcgagcgccgccgccacgacctccttgccggcctcgagcgccttcttcgctgcggcgtaggagaagggcaggaagcgcggggggccctcgtcttccttgcccgttccagcctctcggccaggagcctcgctctccgccttcctgtgcaggcgcgcctgctggacatgctcgcgaagcttgaaggcgctctccagactcgccacagccccgcccagaacctgaaccgtcgcaggttcgaggagaagcaatccgttggtgacgcgcgtccccgcggcgaccagcatcttcaagcccggcaccagcggcacgtccagctgccggcagaagtggtgctcgatcgcggtgtacgtacaccccgcgccgtcagtcagtttcagcagcagcatccggcgtttgtggcctcggtagcacggggcggcagcggccgagcggaagtcttcttcgccttccttcgagggcagcgtgatgtcccgggaggagagcagcatgaggaagagcggcgccgcgagtgccgacgatgtcttctgtgcgagaaagccttcgggcagcggtggcgagagacggagactccgcagatccgaagtcagcaggaagcgctgcaaagtctggagtgagacagacccggaggccgcccgcgacccccctgacgcggagtcgtcgcatgcgtcggcgagcaggatcggaaggagttccaatgcctccggcttgaagttcacactccactgctgacgcagctgagacaagacggccgctggcacagccatggttgctgtctgagagcgagcgccactacagaggacaccgccagcaaggaaaggagtggagaggcagagaggagagaaaggcagaagaagagaaagagacgagagggaggcaggcgcggtaggatgctggaacaggcagtgtggaggaagtgcaaggaagaaggagaggtacgaaggaaaggcgaaagcgacttggaggtccgtggacaggaaggggcactacgaaggaaaagagtgagaccaagtaggagatgtgcgacctgaagagaagaagccagaggaaagaaagttcgcaggtgactcttcttgccactgtgttcacgaaaacgcgacagcaagggtcttggccagacgccgggagacggcacaagtcgacgagagcaaatggccggcaaaggtctacggcgcagctgcgagggggtcgtacccccggcacaatcctagaaaagagacagacaaagagccggggacaatgcatatgcagatcaagacatacctatcttgggccgcctcggtatccagcacaaatccgcagagagcagcagttccggggcggaacgcgaaccgcgaaggtgccgactttgagatgtacgaaccgctggcggcagaagagatcccacggctgtctttgtttaaggggaagaacgaaatgtagaaatctacgagtctcctgtcgtgcgggagacgctttttcagtcggtggcggcccggcttttccgccggaccgctgcgcatgcgcgcatgcgcgcatgccgaccgccagtcccattgcgatttgccacatcgagtctcgcgatgctgaacatgttgacttctgcgggctgttttttcgatttcccactccctaaacgtccagacacaacgacgcttcttgttgaggactcgccggccctttccgctgtctgtggatgttttgagtgcactctccgtgcaggcgtcaagcatgcgttctacgccgtttcactttcgaatttgaacggtttgtttagcgaacctcctcagagcccgagagaaaacgttttgctcaacgctttgcgtccgatcttccgaacccctcgccctccggtgtagtacatctgggcacagcgtctcgtcgcagcggctgttcttggaggcagcgcacgagggtcattcttctatttggccgtttggcggctctttccgggaagaaatcgtggcggacgcgaagaatcgaagcgaagggaagttcgtccgcacgcgaatgagtacgttcaccgtctgttcctcagaacggagtctccgtagtgcgtcgtccagcgaactggagcaattttttttcgccccgcgaaaagactgacttcctgcggaccgcagctgctgacaacggcgccgcccccgcgcagcgcctgtcccacggttttttactgggaaatcgactggcgaagatagacacttttccgacagttatcctccgcggacaagtgaaggacacagacggcaacgcagattccagcagctcggattccgaggcgagcagagcgcgagaaggcacttcgccttcttcgatcgagaaaacaaggaaattcgagacaggggaaaaacgaaa

SEQ ID NO: 912 - DNA, 1242 bp, Toxoplasma gondii
  source 1..1242: mol_type = genomic DNA
acgcccagaaactctgtagctctgtctctccttactcactaagagccccgcttccaggaatgaacatctacacacgggaatcgtccccatcatatgtatatatatatatatatatatatatatatatatgtatatatcgatatatctatgagtacgcgttttggtcactgcttcggtcgttttttctgtatggctttacccggggagcagcggacgtgcttcagcaggtctgcctggagcgttgagggcgatgaggctgtagggcatggattgtgtagcgcccgttgccgcttcttcctctggattgtgggtgattctctggaggagcactcttttctcctcctcaaaggcgaggccttcaccgtgaaaggctcgtgcgagacgaagcggcgaggcggaaggtcggttgagagcgatcggacgcatgcgactgccgcaggactggtgccttcgcttcgcagagggaccggagggaacggtggggcaggcggcttggtctgcagagtcgacgaccggcggaaagaaaacgagatgcgccatcgtgaacaacagggaaaatcaggtgcaagagtgagcgaagagagggaaggaaagggacagtgggtggcgcgtccggtggaaatcgaggaaggaccgaatcaacgtgatggagtagaccacgagctacgggagagtggagcccggcggaactctcagactgaggccacagcccgcgaaagaggagggatcagatttgatgcaaaggagcaaagaaagaaaggagagacacggggaaaacgctggacggcaaggcagagagacacagagagagtagggaccagtctagtctgggatcgaggcgtcgtcgcttgttgggggaaaagaaccggggaaactcgaacagcgaagccggaagctttggcgagattaaccgcgaacttttgcgctgtgtccgccttctttcgatggcaaggaaaggggagaatttcttcgtctcgtgaaggacagggtcgccgccgacgcgagtcaagacactcacgtggactggtgagcccgaacctacagattttaccgactcgagttcgagaggagcaagaaaagacaactgcagaatcgagagagtggaccaaagaagtctctggacttgttgctctcaagctttcgcggatgttctcccgacgttttcagctcgattttctcggtaggcgaggaacaaacgcaaaggcacgaaccggttgagctctctttgccggcgcgctacga

SEQ ID NO: 913 - DNA, 2105 bp, Toxoplasma gondii
  source 1..2105: mol_type = genomic DNA
caccttttctttcttgacatgcgctttccttactctcgcgcagcgtagtacgggtctgccctcgcagcgagggatgatggtgctgtgcttgccatgcttgaagaagaaatccatgaaaattcaagaagaattggaaaagaaacgtggagacgacagacgaagagaagaagacgaaggggaggcaggcggaggtaacgcagatgaacaagctggagatgaataagaagaagaaggtgaagacgaagagttgcgaggtctccggcaggtggagcgcaagacaacgaagggaaggaagaccggaaaaaagagtaaaaaatacggggggaaacggagaaaaagacaaaacgaaagagaagaaaacagtgactacaccgacgaagaaaaaggagagaaaaagagagaaaaatggcgaccctgagaatggcacgaggctgggttgaaggggagagcgaggacgacagacacaacagagttcacaagactcgcctgcgacgtacggagaggcaacgactcaaaacggaacagatgaaaacagcatgtatgtgtgcatggttttccagtccaaaaggcgccattcggacttgtgcaggcaaacgcgccaaagtccttttctgcagcttcacacgagaagtgcaggggggaagcaaaacggtcactcgcagggggcgacacagtgaagcaaagcgaagaagtggacaagaagagaagaaggcaggaagagaaaggccgctttcttctgacagaagagcgacagcgagctcccgaaagacagcgcgagcgtctggagttcgtaccccgagacgtcgatcgccacagacatctgcagagttaaccgaagacagtcggccgagagggaacaaaggctctgcttgtaaacctgttcgtttctctctccctttttcctcgtttcacctttgcctccttttcctccgttttctactgttgtctcgccctccagtggcagcgctgtggagcgagaaaagtcgagacagctgagagttgctgccgtcctcgacggatagttagggaaagcgtgactgtagagagtctttcctctccgagccaaggcgttgaaaaccgacaatgcgggtgcctcttgcttccgttccgctggacgaaaacgcttgcatgcaggagaaaaccgtcacgacgccgcaaggcaagagtgtcaaatccttcgtgtgcggcggcgagttctcctccgcaagcctttttgtcttggttctctcgcgcccctctgcacagaatgcggcgaacgagaagacttcgcaggaggtccgcagaacttcaacttccagctgttcctgcccggtgtgcctgcggtcggcggccgcggccggaccccagcgtgtcttgcgactctcagcttccttacgcggtcgcgcggacggtccgtgtatcgaacaaagaagtttaaaaacggcaaagctgacaggtcccggcgttcttcttcgttttgtgccgccctttctgccacactttccccccatttaaaatctgcgttgccccgacctctctcggctggatgtgcaggcggcggacgaggcgctctccccgtttgcctcgacatctgcacaacagcgggggggggagtcgtggggagctgttctcaggtcttgtcttgcgtttttcaagtctcgaaagcggtttttgcgaaaaaattcagcagcagatgattcacagaccgctggctccgctctcggtatcgacagtttctcgatagtccgtcggttctttgacgatttttcgttctccatcgttcctgttctgaaagtttcgtttgtcctttcacctgggttggttgctttgtcctttttcttcgttgtcctggcaaaaggtgctctcttgtaaattgcgccacgggcctctccaccttgtgtgggaactttcctgtcgctgttcttatctcgtttacccctcttcgtgtctcattgttttttctttgttgtctcgctcctcctgtctcgtctccctcttcttcctctctccttctctctcttgccctcctgttcttgtctctcttctacattagcgcgttccgcgccgcctctcggaccgtctgagtccaggagaggtcggctggcagtcctcagtgcggagcagca

SEQ ID NO: 914 - DNA, 4491 bp, Toxoplasma gondii
  source 1..4491: mol_type = genomic DNA
gactttctttcacgttatgttcatgtcataggtttgaggctcgataccaacgcgacccgaatttcgtcatgaagagcgagtgacggcgctccttgggcgttgtgccttcatttcgagaagtcttcacaggtgtggattcgcgttaattgagtgtaacgtcgctacggggacagctgctacgacgacagtcgcacgccttcctggacaggttgcgcattttgaaggtgcacactccacagcgacttggaccagaaaattggtaaagggaacccatgaaccggtggaagcgttgaggcggagcccggtcttctgcgtggcagtttttgccgccaggacgtttctcttttctctaggggaaattatctataccctcccctggaagcgcgactgccactcgctgatcgcagactctcgctaatgcccggtttttgcgcaccaggaacagtgtcatccatttccagtgtcggccgtgcgagacatattcgccgttgctccgtccctccgttacgggtgcttttttttgtgaagagaatcttttccagtgccagcccagattttcggtgccgcacgacctgctttgtggcagtaggaatccgaagtcggcatgttccgtcgtgtgtgggcagattctgcgcgccaccgcattcttcgtttgtcgtctgtcttctattcttgcatgttggactattcctcctgggggaagtcgtacgttctgcttagcccctctgtcacccctgcagtctccactgatttcggcgcaccacgccacatctccgagttaaactcttctcagagttgtttcacacgactgtgctctcgagcgttgcattgaggtgcataagcgaacagatgcagaaggtatgaacgctggtcttcgtgaaagcagccttccccaatcgtgcatcctaaacggagctgcaaatactgttcgcggggccgtcttctacctcttcaaaagtaacacggcgactcctagctttttagaagaaagactgcggtgttgttgagcgcaacacacgaagccgtgtccagcgtgtcttccagcaggtatgatgatgcatctttttttgggtcaggaactttcagatgtgcaacagcactgggcgtacgaagagtgccccggactgtccacagagggaccgcagcctcttgttttgcagcttttgtacagcatcccttacgtgcgtgaggagtacgtgagccagtgtaactcccgcgaggccacaccgtgtgcgtgcttccgcttaacgcggagttccaaacatataccatctcttcatccacttttgccgcgtgcctcagtagagccacgtccacaacggacaacccgatggccgtgagcgacaccgtttctgctcagccccgaaagtccgcacacaaccttcatacgaatttagcaagatcttctcggcttttgtcctttaggtgtcgagtattgaatcacgtagtctgacccccagagtgatctgcacgaagttacacacgcggaggaaatcgcacagagataagctttttcatgcaacggctgtctcctttaacaggtggacggggggcctgcagagagggagcagcagacacaattacactacgtcgtgtactgggactgggtggcaggggcaggacagtgtgacagggaaaaccgcgcacacagacgtcgcaaacgagaacttttttgaaggcaacgccacgccaggtaccaccccgtgtttcagtaacacagtggggatcacatccgtcacatcagagcgtgggatcgcttgcgcatgccactgggacgatgctttgcattgtagagcgaattgcaatgccaacgcgtggtgtcaacccctcggcggcaaacggcaagctcccgccgcggacccggtccgcaacgggatgcagagtgtacatacacccgatggtaaagttcatatccttactttttgccgttttttacgcacgattctttctgcttttttgtgtacgcattcaatccacatttcccaccatggtaagcgtcaaaaccatccagggggagcgactcagtgcgtgtttctgcttgggtgtccagtcgtccccgtaccacaattgactgcgtccgggtttttcaatcctgtcgctttgtgtccgcacgcttgcacaggtggaggggcgcgctttcagactgtctgcgtagcatctttttcagggttttggagcgaacgttacactcacactgagtggcaaaggataaggggtctcgttagtttttgtggcgcggcgggtgctcccgtttgccgcctgccatcccccccgcccccgggctgcgacgacagagacggcacaggcacggatgtgtggctaggcagccgtagcggacacatgttgcactggatctcttttcgctattttaggggtgtctgtgtgcttgtggtttttgtgaacagtcgggatacggtcttcccatttcccaggaggtggccaaggagctggccgagaacgcccggaagattgcagcgccgggcaagggtattcttgcagccgatgaatccactggtgagtttcaaacagtctgacttgcgcatcaaaaagcggcattgtctttccccttttctcctcatcaggatattcataactgtaccgcttggaagtctgtagctttagggtagtcgccgaatagctcccctgcgtgtgacctcgttttgtatctgtgcacacctgtcgagtgcagtgaaagaaggcggtgttttcgagcccttgtttttacgaggcagtttcttgacaggagcgactgggtcatttgctgaactgaggctgtcttaccgtcaaggcagcgcgagtaacgaatttatgaactgttttgtcggttatgtaccaggcaccatcaagaagcgcttcgacagcatcggagttgagaacaccgaggcgaaccgcgcgttctaccgtgacttgcttttcagcactaagggtctcggccagtacattagcggcgcgatccttttcgaagagactctgtaccagaagagcccgtcgggcgtgccgatggtagacctgttgaaggccgaggggatcatcccgggcatcaaggtcgacaagggcctggagactcttccgctgacggacgacgagaaggcgactatgggtttggacggcctctctgagcgctgcaagaagtactacgaggcaggcgctcgtttcgccaagtggcgtgcggtgctcagcatcgacccggcaaagggaaagcctacaaatttgtctatcactgaggtggcccacggcctcgcgcgctacgcggcaatctgccaagcgaatcgactcgtccctatcgtcgaacccgagattctcacagacggcagccacgacatcaccgtgtgcgccgaagtcaccgagcgtgtgctagcggcggtcttcaaggctctgaacgaccaccacgttctgctggagggagcgctactgaagccaaacatggtgacccacggctcggactgcccgaagccggcgtctcacgaggagattgctttctacaccgtccgcagcctgaagcgcacggtcccgcctgcgctccccggcgtcatgtttctctccggaggccagtccgaggaagacgcttcgctgaacctgaacgagatgaacaagatgggaccccacccgttccagctctccttctcttacggccgcgctctccaggcttcctgcctgaaggcctggaagggtgtccccgaaaacaaagccaaggcacagcaagtgctgatggagcgcgcgcgcgccaatggcgaggcacagctcggcaaatacggcggcggtgcaggcggggccgctgcggcttcatccctcttcgagaaacgctacgtgtactaaacgcgtggagagaatatcggtggatacacaaccgtgctgctctgcaaagggatgagaacggatgcgattttgtcttgcgcagtctcgtacccgtgttgagtgtgcgccgatgtgaagcgtgattcagtcgccgtggctcgaaacgaacgtggaaccagggaacttcgacgcaggtagaccacggggtggagagtacgtcatgttgctagaacgcagcttgtttcctgtcggtgaagtttgaacggtggaaagctgcgctggacaaacttgtatccgcgagacgaacgcagtgcgtctgcggacaaaaaccgttttccgcggcgggcagccggcagaaaggacagtggtgttgatgtcgcggtggaggaacctcgcaaaagccagagccaccgtcgatgaagcgttgaacttcccgtgcatggacagcaaaacagatttacgcaagaaatcctgtgggccgtggttgctgcaagtaaagtagcggtgcctcgtgaaaaaacgcaggatcttgcactgttgaatgagccacgtgaaactaacgaatcggacaactgagttgtggaatctgtagcagcgagctatgctaagacttcagcacagtagtgtgggatgtgtctgccagaagcaaaggggggttagtgtccaaattcgaaagggggctgtttgacttaacaa

SEQ ID NO: 915 - DNA, 1983 bp, Toxoplasma gondii
  source 1..1983: mol_type = genomic DNA
agttgctttgaacagagaatgaatcccgatcttcactgcaggctcagctggtgcgtcgtgctggcaggaacgcgagtcgattgccagtggagagtcgaccagacctccatttcaaacgtcgattctctttgctttggagcgcaaatacctctggctcctggcagtaatgtggctcacagaaatcattcggtagtttgctttcattgtgcctggccatacctcggtgtgaagtcaccatgacactaatcgatctcgtctgtgtgtctaagtcaaagttgatccacggtgtcgaatgtcagtctcttcctcgcattattcgagagtcgaggcagcggccaatacgcccagcaactagcatgcccttcttctctgtgtcagggagaaatgcgccgccaacggtgtcctttcgtatcgtccacgacaaggtgaaaaacacagctcgctttccttaacggggagatacaagtgtcacaagtgtactttttgacacttccacaaccagtctcggtagcccacaaacgtaaccttaactgtgcaacggagatcgctatgctggggccactcatcccttactcaaagtgtgccaccaggaactgatttcacgttgtcacggaaaagaaagacttaagtgccgacctatctggttcctgtgtttccgcactttgtggtgaccaaaaaagctagtttgacagttgctggtccctgtttgcgattgtcgccagtgtgctcgaggaaatatgggccttttgacacaagaggtggagagcgcgaattacatcgggaggtcaaaggccatgacgtcttcgaaatgaggcttgaacttggcgacaaattccttgtgctttgggtgctccgcgtacacctgcagctggtccttcccgtggaattcagagtagagaaagtgcgagaagccctttgtccgatcctctgttacagaggtccgcatatcgatgaagaagtcgagctccggaatgagagctttcagctgtcggccgtcttgaatgaactgttccaggagttcagccggagtggccggcttgaacttgaagcacacaatatgacgcaggccgtatgccatcttttgaaaaacttccgtctggtgaggcgaacgggggagcagaggcggaccgtgcaaaggcaggaacgaaatccgtgctaagcgacgcacgaaaaatacacgaaacgcggcacccaggacaaatcacggcagcgatcttccacgtcgtgtctccgcttctagttgaacgtgccagaagcggcatccaatgctggcacttcaggtgccacgggaaaagtcgctgaaccccgtactgggtgtctccgcgcagaagacatcctccagcatccgagcaagaactccgacagcaagaaaaaaagaccgcgtcccaaactcgtgtacacctttccagcaattaacaatgcagaagtacttctgcggaaaaagtttccatctcttcctgacagaaagtacaatttcaatgcacggacacacttaccacactcgaacaccagccacgccacaacatatccgatgtacatagagtcccagatgagacaacatatttccagcctttcatgctcttacacagcagataatccgttaacaacaccttttacctccaggtcatgaattaacacgaacggaactagaaagcgcgacgaccgccaggtatcagcgactgaagagttccaacgcgatcctccgttactcagggactgagttgacgtcgcaaaatcgagaggaaaccgagcaatgcagggacgggttcacttgcatagctgctctgcggtaagtgttaaaaaactgggcgattttccgtcattttcgacagtgggaacactttcgttcgctctgtttggctctagacgagggtcctgccctcgactctgagaacaggtgcatgcctctggtagtttggagtagccatctaaagccgatgcaaattcggtaattgtgaggcagtttccagcctcgaaatggta

SEQ ID NO: 916 - DNA, 1905 bp, Toxoplasma gondii
  source 1..1905: mol_type = genomic DNA
aattctgcaatacatgaatttccagtgtggcaactgacacatttgctggaagaccttaagacagaaggatccgttgctccactagaacgcagctggaaattgactagaaaatatgttgctgctggcaaagctagatgttggatggtagaagcttgtcacgtccctgtgactcgttcatggatctccgttagtctaattataacggagagcttctccctatatctgacgcactcaatgaactactatcctattaacatgaacgctcgcattgcgtcgtgatttatagtcgagctaggaatcggcgaactacgtaccggcattcacatatatttacatagtgcagttactgtttttctcaacaatagaggtttccacaggggttaagtgcgcagatcctccgcacggcacttttcggcactatctaaaattctggagagcccctcaagcgggaaatcggctctcgcgctgccacgatttttgacccgtagtctgcgtgcatgttttgaccaagtcgagtttgtggtaaaacgcgtccacgctttgtgggtaggcgcacagacgagttttaatctttcatcgcatgtttgacatccaagcacttcatgcacactcaagcataatcagtggcgcaccccatgcacgtttgggcaaaatgaaagggtatctcggaaggctcgcatcacgcagaaaccgagtttgtacaagcggttgtcttgtttccatacagaaacggaagaatgcagtggcgtttctcagcatctgcggtgactgtttgtgataagaacacagtgatggaaaacgggctatcgccagcttgccgtgttctaagtgtgcacacaagcagaagaatgctcgagtgttctgtggttttcctttccttactaaactcccggctgaaagcagcctcaagagttgttctgcctactttgcgaaaggtttcgtgcatcgagaatggaagacaaagcctcctctatttttcgggtggttccgttctgcttggaagtgcagccagcgacgaccgtgtctcgtgcacgatgttactgggccacgtgtgcagtgaacattcatggaatataatgtctgtttcttcccagggtttttgtttcgagtgtgtgaccgactgggttggaaatggagttcaaaataacaagatgacgaggatcgcaaatatttttggcgttcgtagtcttaactgtacgggtgtattttctacgcttgtgtgtgcgcatgcatccgatgcgtcaaagatggccttctacgacagcggagctgaaatacagagctctacgaaagtgggagaacttcgtatcatatatgtgttctgtctgatactatatcgacctgcgtggagtgtggaatgatgggtgtgccagaaagaaatccttaggtatggagacgggcccagaattgtgaacggttgctgcaagctggcctgcaaatcctgcccgttggtgtcgcttttggtgactctagtttgtccaagaatccatgaaacggagacgtcagtttctgatagtctatggagtgccgtcatcccctctctcccatcctgtgtttccatcgtagattcttcgttgtgcagtgacaagtccgatagtcggttgccgcacttgggttccgccgtcacttcgtgtctgtcttcgtctgtttcgaaaacatgcaagctaagaaaaaacggattcttccatgagatgagttggatcaagaaaaaagtacaggagtccagggaggccgaattcaaggaactagggcgctcaacataacgggcaacagaagtatttactccaaacgctggaaacaaccggtggctctctggccctggcaaaagtgcaaagcccaataattgcctcaccagcttttgctggacttcttgtcccagctttggcggttgaaaaagtaaagaga

SEQ ID NO: 917 - DNA, 5013 bp, Toxoplasma gondii
  source 1..5013: mol_type = genomic DNA
tcccttcgcttcgcattcgagagaatggagaggcaacagaagaaggcgtcttcccgggagaagagctgagagtgaggaggccctcggctgtctgacagagacacgcgaatgcggctgcgacggcaggtcccctggtctccacctcgccagcgtgtggagggcggtcgctcttaggggggttcgactccagtctctgagcgcagaggccgcatcggtcggcacctgtgaaacgtcccactcctgctctcctgtggtgagactggaaacctcgccacgatcaagaagctctctgtttcctgggaggaacgagggcgcgaaagcgtgaagttcatgtccatgtcccgtgcagctccaccaattgtctctctctctgcacccagctgggcgacacaagcttctccctacccggtgtttttctttgggaacgcgacggcgcatctgtgcatatgcaaaaggtccatcaggttcttcactcactgcccgagaaccgcatgcagtgacgaaggtgaaaggcgcccgatttgtccgacgcttgccccgcttccctctgacagacaacgaggaaaaaaggggactcaattcgctgggagagaaggcgatataccatgcgtcggactgcccctccaggctgtggagtttggggagagcacggggaggaacggaggagttgttcccctcatcttcgccggtgcaagtctctgaaactgcacaccccggagagcgaagggaaggaggctgggacggagaaaggcgaagcggggaagcgcaggatgagcgaatctgaaggaaactcagcagtgctaaggctctgcaggtggggagagtagacgagagaggaggacgacccagacgcgagaaggaaggaaacctggacggagactgtgtctccgtcacaggaggcagtgaggaagcgcgaagggaagaagagagagaagaagagccagaggaaagtccatgctgagggagaggaaccgcgtgagtcgcttctgatgcaagaaagaagtacagcacgaaaaacgcgagagtaggaacgaaactcttgacaagcgaccggggcacacagcgacacccgggagacccgagcgaaacgtcaactctcccttcaatccaaccggagagagaagaaagggacatctcgctcttctgtcttctcccgataatcgataaagggagaaaagctgttgaggctgaaagatgcgattcctgggtcgcatgcaatttgtacggtggcccggaaacgaagacgagcggagagtcggaaagcgtcgatacagcagggtagtgtcagagacagagcgaatcaataaaaagaaaaagggagaaatccacgtgaaagttttctgtctccttcgtggacgcggtcactcgctgaccacctgaacggagaatcgcgtctgtagaattcgcagcacgaaagaaaccgaagttccgcaattgtccttacccctcttcgaggtaaaacagtgtagatcgacgaaaggagaagaaaaattgttctcgttctgtctctgttctcgctctggcgagaaggccgcccccccccccctctcccaccaagagcgcaaaggtgtggaagaaggagcggcgtgtgggccaagatcgtcgttttccgcgccggtccacaaacgaagaggtaagaagaagtgaagctgaaggagaggaagaaagagaagggaagaaagagaaaacgcgagaaggagcaaagcgcagcctctcgatccctcaagtcgattttcctttgtttgcctccggctcagtctcgagctttttctcaatgtctttactgcatgcaacacgagacaagacacgagactcaggaaggatatggtggtcaggtactccattattttcttggaaacggaaatcgtcctaaaagatgcaaatgcccggtactacagacgcgtataaaatacgctagctaccttgttttcatgttcctgacggcgacgtctctgccagcgtctgcgatttcgacgcatacacggtgtctgatgtattaaatgtgtcctgtcaactcgttgctcttgctctgtccacacgagcatagcacctcaacattctggacagacgagcggatttatgactaacgcgggtgctcggttattcaagcttctcgtccgtgcgtgcaattcaacactggggaatctctgaggcaaataccactgtaaaaagcatctgctcagagatatacagatgcgtagatacaagtgtagttgtgtagtctctgcggacagcgccagcgtgttttctcgtgggcgaaagcgagagaaacgccgccaatcttgaaatgtgtaaagtaggagtttccccagacgtgtggtctctctctctctctctatatatatatatatataattacatatatatactttcaaaactacatgcatacaaatgcatgctggatgtgcatctgtatctatgccaagcggcaataactcgccttaagcgtcactggcagggacaagttcattgctgcttttacactcgcagtgtgtctgccattccacaggtgaggtcgtcgacgtggcaagcttttcagagtctaagattcgtttcttcatctcgaatcgtggtgcattctttcgtggagcttagacgccgagaaggcggcatgaaaaagagtttcactgtcccgcatggatgtggaacgctggcttttatcacttgcagcccgtgtggcacagcaaaagaaagaaacggctaatacagaaatacagacgagcaacgagattcccaatggagacacgacaatagagagaagtagtttgcgaacggagcaagacgccggaacagaaaagcgttttagcgaaaactcgagagagtgaaaatccaaaagcaacgagaggataggggggaagcggacttcacgatagaggcacagaggccgagaatgtgacggacagtgaaacgcagaacaagggatatagcgggaagaagagagtgttcgaggttgaaattcggcctccttaccacgcggtgtacctacggacatatttttatgctctgttagttatgggcagctacttgtgaagggttccgagctacgtaggatccttgtgtgacctctgctgtgggctgcctgctcttccaaaaaacgctttggccacttggtgagcatggtaaacctccagcggtactgagctagagagagcgagtcaagagcgttgctcctttcgtttgtttcttcctcattcgcactgccagtctcggcctctcttgtcgccctctgctctccctcgcctagccacgcctgagaaaagagacagcgcctgagacagcaggaagagagaacagaagaagtgaggagaagaagagagaaaacagcagaaagaagaagagacagaaatggtgaggagaaaaagagggacaggggagacagagaggaaaagagagacagaagagacataaaaacgagactatcgaggaacgacccgaaagaggaagaaaagagcgagtgagattcctgtgcctcacacacaaagagaggaaggagagagaggcaactggggccagccgcgtttcagtcttcggggatgtccgctcataattcaaacgcagtgttcaacgtctgcttcgatttgctgtaagttctgctccacaaaatcacctgaaatgcttctactggtgtaagttacaaagatgactccccatctgcactttcaagagcgtgaagatccaataatatggttacaaactcgatcattttcgtgacgggtgcgtaccccccccctcccctgttaacggcgcggctgtgtgacagcggtgacgtattgtcttgttctctccaggtgctttccctgtgtagtgcccttcactttgtccctccaggatccttcgttttccctctgtgttttttttctttcgcaggaatatcgtgtttcctccgtcttcagagacttcgggagactggcgccatgggcctgtctccgagccacccgcgtctgacggagcgaacaccggagacaccggcgactgagaggtgagagcatgcagaagagacaagcgggttctcatgttccgcctcgcttgtttctcccgtcgacggttgttacgtgtgtgtcttcttgcagagtcaaacaacgtcgtgagtccccgttctttcttctcgtctgcatcctttccccggctcttttcgtcctgtctcccgttctggattggccccggtcggtccggtcgtcttggctcgttgaataagtctcgctgagtgtgtgttcgcaccgccacgctcctttttctttctgtcttcgtgcttgcgtttcctcttcatctgtcaccgtctctctgtgcgcgtctgtctttgtctctcgcgttgtctgcctttctgcccttgatcgcctctcgtgcctcgactctttcttcacctttcggccctctttctgccccgagttcacgccgtctccttcgtcggtctccttttgtctcctgctgtctccttttctcgcgctgcccttctctcaccgttcgtcttgggtcgcttctcggccgatgtgcttgcggggaaaaaacgccgtttccgtccgttcctctgtgccgctgcacacaagcagcccaaaaattgaggaaaaattgaggtccattctctcagcgcacaccattcgttttctgcggcgttttgcggtgacacttcagtgcgctcgcaaacacagcgagaagaccctgcgacgaagcttcagacatttctagttgtgagagcaggacggaggcacagcggagaactggacgaggacgaaacaaacgaggagaaaaaccgcttcggaggaagcgagaaaagtcctcgcgaccttcgcttctgcaaaaggcaacctctctctgtttcattctcacctcgagattgtgcattcgaataaaccgcattgacgaggaaggctatatcctacacagagcaggcagctgagtcttttctttttggccaagtcaacctaggatctcctcctctgttccctcaccttgagatctgtctcttagacgcgcgcgcttcttcttctcacttgcgcaccgctctcctctccaaga

SEQ ID NO: 918 - DNA, 2778 bp, Toxoplasma gondii
  source 1..2778: mol_type = genomic DNA
cttatcacatcacctctgaatccctacaccgagctgaagtcgcaaaagcgaaaaagctggaaggacgcgagtaagcgaaacagactactcttggacgcacactggcgggtctctcctttgtcacgcgctctctgctcctgatgtgttccacctcgaactttcgcctttgtttctgtatctaaatgtctacacacgacgaaagacacggcgactcttgatccgtttctctgtcgcttctccaacgagatggaaacgcgagcaaacacgacatgcaaagaactcgactgtcgctcgagtagcaaaattcatctgtttccaccgtcggtttttttttgaatcaaagacacctcacgccccaccatcgttctccagggtgtctgcagagtttccgttaaaatacgtgaattaaaatgcgcaaatggtgcacgtagaaaacgcaatccggagaagccaagactgaccgatgtgggccgtttcttcttcagtgcatctcgttctgcaagcttcgtgttaacgtagtacgcgaacgccgcgatggcgaggacgagaaggacgagaacaacgaagatgcttgtcactgcaagacacagggaggagagcagccagaaacatactgaaaacaggagcaagaaaaacaaggaaagactcctcgagaggaaaaacagcgacgagcgacacaggacgcaggaacactgcccgcggtactcgcggggcactccgcaacactcgagtacaaaaaatggtagagactcttcttttcagatttcgggagggacgcggacacagctagaattttgccggaagccgcaaaatccaacagtgtagaagcgaggagaattggagaaatggggagaggacaggggggttaacgacgcacagacggacactcttggaagacgaagaaggcagagaagagcagattttcaacgacggggattctgctggagaagtgtgtgaggagcgagaggctgttgttcttcatttcttcgcaacgtgacaagcccgagaccgcgtttaaacagacgcatgcccagtgcctcaaaacccagaaaactcaatgaaaactgcccctgccgactcccggcaaaaagttcccgccaacctaccggtggaagaaaccgccatggtggagggaatggcagatccgtggcaaatcacagacgaaatcgccgaagttaaacagaaagaccagatacacgtgtggacacgcaggtacaccggtgtctcgaccgcagccagggagagcagatttccctctttcaaggacccgagagtggttttcttggtggcaaagaaaggaagaattcaaaaacagaaataacgaacacaaacacaaaccgaacacggtcttcagagcgagaagaaaaaaccttctctctgctcgagggacttttcccgacacccccccccccacccccctctcgctgcgagaggcccccggggcagtcacctgcccttgtcgcctaaaatcggatttgtttctcgtggcagcggggcgagaagctcttcagtttgagcaaaagtcaacctttttcaagcgagagacttcggggtccatttcctcgtcacagaaaccagatatacccaacaccagctgctgcgtagtgaggcggctgtgcgcctaccctcggcgaggcaactccgacgacgcagccgagagtcgacaagcgcgttttctctcgctttctctctgggtctctggaccgtttcgattcatcgcgacaaagtcgcaagccgtcaaagttcccatcttcctttcaagactgctgcactcgtcgaaagccgacgtgtgtcagctcggaacgccgtgaactcgacggccttccccactttttcgctcttggcgtggacggagaaagtccgctcgcgagttccaggcaaccctctggcctcggggggccgccgttgcaatggctggcctgttccgcagaacttccccttttttctgtgttttcgacgcgcacagaactctttttctgccctgtcgttgcgcgcttagctcactcgtctcctcgcatcccctgaaaaaaccgaagcaaagcgagaaaccagtcgccggagctgctggctggcgcaggaaacctccgagactgtcttgcgagaaaagccgagaggcctgcttctttccttcttctcgctcgtctcccgtgtctcccccggccaagcggcagggtcggtcgtgggtgggagatgcgcgcgtttttgatatctctcgagaaaaaaaagagtataaaagagtttttcactgcttctcgcgtcccgcgtcgtgtttccctcgtcctgtgaacgaatcggctgcttcccgcgagtccctgcaacttctctcgctgctctcggggttgtcggagtcagcaccgctgcgttcagcgttcctgcgaaaaaaacggggaatcgaggaagttctttttcgcttcgcgctctgttttctccacgaggtcgctcggctctccttctctcttcctcatcatcgcagaggcgccgaaacttcgagactccgacaaccagcgcgttcttcccgcgccgtgaccctgacttttttctggacaaagagaggccgttcaggctcggcatccggcgacctccttcctcaccaaccggtgcctctcgacgtatccgagcgacatttcgaactgatttcgcttttcgctggagcttctccacgcgcaagccgccgctttccggcctcctcgcctcaccccacctcccctcccctcccgcccccgcagtggacggacaccgcgcaggttcttcgagcaagtcggttcgcatttcgcagga

SEQ ID NO: 919 - DNA, 1762 bp, Toxoplasma gondii
  source 1..1762: mol_type = genomic DNA
atcttctgttgtcccgtgcctgttgatgctctagatgcaatgatgtctctgacgaaacccacgtacgcctcttctgcctcttctggttccattccggtacactggcgccatgcgttcctgagcagcatagaaccaaacagagcaggcctctttgatcaatatgggaagtcactgtgagacctcgaaacgagtttgtgcaaaagacgattggacaaggttggccataccatttggcgtgtcgagcaagttccacgatagacggttcggggtcggcgcagtttccgactgtagcctgtttatagaagcctgaaaataaagcaagtttcttcgttacgcaaaaacttcaggcgcgcgtgtgccacaccgaattcacaagaaggaaaatttgatcttgaaaatgcgtcagcatgctcaggaaatagtgctccggcggcggtacacaattagagaatcaaatgttggccacttcttaccgtagagttgcagctgatcctctactggacacgcttttccgtgcgatgcaacccaagacgtcgcctcgttaaacgttttgggcagttttcctgtcggtccaccttctacatcgtcggttgtgaattcaattacagggcagtgttgaaataggagtcgggaaaacgctctcctcagttgccgtgtcaaacgaggccagtcggtcttgcacaagacatagccagtcactaggcaggtggctgtggagaccagaagggtcccaagatgtacaggcctcgccatgtttattatatggttgaaagaagcagggtgacagattttgggtttgcgcgactacacgattgcttactatgaggagaagcgccgttccataaccaacaacatagaggcgagcacttccggggcttaatggcttaacgaggcagcctgtgagacacaattccactttcccagagctgcagagcctcacaagataaacacagaccgatttttataaagcaagccacgcacgccgtgctccctcgactcgtccgtggtcttcgccattcacactgacgaacagaccgtcccatatacatccgggccggcggctccggggataacagtcccccgttttctccttgcgttctacagacaaaacagactgcacacttgttataagatagtgtgccttttggaggaggtgacgagggaggaaattccacatgctttctcaagttagcgggccttgtgactcggcgcactcgacagcacaaggttgcatgcagacgggcggctgacgtcccgttttttccgcaacagatgagcatgcagtggtgagtacatcgaagcaatgtcttgcgacatctttcttcttccacgtaaaatcgggatcccacgcgaacaaaagataacgaacagtcattcatacgcgcgttccagtcgctggggcttgtggatgctgtcaggccatctcagacaccgaaaggtatgtgaggcggtttttggtaaagcagagcctccatgtttttgggaagcgtttgtatcttcggaaactttctttttcaaaacagtctcttcatgcttacagtcgggaaacgcgcagaatcacggcatcttggccctctcactctcaagagatccgctgccttggcacagcagtgaatttcttcgcggcgggcacccgcagcctgagttttcttcagatttgtcttttttttatctcgaataagtgtagaaccgggcgttttgcgcgatatttcctcttcccaattgacatcgtctgctaccggggaagcactagagaggatca

SEQ ID NO: 920 - DNA, 3829 bp, Toxoplasma gondii
  source 1..3829: mol_type = genomic DNA
acagctcacttaccgcgatcgattagccagtgattgaatatgaacgctgtgcgatttgcccgggagcgctctcctgcaggtgccaggctctctcggacaagaaaatggcatgcaacggggttttctcttgcagctttttcttgtcgtttgcctcctatctgcatccgcgggagaacagtgtgagtgccagacggacgggacacgtgcgttttgcgcgtcgtcaaagtccgtttgtcctcactgtcaaactcttcccgggctaaatcaagtgtgacgctgagtcagcctggtgtcttcccgtttcgcgtcgattcgtggttttcgtgggtctcgcggccggcgactgccaaagattcacgcgtgtagggcaatgtggcaactgggtgttacgtcgtgttgtcattctgaatgtggcttttagaagaaataggcggtgtcaaagatgtagggaactgtcaacggcacctagcgagaagtcgctaacgtgtcgcggacgaggggtacttttcaggagtgtgtatggaaagccgtgcgtgctccagcgtgtggagtgttgccagtgaacgacgaagcaaagatagtgaagtaattcagtgaaaagaacgcacgttcccacacgatacattattatgtaaattcagtgtactactgcagacagttaaatcctttaccagcaaagttaccaagatacgctccggttcatcaaagtaggcaggattgccgaggcgctggcgttagagcttggcaaaaagtggccgttcgtgcttcgacgcttcttcgtagcgccgatcagctttccacgaaactgagaggcagaaagcaaaaagactcaccaacaggcgaaggcagtcactggcaacggtagaatcgctgcttgtgtttctttgcccacagagccgaaccacgagaaactggatcccgtggaaaaacgagggcgtatgtcgatattcatttatttatctaattaccgggtatatacgcattgcgaggcaaatgtacatgaaaccagagattcaaccccgattgctgagtcgggtgcgagggaaagagacggtctaatttccccgggaaatcggagtgctgcgatgtcacttttcttttgctgcggtaatcgattccttgatggcagcatcggctttaattttgtagctagtttcgtggacgtgtcgatgcggaccatttggcaccggcagtcatgatggaggcttccgtccaagtggtgggattgaggcagcaaagcatgaacatggattctgaattgttctagtttgcggcgttctacttggtgctacgtttgcggctgtttccggcagtgcgacacctgtaggctaacagggagcacacagcggaagaaggggactctatcaataaaatatgaacgctgtgcgatttgcccgggagcgctctcctgcaggtgccaggctctctcggacaagaaaatggcatgcaacggggttttctcttgcagctttttcttgtcgtttgcctcctatctgcatccgcgggagaacagtgtgagtgccagacggacgggacacgtgcgttttgcgcgtcgtcaaagtccgtttgtcctcactgtcaaactcttcccgggctaaatcaagtgtgacgctgagtcagcctggtgtcttcccgtttcgcgtcgattcgtggttttcgtgggtctcgcggccggcgactgccaaagattcacgcgtgtagggcaatgtggcaactgggtgttacgtcgtgttgtcattctgaatgtggcttttagaagaaataggcggtgtcaaagatgtagggaactgtcaacggcacctagcgagaagtcgctaacgtgtcgcggacgaggggtacttttcaggagtgtgtatggaaagccgtgcgtgctccagcgtgtggagtgttgccagtgaacgacgaagcaaagatagtgaagtaattcagtgaaaagaacgcacgttctctcacgatacaacaatggggtagtgtagcattgcaagcagtgacgcaaaccgacaataaataacggaagagggaattccttttaacatgagtttcgaacttcttcacagaaatttgccattgatttagataactttcgctatggttgttaccctctttagctgttgggtactcgtaggccgctggtcgcactcatcgaagagggccctcttgtagccctcttgccaccgattttgaagaaacccgctttgtgtacacccttagaaagccccggctttgaagcaagcttcgccttttctttgttctgcacgtccgagacggactcaaaatttgaaaagcaggctgagaacattctgaatatcaagcagagcgcgtggttaaaacgtattttgtgcttcagttcgaagtgtggtgggcgaagagagaccggacaaaaacgccgcagcttcaccatgtctatttctatgttgagatgtcatacccatgtccggaagaaatcctccgtacttcgccgaaaacaatactcccgaaaagtaaaagtttgtaccggtaaacactgacctctgaaactgtagagcagcgaagcaagaccggaagtgtgcttttgcgccagcctgcaactgttcccgtttcgacgggctagtaacatatgtcggcctttctcctctggcgaaatctttgtatgccgttgcagttcctgcttaaagcgcatgtttcgcatttgttccatcctttcattgagttttaaaatccaatttcgtgttggaacgcgtctgactaggagatggacgcgtcgatgctcatgtgagtcattcgtaggtcgcactcggaaggctcgcgacagcaggaaaagagggaagaggacatgtaggcctgtctcagggtcacgaagccaggaagaagcaccccggacggacaagcatgaggaaaagtcttggcatccgtccgcaagtggcgagcgcgcaagctgttcgtgtggtttattgcctcgtgctagccacagacccagttttcatatcggagaagtgggctgcactggggcgccgatgcctggtgaacccgtattattcctgctagcacctttttgagctttcttccttcctcagaaagagagagacgtacactccgtatacgtcttctttctgccaagtttttttctcgctgagacacggcaggcttccgcgttctttgtagatctcgcgagggaacaagcggacacgcggcggcgcgcaactagctcgatgctctcgcttcctgctgactgcctcgacgctggtcctttttcacaattcccccgaagttagcgtcgttctttgttgtggtacagaccactccactcaattccgttttcaggagtagtttttcccgactgcgctcaccagaaatccttttttcctgacgttggccactggcacgcagagagccgtccgtctgcctcgtgtcccctgtcaagacctgcacagggacaagacctgagaagcgaggtcgaaaggacaggtctgggaggtgtggtccgaccgggaataaagcgtttctctgtcttcgtgtctctttcggaacgttctcgacctctgtttgatgctttttctgtctgcaattgccgttgtgaggagcgcatagagaggaggcgcggacggcttccagcgctcgctactgctctatccgactcttgtcagctgtaactcaaagagcgctttcctcatccctcagtttttgtatgactcttcaccggtaaacatttgaaatcttcccagattcttcgtaaggcagagagtttcaacctcggttttgcttggcggtagacagctcaaccacctcaagagccactcgtgtgccacacgccacgacctcgcctgaactttgacgttctttgctgacaata

SEQ ID NO: 921 - DNA, 2668 bp, Toxoplasma gondii
  source 1..2668: mol_type = genomic DNA
ggtaaagagagctagtctctcgctcataaaagtcctttggttcaagaacgaacggtgaaggcatgctccgacgaaggtcttcacggtcctctctcgcacctcagcactttcaactggtaagaagcccatcgacgagcctaaaaaatcagtttcatcatttagtccggtttatgtaattgttgcctgaaaaggtgttgcgcctgctttatcgattgtaactgctgcttctggtcgtcggacaaaagctggcgttgagccggccgaagatgcctgccgcgacgcagactgcggttgtcagcaaacgcgagatattcgcgccaagcctcagtgaaaagctccagttgtttcgaaaccttttctgcctcggtcacttcccgaacccaaggcgcttggttttcaggtgatgccttctcacaccccgtcgggtgcttctctgcttgtctaaatcgccctttccctgagaaaatctcttgaacagcgatgctcgggatgcaccctgtaccccgttggataggaagcgcgtcgtttccggcgttagacgacccgtccgaaaatccaccttcaggccgcggactgtgtgagcctttgctattcgtaggttgaagtgcgacttctggaccaccagtgtattggcactcagacgcagaggcgatagcactagcggcttcggaagctgcagccatatgagaacggaattcagcacgagcgaacttgtccgccagatcgcgcatgggtgccgagccgagttgcgttctatgaactcgtaacactcgtcgatagagttgaacagcttcacccagctggagttgaagccggtcaaacagaggtacaagaatttgcgacgccattgtgaacgaggcaaatgtgcacgggttgacaactgggaaaaagcacggagctatggcgagtgtttcacgtcgaagaggcgcggcggtcgctgccaacactgggtgtgcctgcgtatctcgattttcctatcctgcgttcactctcgtacacccatttagccctttggaaaaggaaaaactctcgtgccataatgtgtgagttagctgtcgttgttaagcgatgtcgcacacacagcggagcttcctgttcgtctcagcagttgacatctggatgaacagtgacgcttgacctcgaatggagcaccatgcgcggtggactgtccacacgacagctggagggacgccgctccttgctggttttcccgttgaccgaaagtgccgtagaaagcaccgatatatattggtgtttgtttggcagctgaaaaagtcggatttccccaccacggatgagaacagtggccgcatgcgcgccgcgtttttccttcgaaatttcaccctaaaaacggtttgacagaacggagataaatctgctggagcagtttcagagcaacgggctgaaacagtgtggcatgttcacaccaaacagatttcggacatacacaaaccaatgccacaggttaacaggtcgatccggaagtcattgaccccactcaaaccgtctggcattcgcgagcctcgatgaccgtgcggatgaaagaattaatacagtccgcattcttctggaatgcgtcttgtacaaactttaagcgcttatgtggcaggcaattaacaactgggtcttgagactcaattgctaggaattttgtgcgcataaggtgactgtgttagctaaacggggggccaggaattgatcgcccgcaacttttcgcctactcttagcgagctgcgctgtgaggagacacagaccaaaacaccatgtgccgtagcgtgtcggtgtcttatagtgagaaaccgcaagcatgcctcatcatggaaatgactacgagccgttccttctggtagccaatgatcccaatctactttaccattgcgacctgcgttcaaatgttatcttttttccggcatctttgcgtacgaagcttgcccacggtgttccctcccaagacgacaggcgcaaccgagggttctgctagctgcgacagcgaagagggcttgcagttccgtagcaagttattgcagagctggcatttcgctattgatcacctgaacaactctggcggtttttactgagttgaagtgcgtgtttccagcttggtaccgacgtcataagtggaccgttaatgagccgccatccaatgccgctcgactacgcccgcagacgaaaaccggttgtgtctcgctagatcttttaccagaaactctggtaaccgcgtatacagcacggatttaatccctattcaacatccgattgtctatctcttcgtctcaatctgttcgggttttttttgaagaggagcactgttgctggatcactaggtgactgcaccctgtcttacgtcaacgcaataatcggtacaatgcccttgtcttaggtcagcgcttgtctaacgtcagtgccttgaatagtgctttcatacgagaagtaactttcaatccctgagttaattttcttatgagaagattgcattttcgccatctgcttttgtatttagtggcggccctggttttgacgccttctaggtccggtgcataatggtgttaagtcctgcaggtgttgcggattagccggcgtgcaaacggcaggcgcacaagagtgaaaaagacagtcgttgtcgagacacccaattggactgcttgtttagctgacacacagttcaata

SEQ ID NO: 922 - DNA, 2942 bp, Toxoplasma gondii
  source 1..2942: mol_type = genomic DNA
ttttgagtcgaatcgacttcgtgacacgacacccgagaacgcgagaggagagccgatcgaagagcgccgagcctcctcaggcggtttttctttagaacagtgcgtcgttctggcgaatggttaacagatcgtttcttctggcgcttggtatatgtgtgaggtggagaaagtgaagaacgcattttgcggctggaggggcagtttcccccaaggtttggccgcaggcagttctgcgacagtttgtacacagttgcactaggagagaattcgctccgatgttgggcgcggactctcactggacaagcggtgcgccaccagtgtcacttgtcgagtcttgtcaatggaaaggtatctcgtggcgaggaatttgaatcttttcgccttttcgatttccgtacgtgtcttcacgggaagtcgcgtccccagcggaaaaagtctgtgctcgcccatgcgcatatttagttcttcctggcgcctacggacagccaagttttttgaggcagcgggcgcctctgcgcatctgtgcttccgtagtatgtcactgtgtggcgcacgcgcgccttccgtgtaacagttttttatccgtaaagtaggacggatctttgctatgttttcgttctttgtcattcattttgaaggtggactctgtcatatccgagacacaaaacagttgtcattccttgtagaatcagttcgccaccctcgcggtcgcgcgggacggagaaaccttgtccagaaaatagatcacttcacagcttctccgagttccacttcagcgcgcggaaacccgtagtagcatttaggcttctcacttgaaagtgtacttcagcatgacaccacacaagagactagaaacaccatgcaaatacgatatggtgagaccgctgtgatgctgcagcgcgacatcgagccgacgatacaatccgaggagaagaactcccaaattatctgaccgggcaccccggcgtctgcgcctgagaaagctgcagttctcattgcataaaatctgccaacatgcttgttcggtgatggactgtttccaaggaaaccttcctcagggactcggcagtacacaagaacttgcaggacacgaggatggataccactacaggttcagacttactgtccacgagagaggagagcaaatgtgccgcaagtggctttttctgcatcgtcaacgatagttacgctgtaacgtatccaccaggagcgagcttttcgtcctggacgtagggtttgccttcaccagaaatgaggctgagaggagaggcagacggaacataaatgaagcttctttcctgcaagagccagatgaagcaacggccttcacttttgcactcaaggatcactttcgccactctgcatactctgcatgcaacagtgtcttttcccctcgtagcagatgtgtgtcgttgtctctgaaccaaccgttcgtctagcgggcgtttccaattccctgccgcaggaattaggcatctcctgcgttttgcttcgtttctgcagaactgctgctgctctttttccttttttctcggcggtttcaaggtcttttgtttccttctggcgtagaaacggccaattcccctcaacagtctgaggttccggcgcgtgtgcagacccgtgacacacctctctgattcgtttagaaaaagtccgttttttcctgtcgttgtccttttcattccttctctcattcatttccctcgtcacctttctccctggcttgctggcgtcttcgcggttttcacacgcctcgactttctccgggcctcctccaagcccggacagcggcgggcaggcgaaaccacgagaataccacgaaccttttccttctcttccgttttctttcctctcctcccttttgtcttccctctttcttccttattttctcgttttcctgtctcgattttttttctgagtcctttcctcagtctttctcgcttctgcaacaaggcttgcacagaaacgagggcgtccacacttgcgttgctttttcctgcgctctgtagcgactctcgagagacagtggagttttggagtcgctgggggacggcgacgcgtatagagaaaaaccgcagaaaagagaggcaatttcgctcttctcccttctctggtctccgtccgcgtttctccctccagcgagcgaatcgcagactcgcggaacccgtcgaattctccctttttgcccagccgctagttgacactgctccaagaagcatttttatctccgacactaggtcgaatgccccgggatactcgatttgtcaaccaggatacatacgtgtatgtttgcgtatatgtagcgctcttgtcgattttactgcgcatggcgcttgatctatgttagtgaggaagagaatgcgcgaccgcttgccggccgttgcttcgagcgcgccccgcggcgaggaaaggacgtagacgaccgcgtcgaatccttcacttggtcgacggctggggtcacagaggccttcctgcgggcgatgaggcagcctcgcttttcgcgagtgttttgtcggtcgacgcggtgtgcatcgcgatgactcgcgagtcacgcaaaacgcaaagcttcagctgctctcttgcctctcgcctttgaagacgacgagaacccagatccgcgacgatgcccccgctgccttgatgcgcaggtcaccggccggcggatcttcgaggaagcacacaaacgaagggaggaaagaacaagagcgaagaacacgagaggaatccggagaggagatcaagtgaacgtcagagacgccaacaaggaagaaaatacgcgacgagaagagcaagagcttccgcccacctcacggagttcgagcgcactcctatcgagactgctctgtgcaggccggtgagacgcggcgacagcttgtgtctcctccccgtcactcgaggttcgttgcgtctctcgcggaaaggtcctaagctgcacactccaa

SEQ ID NO: 923 - DNA, 2673 bp, Toxoplasma gondii
  source 1..2673: mol_type = genomic DNA
ctttttcaacttattgccttcgccctcattgttccttatcgccgaaacatgactgccgctgtcgccacatggagagggcaccgacgatgtaccaacggagaaaaacgtggtggtccttgtttgggaattcccactggggggaagatctgcatcggaaggacggtgctccagtcgcaacttacggaaacgccacaaaagcagacaaaagaacaaagtagaagtggcaacaaccaacagggtaagtgttgactcaagaggcagcggaacgcgttctcccgagcatagttccgaaagggataaagactcaatgctgaagaacaatgcccgtgccggaggcggagcggagggaggatctgttgatggctgctccatcgtgtaaaaaagattggagagataaatcaacagagatggaaacaaacatcagtgccaatcaacagaccagctggcctcactcccatgacaaagccgcaactgtgcggaggccgacaccattcagctgtcgagaaggatcgagtaccaaacacgctgcatggtgctttctgagcttgttcgtcgcaggcactatcactggttacaaacgccgcctatccgggaaacgaagatgcaggtggttgcagccgcatgcacagacagcggcgacactacagtttaggattgtcggcattcgccagacgacaacttgcagactcccgtggacactggagcgctttgaagtctggggccaccctcgcggcaacgacaagaaaatgtacatcggaaaggggcaaaggacaccgcgagttgtgttcggtgggtctctttgtgttgagaagtcattggttgtgacagaagtagacccaaaaccgcgtcacgcagacggacggataagcacactcaagacttgaccgttaatgaaacacggttacagactctgacggcatctgagacaccaaaatcttgtaagattgtacagatggcttgacctctgatttgaaaacgtgaaaaccagaggatcacaaaagaagtgaaggagtgttgctgtgcatcgacggccgctagggatttcgcagtaggcatgcgtccaccatttagccacgcgcgaagatagagaagaggtgtttgagtaatttctcagggaaaattgacgcgaagaagtagttgaccaacagaaaaagcatcagaggagaatcctgggattactgaaggagcatcacagaatgaaaacaaggtcttctccaatgccagaatttcggtgggtgtgtctcctgtctcccggaaaatgcaatgctgcgcacggtgtttgtctcgctctagggggttgttggatggcaagacagccaacgtagaaacgcgaacggcccggtcgagtcaactcgaaatctactgctcgtgataatctggacaggggagtttcaaaaaccggaggacaccacgaatgacctaaaatttcattgaactccttgcacacatggtgctcaacctgaaatagcgagactttgttccttgcgtctccgtccacttaccccacattacaacttctgtagttctgccgatacagtacttcacagctgaggcttgcccgaattatcattccttgcctaacaactcgttcctgacacatcgcaggcgtatccggctcaccctgtgggctgagttggtatacgtttttgagaagcgaaatgctttcgaaaggtttctagagcttagaagtgtcgccagtgtttagccttgcttttattgtggctggcttcatgccaacgctagtgcatgacgatgaattatacagccatttgaaatacggatgaacctggaaatgcgcgtgctcggctgttaacattgttgcggtcttgattgacgtaagattcggacttttcagagtcccggtgctccgcccgaaagcaaacgtaacaacctgctcggctggttgaattttaacagacgtgcttctcgcgaagaggttgcatctacattaagtcctgctgtgtagtctaccattaagagaatttgaggaactggggttcaggctatacttatctacaaacgcgcaccatctccgaacctaactctaagaaaaattatcgattcagtgcgagtaacccgaaaagggtttttcttcgcggctgccccaggagaagcctcaaacagaaaacttatgaagaaatcacccatagactagaaaccgctcgagtattaaatggcgaaagttcccatcactgttaagacaccacatggtgactactccccgatgtgtttgatgcatagttttgtcgttgtgccggcgaatcttgtgtctaagttcggcttgtcacaaatttgttagtagtcgtgaagagccattggcacagtctcagcgcattcctccgttttaaaaaggcgtcgtaggagaaagccttcaggtacacactacaagtgtgctcgtagtcgtaggaggaaactcggcttccgtgcgcgtttgcgtctctggcaacgaggtacctctgcccgtcggccttgataccgatagcagttgtggcaagcgccgttcgaagaacaagaaatagcatgcattgcacttctctattgttttccgtcattcttcgcgtccgtttgtcgtaacgcaaatctaagtagcgcgatgagtatctatcttgtacattccagtccttgtcctcccaaataatacgccccgcatagatcacctaagttctacgctca

SEQ ID NO: 924 - DNA, 1903 bp, Toxoplasma gondii
  source 1..1903: mol_type = genomic DNA
aggtcagtgtgcaacgatccgcagtgaacgaatgagtccgtttgggggccttcgatttacgggaaattgaagagtgtggcgttgccatccccccgggatcgagactgaagattttgcctttccactacacagaaagacctgcagctttcgtcaggcaaagagagaagtcgtgaaattgtgttctacagaacggtcccgtattccgttcacatggctctccagttttctcgcagtgctgagatcgaaatgccagtgtcatttccccccgagttccttcccgtccatagagaaggccaaccatttactgtccaccctcgtctgcagggcttgtttcaacgtgtgaactggtaaagagaggatgcggattttaacaaggggatctatgaagtgcacctgtgtcagcctcgcagacgagcgcttctcttttgtttgcatgctgtcggcttcactcgccgtgaaacccgcaatccgctgttgcagctgctcacctgcaagattccgcttcccattagcaaatgacagaaaggctcttcactgtcgttccaacgtttgcttccttagagtagacacccaatcatctggacctcttgcgttccgtacacacgtgcaaaggtaattcgtaccgagaaagactcttcgcagccgctaagaccatccgaaattttgtaaacaggtttggcatcatcgccaaggaaattctagttcatgtcagtacgtgcgtgcagtacaaagcacacgcagagaggacaccagttccctttgtacgcccgtaaaatgagaatttaggaaacttatcccaggcgtttaatatggtggcaggaacgtggagagaatccaccacttaggagtgtacctgctaaaactgtcgtcaaaacctttgcctccacacgaccattgattgccgcttgctattattttgtttcgccttccgtgcgtgccccgagggcatgcgtaggtttttccaccagacttccttttcagatgttacatggtgattgccgctgccaacatagcgagaccggaggcaagacttagagcacttgaggtgtctgtaggagtagaagccttccgatcttcgttctttgtgcaggacaaagtcaccatttcaagaacagcgcacgagcttcgcgcttacctcgcgtctttgttgtgattttcttccggagcagaaaccgtattttgacaggtgcatgcggcttcactcaaactccaaccagctgttcgttgcacagtgagcggaactttttgttttccacacagtttgataaggttgttgtatccagcattttttgcaagagatcatttccaggaaatcgaagcgaagccgctcctccaggctcacaagacatgtccagtgagttgagcgcgtgtctgtctctgcggaaatggaactgcatgcaccaactcgatcgcgtcgtgtcgttttccacgtgcagaatgcgaggcctgaattcgtcttcttcttctcctaacgcgtatggatatcattttttccactagtaaacaaagaaccaaacttcgttctcgctcctgcctctggaccacagggagccttgtctccgctcaaagtctctttggcactgcatgcgcgctgcgcgtgtgcagagacttccacgctcacttgattgggtctttagggagatcttttcttgcagactgaaactgagaagcctttcaattgtgtaaaggaagtatgcctttcggattccgctgcatgtgaatgagcagaggtctctcgcttgtgcgtggcggagatccccgcctcgcggtgtacgccgtgcatggcgtctggccccaaactcttttctttcgttcactgttacttttgcgcaacttgtcacgcatttgtgtgtttgagacaatcaaaaccgttcgttttccttcaaaaaatgcgctcaaaaaa

SEQ ID NO: 925 - DNA, 2017 bp, Toxoplasma gondii
  source 1..2017: mol_type = genomic DNA
gcagacgaaattcccgaagtggagaatgtgtgagtctcgtccttgtgtagctgcggaaaaccagagtgagagccagttgtgtagttgccgcaagccgttgggcggcccccgggccgaacacgagtatctccccgtagagcaaacgacgcctccgtacagtgcatcagcatgaatgtcagaagctaccctcagaaaagtatatttctcctgtggaccagctgcgcacgtggacctccagtgaaggtggctgggaaaaataatctgagcagtagcagctgcaggacgtggcggcagaattttgcaagcggggtgacaccacagtgtgttcgctagtcgggcgccgtagacgaagacgaacacagattcgttccagtgactctgcagcataggcgaacgctgttgtagaagagaaaaacaaagaagtcaagaaggatgtgcggctgcaaaacggcggatcactttgaagtggcgccgcaaaacggttgctagcggaagtgcgagttagcctcgtgaaccacgtttcacgagtctagccgaaacagcgacccaaaattgctaccgctgtacggtagctgcctagtggtaaacaatgctactagcgtgcaaatcaggggtttggtggactggtgcctcgctataatgatctcaagaaggggctcgtagatggtgctcgtgcaaatgattcaagtgtaaaagtgacaccacaggagttaatacagtatattcacttaaatcatttctagatgtattggcgtggttaggaggaacgaactttgacggctgccgacgattttgtaggtatacgtgagagtagtttggctgaacgtgtgcaacagaggaaagtttgatgcgttgacgggagcaggaaagaaggggtgacgggtatcatctgtgagaatgaaagaccgacctgataaacccattcacttggtcagatgcaactggctagcgaatacgcgttgacgtttgccgcgaacaaacagggtcacctgaagctaacataggattcgggcatagtacaactgtttaccagctgaatacaattgtacacatgtgttgcgtacctttctttgatttcttgagcgaacagaagtcaccggagatgacggctgcaatacaggcagcttgaaagagcgtcagcagcaaatctatataggggtggcctctgcagtcaccgcagctgcgtaccaattaatggtgaagcactcccgcaaccatattgtctcacgtttgagacgctgaggcaacagctgaatatcgcagcttgtcattttactaccatttaatgctgcgaagaagcgtattgaaaattttaattatgacacccgccaaccttgtcaaacaccgtgcatgcgtcaacccgttttttggacgatgacacaaaacaacagcgttgtccttttcttctggcagtaggtcctctggagaaagaacgcttaggttgagcgaataactcagaggtttatcgtgttgagcagacttaatgacaagctctttcatggagcatagtcaaacaaaccggcaccgagactacgctctgtgagcgagttactacatgcaaatatggcggccgaacaaaacctgccaattagctatgctgaaagagtcggtccggtgcatttttttcagcattccgcacacttaagaagatccttactctttttgcaaccacaaaaaacgcagcttctgggtcccgtccaatgcaggaagtccttcgatgcttcgtttcggtggatttcggtttccttcctctcactccgtgctggcgtacaataacttcctgcaccgtcttgcagctgcgatggtacgccctttgtcttaagtgcagcagtatggtgcccgctgccacaggcttagcaggcatgccgacaagggactcgaagcaagttctcgtcagctttgtagggtttgggtaaatcgtgggacgtttcagcatcccgaacttcagatgctgacccactcgagtttcgtcttttacgagggttaaacgatccactatccttcttcacatccctaa

SEQ ID NO: 926 - DNA, 2043 bp, Toxoplasma gondii
  source 1..2043: mol_type = genomic DNA
agacgcagacaacaaggcgcagcgaaaaatggcgaaaaccgagactggcgttcacgatcggaccgagacaggcgacggacagagcaaaggagagagacaccgcagaggataaaaacaggtgaaggaaagagagaaattacaggagggaaggagcaggaggagagaaatgaaggagtgcacagagacaggaggaaaaaaggaagaaggaaaaaaagaagtgggcgagtgatgaaaaggaagagcaagagagaaatgagaaaaatgacgggagagagatctgtcagccgaaggtaggtgtgtggggttggtagtccgcatctgggtttggggacggcttccgcagcatttgcgaccccgctaggacggttgaggcgctaaaatcaactttctcaaacagaacgcgacggctttcaatcacgcgctgggccgacgaaggcatgccctatcggctgtctggactctgcaagtcgcatgcgtcgaggaatgctcttgagacagctcacagtctccgcctgcagaaggaagtatcgtgtccctctgtggccacgaacaggctcttgcagcgactctgtgaaagcggaactatgccagcgtctggccagaataaactctcgaccgcacgagggcgcagttcgaccacggcttgtcccggaaacaacaagcgcaaccttcttgcgggggatccacgcgtcgttgaaagaggaagccgcacctgggagacccgcgactccggagagctcagagaacagacggaggagaatcgaacaacaaaacaagtcaccgcgaaacaccggcagtgcgatttgccgccaagtcactctccctacaatcgaattgacgcgggaagtgaacaagtcttctgaggcataactccgtctgtctgaagtatagtaacctacacgtgcaagtcggaaggtggagggagtctcagagttcttcggtgtacagacaggccgttctgaatcgagtcctcagcgctgaatgcaccgccgagtctctcgcaatgatttccacttaaccgtaaccctccagtttccctaaaaggcttcaggaaggcacgaaatgcagggtaagcggcgaagaaaagcagcggcaaaacgctcggaagtctctccgtcgggaaggcgctgtcaatcacgttctcgccggtggcgccagtcaagaacccgctgctctccaatttgggctcggcgcgaatgcatgcgactttgctcgcaaacgcgcgcaaagaagaccgtcgtgtctcccttttctctgcgcatctgcatgcccccctcgtccgcgaacgttcttttaacagggcaacacgacgataggaaaacgacacaaggacacagcacggaaggggtttccccctgttgactgctcttcctgcctctcttgttccctcctctttaaagaagccgcttggaaaaaacgaacgagcagggaaaatgcgcgggacaggcgacagcgctgccaccggcaacgcaaaccgagacaccgggctcacactctgtcaggagcatcagaaatgcgcgaccgttctagaaccacgttctttgcctcttttgtccattgacacagagacatcttttctgtttccgtcctctgaaacagcgctcacagttccgtgcttcaccggtgtatagacactccggcgtccgcgtcgccggcggtgagttgccgtgaaagaacgtatctgctcttcaagttccccccggtgaacacagctgacactcaccgccgaagagtttgtgtattatgcagtggttcatctcatgccttcatctcatgcctgaagtgatgtgctgtagacagcgtggcgggcatcagaccgaacgtgcgatgcataaatgcatgttggatgactgcgtgtcagaaaagtgcgcccccttcccgagaacaaacgagttgagacttgcctagagttcctcgcaagcttctcgactcaggtgcttcgtcgtaactgcaggcatctctctagcgtccaggtatccttcagaagcgtctcgtgctgtccgcgaacgtgccccgcgtctcggccatgcacctgccccggaa

SEQ ID NO: 927 - DNA, 5038 bp, Toxoplasma gondii
  source 1..5038: mol_type = genomic DNA
gaaggccctgctgcctctgttgctgggctctgatcttctctctcatccgtttggaggcgtggagagatctcttcttcggactcggagtcgtgagcctcagcgggagtctcagcgcgactcttccgacagtctggagcttcatcgcgctcagactcgtcgccacagctcgcgaggcgcttcgcgcgctcttgcgctctgcgaattcgcgcagctacctcggcacacaactcggcgttgacaaagacgaagctgctggacctggacaaggcgtcggcctctgggcttgttcgcacgatgctgtcttccttcagtttcttctcccatctcgcgtccgcgagccaggaagagacgcgcgactgggtcggcgcccaagaggaaggagagcgagggacgctcgcaggcggacggggagacggagggccatcggacagatcggagtcggactccgagcacgaggaagcagagagggcaagtgaagagcgctgctctgcagtcttgctgtggagtctttcttgggtgccgctttcatccgcagcctcacacaaaggatcagacaaatcggaatctcctggcgcgttacttgcgttaccacggactgagcgtcgtctgcaggtcgctaaatctgaagacgagcaaggagacaaggaggacgagcaagcgcagggacgttctcttggcgacatgggggccgcgagaccgtcaggctcctgggaaccgcgtcggagcagaggacggtcgctaatagagggagaaacaaaggcatccggtttcggagcagtggtggcttcaacctgtccagcgttttctcccgcaggagaggtgagacagttccgttcagaagcgaacgaatctgacaagttggagtcgcgagagctgcgccgccgccagcctcgcctgtgcctcggagaagacatggtcgaggagggaagaacgctcggaaagagaagcagaccgcccaagcacagaactgaggcgtcgaggcagaagtcgaggcggaagcaggtgaatctgtatcgctcagagggaacaacgacgtttgcgtctagacagcagccgaggcaggggtgtgtaccgccgggtcaaagtgagatgccccagccattatttttattcgttctggtcagcgaactgacggcaaattggctgcgtttcgcaggccatgggacacggggcccaaaggaacttcccccgccgcaggccaagcatgcaagttgtgccagctttttgccgagctttatatttttggcaagtttcgaggggaagtggaacgaaaaaacaaagagagcgaaaaaacaaggcaaacgaagtggacatcgatacttgatgatcttctttgctgcgccgtccttgcagaacggttgcacaagcagaaacaccagagaaaagtgaaaacagaggcgggagaaaacgcgcggacgcgcggaccgaaacaagggggtgggcaggaggacgcgtcgttcatccgaacgcgtcagattgcacatggccagaacgaagagggatctgcaacgatcaatcgagaaaacgacccaaggcaacggctctttgcaggcaaggtcgcagcgtaggaaataaagccgactcagctggagagagcaaggaagacgcacaagcgtacagacgcaagaagagacgtgacggaggaacgtcgggaggccgcgagctcgacagctgcgacaagacagaagaccgaactatccggtcgagcaccgacaacaacatctggtgcacacatctgcgcgacagtaaaaggtgtattcttactcaacgcagcaacaacaccatgtttggacttttttcagtggaacaaaggagggaaaatggttgtgtcctgccgctgcgcaaccgagggaggggagggggaggagggaggggggcgaatcgtggaaaacgcagatcatcacgccaaacctgtttgtaaacggaactgtcgacccctatggcggcgacccaacacgagactgtttcaaacagagatctttcactcttcttctcctatcgatcttgccaacttggttgtattacactgggtaagcggcaggaggctggggaaaagccttgcagggtgaggtcagagaagccacgcacagagggtctcgtccgcaacccttacagcagtagaagacgacagacagtgaaattcagccccgtttcctttcctctgaagagaaaaaaaccttcctgtctggcctggaaaggtggaccatcccatccagcttctcacagattctcgtagcccaccgcgggtctgatgctaaaattcctcaaaacagagtttgaccaagtccattcgcttgccagaggtcaccaagcagcagatgggaactcggaaactgcgtacgaaaagtatgcttgaaggaaagagacagggaatgagcggaagagttgagatgtatttctttgaaatcgtcttcatggaagaaaactatgaagtcgcagaaaccatctctatcgttcagtttctgtcagagtacgtgaaaaaacttacgggtttcgaaacagaacgggccatccttttgcattacggtgcactgaagcacagtccccaggtaaaactgcaaagagtccctgttgtgctgaaaattgcgtaaagaaaacgtcgcactaaggaagaaacatgaacagctccgcagaaacatttcaaaatgtaaccccacgaataagtatgggacaaacagtaacccgactcattgaatcgatcagcctagattctaaaactgctacaaattctgttttacgatgaggacatcctcctgcatctagacgcttttgcgtgtagttttccaatgtttgtatttatcaaatccaagttgtttctgtcttcttgttcggaatacacacaaaaaacgtctctcgtcgcttaagaaaaaccaaatgttcgacttgagtgcagccgacgtcttttcaagcatctgttatacggtttgggtcagtgctttcattgcgcgtcgcccaatttcgtcacatatgagaaatttgcatgactgcattgcgatatgacagcttctgaagggcacactagaagtcggtacaatatccatggtttatcatctccctggaaagctggtaccagcttcacgttccctaggcaccgcggaaggctcaatcggctgggagcggggtgctacacgatgagctaactcgctagaaagacagaaaatggggagagctgttctcaattaccactgcgcgcgtaaagaagagcaaacgaatccggaagcagagctagtttctctcctggactaccgtcataacgtgacactcactagcggaaatgatgcgttgcttatcataactgaactggaaggacccgccgcttgcgacgccgggcccaactgattccgacggccggttggtctgcaaaagtatcgataggactgccaaacattcgccaatttcgtattttcgttcgtcgttcccctgtccgctttgcgtccgggcgtttcacgactgggaaggatgagtttgttcaagaccagcacacggcacatctgggttggtctcttcgagaagaggctgtccctgggagtcacagcgctcccttcctgaagaaaaaagtctctgtgtgcccgacatggatgtgcagttccagatgacacgactatcctttgcgcctcttcatgtttcatcaagaacgacaagaaggattgactaccgactcgactaatcaacgcttcgtccgctggattcgcgtgcgtcctgttttccttttttgccactactcgctggtcttcggagctcgcaacacacccggttcgcctcgtgaaccagtgagcatctttaggtgaacaaacagcgcagattgtccacgtctgatgaccatcaagcgtctcattttaccccatgtcggtagaaacaatgacccacacactcagctagctgcgaggatcttccaagactcggcgctgtactggcatatgtgtgagagagcatgcacctatctgtgcatcgcagtcctgtttgcagtgattttggatgatggcgtcatactttgtggatccgcccgtctgttgctcagagtggtgattccagagtatgaatatccaggtgaattacacattcctgacggaatgccaggcaccagcagcctggtacgcggagttgtggggtcagagtatccagttcgagcagagaaaccgacgatttccaaaatccccgcactgcgcatttgtcaatcgacaagaactacgtcctggaacggtgacaaagtttagtcagtgtcgaaaggatcttccagttttgcaaaactaccgtcaggcaccgtcgcgctttttaaacggcgagtcccagcccacccaccctcgtcgtccaccttgtcttcgtttccccctgggtgttgaagggtcactcgactcccctcttttgcgacttttcctgtgatgagtgaatgcgttttgtccatgcagctgcattaactgtttctggttaaggaaccagggagaccgctgtttttttcgtttctgcttgtagcttctagttccatttctctcctcgaaatacggcacatgccagttggtgtcgcatgcagcagctgcgagcatcgattggctgtctacgatgaagagtcgtcaagtccagggtggtcattgtttctcggccctctgctctgttcgacacccgtttattcgctgctggtttcactgacgctctttccacttgtccaggtgatttgttgtccagccaaaatccgcctcttgtcttgtgctgccttcgtccccttcctgcgaaaccccccaagtctccgagaggcccccctcaaattgcccgccgcgaatttgcctctggaaacaccgcagcagttacgtggaagtattccagcctcgactttgttctgtcgtcgcatcgcctctctcccctcgtttcaacttcctctccttccacccagcggcgatcgcggctcccttccctccgtgacttctttgccgtgagtgaagggccgcgtcgttcttgtttctgccactctccattgtttttcctggtcgccttcgtttcagatcttttctcgcgagttcttcactccttctggatcgtccaccga

SEQ ID NO: 928 - DNA, 4125 bp, Toxoplasma gondii
  source 1..4125: mol_type = genomic DNA
cccagttcataatgtggtattcctatggagattgtcagtgttctaggacgaatatgaaaagaaaaaaacaactcgggttggaatggcatgggcaagagtgcgtgtggcacaccatttgtcgacgaacgaaaataaagaaagctctcctttcttgatgtaagtgatatttgatccgtaccttggctgcccgacacgtatgactccatatcaacaccttcactgtatacgaagtccttcactttctgttccgtctcccgtgcttctgctccctctgtgatctcttcagtcttttgctgaggttcgtccgtcgtggatccacgtgctgcttcctgttctttcttcagttcgtccacgattctctgaatactctgtaagttgaagctgccatcttcctgcctgggagcagcgtccaaacctgcatcgccctcatcacttgttaataccctcgcgtcatctccttgaatcgctaccgagacattttccttctctttatcacttgttattaccctcgcgtcatctccttgaaatgctaccgaagccttttccttcccttcaccacttgttaataccctcgcgtcatctccttgaaatgctaccgaagccttttccttcccttcaccacttggtaataccctcgcgtcatctccttgaaacgctaccgaaactttttccttcccttcaccacttgttaataccctcgcgtcatctccttgaaacgctaccgaaactttttccttctctttatcacttgttaataccctcgcgtcatctccttgaaatgctaccgaagccttttccttcccttcaccacttgttaataccctcgcgtcatctccttgaaatgctaccgaagccttttccttcccttcaccacttgttaataccctcgcgtcatctccttgaaatgctaccgaagccttttccttcccttcaccacttgttaataccctcgcgtcatctccttgaaatgctaccgaagcattttccttcccttcaccacttggtaataccctcgcgtcatctccttgaaacgctaccgaaactttttccttctcttcatccttattttccccaactaaatcggctagtacgaaaccctcgtcctcagtagccgaggacgccttggtagaaaacgataccggcacctgagacactacgactacaacggcagccatcagcagtgttcccaaacacggaaagcattttgtcctgacacggaacggtgtgaaaatgcatcgcttccggctgagaagcgctgctgagccgtgacacgatgctgtagatgccatgttgtccaggcaaggcaaaaaccacataataaacccattgaggaactacttcaccgcgtttggttcacgaaatcccttagaaaataaagaaagacgtgttcaatccggagagtcaatctcacaaatcaacaggacgccgtttgctcgcttcgtatattaactgagacgccacagcgaagagtcgcgagcctctggtgggttaagaggacgcgtctctaatttcatggggttgaagccgtgtgtccccggcctcgttctggacgtatctcaggagcatcagcaggacctttgtgttggtgacagcaggcgaagccatcggcatcggtcttcacagtaagagcttagtagtatgtgttcttacagaaactgcaatttcgttcgtcatgctggttccaggtttgaagcgtagacgcggaattgttgcgttgaagaaatttaacatctgctttttgtgtcttccaaacaattgcgcttacgaacagttgtttccttgaattgcgtcgtttcagttcgcctgggaagttgggatcaatcactgccggttcatttcatcatgaaacatactggcagctgcatcgcgacgatgcaaaatcggacaaaagaactcgaacttgcatcttagtgtcagtgcattttccatgacttctatacgaagaggtggtcgaaaagcactaagacggttgcggaagaacacaaaaacggatgtcctccagtccttcctagcgctattatgtgaagcgctctggtgtgttgagggagactgttttaactcgtggccataccagccggccgtgtacatcacacggtagcgtcggaactgcgcctagaccgcaacctttacgcgttttcgcgattgaagaaaagttaccataaagcttctaatgcatcatattctgtcacctagccgcatgcttcgaaacctgtgcgtcccttgtctcggttagccacctgcgaacacctgttaatccagctgccccatcgtatcaggaatggattttcagtaggggcctggtgtagcaagcgaaagagaacacgcccgcgcgtaggagtcgatatcgaagatcaaaaggggggaagaagcatgacatccacatctagctttttgttgcttggcacttcgtttctgcagtcggtgtgggcgttagctggtggggggttcagcaacaacgtgtgtcagatgctggggtccctcttagttttgcattaggacttccaagacctgtagttgtttttacgtcgcggcccactcgaagggggaaggtcacgatagtgtgtgtacttagagtgatgtttgcaaagcaccacgcgcgtttggctagagtaacggagatgcaagcaaacgcagagcagctccaaatgcccgccgctgtcctctctcaagcggttctgcttgcacctggctgctttgggcttagtatacattcataggaatccccaaagataactacaaagtgaaaagtctgtaatgcctcctgcatcagttcacagagttcatccttcgaatgtgggaaggcgctggcctttgcaaaagtgcagagggagaagaggacatatgtcgccataagcaaaaagataccaccatttcatgaaagtctaaaaagaaggaaagtggttcgtgctttcagctgacatatctgcctcgccccttactgcacgttgagaacatcgatacatggctgcgttgaggcgacatcgctatagctcggcacattcagaggcagccggacgtcgagccgtctcctgtaaaaggaattccaactcatttttgtcgggttaacgctcccatgtttcccatttcattacactcctgtgatgttgactgatatactcaaactcttctccgctggtttcgagatttgcccgggtccaagtggtttatagaggcggcgagctaccgtcgagacccgttgcgaattgcatgctcagaggaaaaacgcagcatcgaagaggatggaagacctgggttttattggaggcttctcgtggaaaacttgttcttagctaggcagatctacccttcagttattagttcttatgttctgtggaaataatgtggaaacgaatgtggtaatgacagcaaaaaacagaagacaactcttgccgcctcaggaataagggctcgctccctgcacgggcgaatctccgttagcacacttggttgcaactttctcactgctagttttgctggttttctgccgtggctatctcgtctctagtagcccccgggttacacattcaaaaacgtgcgtgtcgctgtgtcgtttttatctcgaacgtgacaaattcttggggccagcgctgcagtccgcgaatgttcatttttactcttaccagttggctgtacacccttcaaacttttgtgtgtccatctgtcacttcaaagtgctgatcgtcgttatgtttgtgtcaaaagtcgtagtgctcccgacttgtcccttcggccacaagccgtggataaggtcgcatctcgaatgaggtggctctctgcatggatttcgacgttttcgagaggaatcttgcaccgtttagagcggttctgggtgaaaaatacggtgaggaaggtgtttgccctattatttctgcacgtggcgtagatttcgtggacttgacgctcggtgaccgtgagctgcggattgggaaccaccgcagtcgagatctcgcgaaggtggacccacgcgaaggcagtaaagtggctttttgctggctatgaagtgagattacagtttgttccagtgctcttaccattgcatgtgtaagatgtagtgcaagccgtagagctctggcagcactcagttgtcaacgcggactttagtcaaacacaaaaatcggatcacca

SEQ ID NO: 929 - DNA, 4753 bp, Toxoplasma gondii
  source 1..4753: mol_type = genomic DNA
gaagacagcctgattcgactgatgcttcataagaaggaaatctttgttcaccggatgaaaactcgccttcgaaatcgacggacgggggtacaagcacggaaggggagagaggggaaggatggcaagcgacaggaggcaccgcagctgcaaagaacgcgagcgcgcgcggagggggcgaggaaagagaaaccgaggaaaaagttgacacactgttgaatggaggagtgtgttctcttcctcaactgcctatctctgtagaggctgtggagacctgctcgtttcgctcgatgaacacccgtggcctgcatcctcatcgactaccaagagagtcagacccacacacatgtacatataaatacatatatgtatatacatatatgtatgtacatatacatatatatatatatgtatatatatgtatatgcactaccgacaggagagatcgacacttacaatctttcaagacccacggccacacacaagatgcagagagctgaaccacgacgcacgtgacttcgatatacttatatatatatatgtacatatatatatatatatatacatgtaaaaatacacaattgcatgcgttgactgcaaggcacaggatatgagtagagacaggaccccagagggactgtcgagtgaagggagaaggtgcttacggggggagtcgacggggtaggcgtactggagtgccatggtctgcgggagagacgatccgttcggatatcggtttgcggcttttcgatcggcgagcgtttgtcctcgtgaaacagcgaggtgagagacagggcagagatggagaagagaggacaacgaagaccgtgcatgcagaaacgcgactcagaagggaggagctggacgggatgtaaaactgccgtgaggccagcgacgcggggcagaagccggctgcaaagtgtcttcgcgaacagagagaaagctgctgcgtgtcttgtcgcagtcgtggtcagaagtagctcacaacggcggtgttcgccgactttcaaatacactctgcagagggccgtcgggccggaggagaaacgcgcggacagacgggagaaaagcggaaccgaagctggcgctggaggtgaccgcgcggtgtgcgtactcccgagaaacaagttgcgtcccggcgaggggaagcctcagagcacaagaagaagagagaaaaagacacgaaactgcagagacacgagagacgcgaaatgctggaagcgactacgaaagacaaacgccagcagagaggctccacacgcggtgcgctgttcgcgttgttgaaatgaaagacagcaacccctaagaagcgacgccgccctcggctgtcaggaagttcactggaacgcatttgttgcgcaatgctttcagagatcttgaactttcgcgaacagcgcaagtttctccagcgttcgcgggcacctcccgcaaacagaggaaacggcgccgctcgcgcgcgcgagacaaaggggggtggagagaaaagtctcccgccgctgtttgtccacgcgaagcatctctccgtgagacgacctgggcaacgcacttccggcaagtttacgcttccaactacttgctctctcgagtcaggaacaatatctgcagcagctgcacattgtcaatgctgtgctaaacgatttgataacgattcggggacggaaatacctcgtgaatagactccacaagtgaaaacggcatctgcgagttccctgtaatctccgtgtccagcagcttctgtatcttgttcgtgagtgtactgaacagttggaacttcttctgtcttcttcaccgcaccgaaagacaggtcgccggtcaggccggatgcgctggcaggaagagagtgaggggaacttctttttacagacaagaagagggaagaaaagcacagggacttcgagggaagtggggagtcttccgtcactttttcactgggttttcttagagcacagtcgcgcagaacaaaagacaaacgcgacagaagctggcagaggaaactcgtgcgcaggaagcgcctctgtgccatatcgcacctctaccgcgaagggaaatgcacatgccacagaaaactttttcagtttgacgtcaagcacagaacaaacaggcctcgattcccatatctgttttacatatatgtgcacaggcattcaagcagaggtactgggatgaatgcaggcttgtgtgcacgcattcaaacacatatatatatatatatatatctattgacaggtcttccagtatatatgtatgcatatatatatatatatatgtacgcgtattcaaacaaaaaacacttatttgtgtaaggagactcatgtcaacacattggaagggcggtgtatctgtatgtacgtgcgagctggccgcaagagcgaagttgactggactccaagcatgtggagaatgagagtaactgttcgtcgcggcattgcgcctttgttgttggatgaaagttgtactgtgtgtgagcagaaggagctggaggacctggggaaaacgatcgacatcgcagcgagtggaggcgttccgctaagtatcttttccgtgaagacttcttgcaatatctcctctgcaagggcaggggttcgctctgctctacttcatttataaactccagagagagatccctcgaaatctccccaggtgtcgccacgtcttttgtaaacacgagtggacgagaacagcggaacggacgacaaacgcgcgatccggagtcaccgaacgtttctgcggtgtcgagacactccagcgcgaacgagcttcgccggttttccgagaaaggcgagagactcgaggatcaagaaacagagatgcagccctgtaacttggcagttttttccactgcgtagcccctccgattctccgggagaagactccgtccgggacggaatacaggggaagggaagttcttacgttttgttgcacggcgaaatgcgtctgctttccacagttctcgcgccgtcttgatcgaattcgcgagtgtgcgtgcctgtcctgaactgcgcgtttgttgcctaggagcttttctccagcgaccagagcatggaactagttctggcgtgaacaccagttcgcagagtgcggcttccaaaacttgctagctgctgtcgagaacacactcacaaagaactgcgcgctgagaaaccagtttgcgatgcagtgtgcctgagcaggcggatgtacactttggatgttgcgcgctccgacagcttctctcgtcttgtgacctttcattcacaagacttggggactgcacagctggagttgcagctgcgtaactacacccgtggatgcagggtcaggcttgtgtctgtctctcagccactgccttcctcagcgacgacgcgctactttggggacttctcttcacttgcggacactttgactttcacattcgctgcctctctgccgaatttcaaagaggcaaagcttctcagcatcccagctctccattttttcatacgtgacctgcaatttctaggccatcgcgcagcgtcaacagaggttcttttcaaagccaacagctgggtgggactcgtgtcgccacttacgctccggaaagtgcagacctcgagcccaggacccaaaatcctaaacaggactcgagtgcatttccagaacggcgactctcgacacagacacacacccaacaacatgcagagacgcgtcgaggctccgacagcccctcgacttccgcccagctctccccacacggcagctgcttgcaagtgtctctccgtcttcagctgtacatacaccggaacacccctctggaggtgcagggaaaagagtttcgtttcccttcctcttcgcggggacctcgttgacggcgcggcagcgtgttgcaaatcgatggctgcatgcgcggccaagacagcgcgacagtctctggcgcgaggtcgagaagcgggtgcgaggaactcgcgcctgtttgtcgcggagggcgttccgaaagaaaaaaattgcacaagccgcggggattgcagagcaggagccgcttcagacctgcgacatcgcgaaagctcttccggacaaagcggaacacgcgcacatgtctcgcaagccgccagtcccgagcgctgtcgacgtctctgctgtctgtacacctgacgccgagtgctcttctttttcgtctcccgagagactgaggcgttcttctgcgcgtctcccgcggaggcttgcgagatgaaggcgcgcgccgccctcgcccagtcgcccattcctccgcgttccgtttccgatcctctctttttctcgatccttgtctatgcagtcacacctgcggtgccgacttcacctcgcgcttttcgacctctctgaaagataccgaaagtcgctgtgcggagcctggctcccctccgcctgccaggttgccccctcgagctccgccctttccagtcatcactgagctccaatttctgctgcgtctgcacccattttttctccacctcgccgcaactccgtgcttctccccttcttcccttctcgctcgctgtggctcttcgagtcgccctgcatgcgacaacatacacacacacatatacatatccgcatcgctgcgttgtcttctctcaagtctcaagcgcgcatgcgccgctgacctggtgaaaaaataccgcgcagtccctctccacggacctcctcgactgcacgcgcctttttctgtgtttgtgtcggacgacccgcgctgtttgggagtccgccggcagccgcgtggctgcgtttctcgaaacttctctcgtgtcgacagcagaggaga

SEQ ID NO: 930 - DNA, 4233 bp, Toxoplasma gondii
  source 1..4233: mol_type = genomic DNA
acagtttagaaaaagtagtgcataggcgcgcaggaatcatactagagagaggatgtgtatcagggtccgacacttgaagtcgacctgcctcttcgtgcgagtttttatgcggataatgcaaatctggccgcttcccagatggactgccgtttttcgtgcggcgatcttggagggcgcagttccttctgtccgtgtagtaaatacgaggttggtaaaacagggcatctgtctctctcagggtagggtatgcgaattccgatctcgtttcgtgtggacttttagagggtgccatttggcagagctggcagagtgcagccagcgaattcgtggcgatttttaacaggaatgcgttgctggcattccttcactcatcttcggtgcaacagttccctgtagagtccttacaacagagacaaatgggcctcgacgccattttccgttgctccgattttcgcctcgctatccaggcgaagggaacttgttccctgtgttctctgtcgcgcccgagctgttccccatttctcacaggactcaccgttacggctgtctcgttacagggtgcctggatggtattttctagctcgtgtgcggtattggaggaaattccgtacaaaacgctttactgcagaactcatccagtggcgtgtgctactcatcaacaaatgaggaaaaggtcaacactttaagcaaggtgttctggtctctggagggttcgttgcctcacgttttccggagctggaagtcttgcgggagcgcgcagaacggctttgcagaaatcgtgcgttccccgttacatttcgttttgcgcatgctcgactgaaaggcttacagaaaaagggtttgtgtgcgtcacgagcgaagttgctgcgatctgtcgcttgtcgaggctacaggaaagtctaatggaaacgaattacgcgtgaaaaaacgaggttttttctgatagctcaaaacgtgtgcatggtcttaccataccgcacacacagtgtcgcggaccctggtccgcttcccgtgaacgttttctggatgtacgatttatcttatattcccggtttgcgatttgcgcatgacaaacgcggcttccgagaaccaccgccttggcaactacatcagtcttgttaatctttgttccgtcttcagtgacgccacccaaaacgtccacggttgtgttcccaactggcacgactttttcttcagaagaattgtctaacttgggaaacgaagcgttcactgaaaagaaatgccaggatgacatatcgggtttttctcgaaaacaaactaggtccacactttcatctctgttttttggccggtgtctgcgcgaaaccaagcagggtctttttaaaatggaaagcgcgaaccgcagatatactccgtgtggaggagacagaaaagcaacgcactcagagagctcttacaaagttgccagtctgttgcgttcttctctttatataatgatcagtactggggctgcatcaacttgccatcgagtgcttctggtagtttatttatgagatttggaagagcgagtggttaggaaaggcgcgaggtagtccttgacactgaatccatcagtgtgaactgtatcgttattttgcagatgtttacacagttttgaatgggaggtagggagtaaactgtttccagagggtcacgaccctgctcacgtattgcagctgacggtgaactgtggcgcctaactggatgttgctcaacaacaacggagtgtgcatgtagacagctgtgttgtgtttcgtggagaatctcagaaagtcaagttggttgtgtctatgtgactcgctgcctacttggcatcagacgagtattgttcaccaagactaccgagaaatcggtgacattctagaacggataatcaccttgttgagcgcggatactcgcactcttaccatacgctacaaagaagcctcccctccggtcctgtgaggagcagtgtaagcatgccaacgcacggaagatggctgtttccccccccccccccgtcctctcttaagagaaggtaactctcgctgtgtctcacctccggcaaacatcaccgggagcttgggaatatcggcctagatttgttgtcttgtctcccgcgtttcacacaaatgcaaagccaacgtgtctctccccgttgtgtactccgtcccgcctaccagcttctttttctcacccttttgtaaaaagactttcggcgcctcttggggaatcatgttcactgacagaccgtgaatccatgatttgtgaggacgaaatgtacgagtaccccaaacgagaaggactggggatacggtcaacgtctgcgaaaacactgaaaaagcatgactgttgaatttgtggctagatgcttcttcctaggcgtgacattgagggacgttccacccggcaaaattaccgaaggcgtcgaagctgtctgtaggcacccgaacctcgaaagcttaccgcttgtacgtttaccagcgaaaacggcacttgttcgaagcagccgcgctacacctcgctcgaagcttcgcactctgtgaattgatgcgcccgtttctttgacaaagtgtggaggaaagacagtaacacgtcccgataagacctaatagaatgttcctttgtattcactcaatattatgcggttgacggacaggagtgtaataaagaggcgtccgtgtcttccttctgacgggagacaggtcttccaacctcggatactttatggaagctcagccttaacaacacattgctcgacagacgcggcagtacaagtcccctaaacggaagcgtccagacaaatttgttgccgtgaaatcggagccaaacagggactgcacttaaaagtagcatagcacaggccggaatgaactctgttttcagaaacactttacactgggtgttatgcgggagaaaaactccctaacctacacgtgtacttcgtgatcataatgatggggcgagaagggaagggcgtttcaatgaaaaggcatgtcatttactttgcgttcgacaactggttacactcttttcatggcctttgttagcggattcactctaccacaggcgaccgaccctacatatatatatatatataacattcactcctttgtttcgtcaaagtatcacaagtctgttttcctgatggaaagaggacacttgggtaccgtagtggagagaaaagtccggtctgcagaaaggcgtctcacggagtttgcctgctcctgatccaggccccctttgacgtgaggcgaaagagtttttcagggcgtcaaggcgaagatgtgtggaagcacggaatcaccgcgtttgtcgatttccgaagcacttgagaagcgtttctcggcttcgcgcagtgggaagatgggaagagacagctgagagagagaccggctcagagcaaggaactcactcccggcttaaagtatccgataagggcgagataaagagagcttgattcgcagaggggagcggcaggttcgcctttcagttccggcagcgaaagtccacgtctggcgaccgcagatttgtttcaggaggaaagaaacgaggaaaggcgactctctgaaagaagtcgaattcttcagcaacgcaagcagcccccccaccccagccccccggtgctcctcctctctccccctgcactcttgtcaacggagaagagacgttttttttcttgagtgtcttctatgcagaaagcactattcgttgaggaaaacgagacttctggtcgacaaagaaatattcttcctgaattgactcgcaaagaacgcaagaaaaaggcgcagcagcagctcgacggcagctcgacggcgaggtcaccgagacgcagagccttgtatccagagaccgacaagacacaccctcctggaagtttttgtttttgcgttttttcttttgtcagttgtctccttctccaagtgctcaactcttcgttacttttgctacaagtttgccgtccctagtcgccctttgctgtcttcattgtccgcctctctctgactcgttgtcttgctcttaagatctcggttttgaatagccacaagacgggcggagtctctctttcgatgttacgtccagactttcgatttggctcttgcttccctccagtctgaaacctttctccttctctctgttctcaccggttgtcttttctgcggtggaactgtggattctgcggatgagccctgcgtgcgaccccgagtgctgcggtccctccgttcgacttttcctctctgcggagaggcacaa

SEQ ID NO: 931 - DNA, 3961 bp, Toxoplasma gondii
  source 1..3961: mol_type = genomic DNA
ttccactcggtacgtgtttctggtattgcacctaattgaaactgtagacgtagtcgagggggcttttcaggtgagcctgtgagtgcaatcattgcttttggcacattgtagcttgacgacaagcgcagcacctgtacttctagacgtaattatatatcgctttgacctaatctccggatgtcattcgacgtgttccagcatttgtttccacacagcatcaggaggcgcatgtgcgaacccgcccttttcaccccagtaattagaatgttctgctgtatgtcctggtgatttttctgtggttgtttcaggagtggacattggcgttcctggactctctggattccgagggcagcagttccacaactctgtccccctgtacacccggcgtttttacccgcatgtgaacaattttgacgggtttttcgtggcaaagtttaagaagctgtccaacaagaaaccagagcgcgtgcaaaaggatcgacgtaagcataacccttttgtcaaagtaagtagttcgtccgccacaacaagcattagctctgacggtgattcgcaggagaatgaggagcaatcttcagggacggaaaatctcgctggagagcgtgaggcaacaaacgagcatcttaaatgaaaagcggggctcatgcgttcaactggttatttctcaggtgtgggataaagagcactggactccagaatgcatggatcagctgatgacatttgaggagaaggagacgacagaatctaaaacgtcaatcacaaaggtaggattctttccgcaattcttcgtacagccccgttttgtgtagtttcttaccacaatctgtgtgatccctcgttttgcagatgcctcaagggcagcccgcatcttttatcttttgtgcacacttctaggttcacaccaagcgtccacgcaatgtccgcaaccatgcgtatgagtggtcagcatgaaatagtgtgccgctgttgaaatcagcgctgaaacgcttttggattttgtggctgcacacgtatgttggcatgttcgcaggagaatagtggaaagggctccgcactattgccgatgagggaaaggaaacagaaatcgggagctgatagggtaccctcgaatgcggaatcaaaaaggatttcttcagtacgggaggctgcccctggaagagaggccaagacgtcaaacacttctcctgtggcctcgggatccaggagtagtgagggttcctcccctgtctctccgaagcaatcagtctccagtggaggagcgagaccggctcaggggaagcggccgcagaagatggcgaatataaaggggaaaaaaagcgaatcgggggttactgatttgagctccagcgatagtgctggtagtccggccccgacagaggtcaagggagggaagggatccgcggaaaggttaggtggtcaaggcaaaaccgattcggggaaaaaagtcggtgtgactaaaaagaattcttccgttaagacacatgaaaaagcaagtatttctaagaagcgtgcgtagcttgctggtggaagggggtgacggtagatcttgagtcacaccacttctgtttttgctgtgttgactttgtttgcgttgcttttacttcttcccgtttctgcaaagcaagttgacacaaaaataaatttccctcttcttcagtctgtggacggatgttttgtcaccaacacctcaccgtagagaaactctctattagtacgtgttccagtgaaaggcggagcaggttctttcgaaagatcgaacaaacaactcatatggatcgcagcccccctactgcaggaaagggtaatgttcgccgatagcgcaccacttaagcagaagcttttgcaccaaggcttcttcttgtgtaagaaggctctaatgtacttgaaataatgtagcatttgcgccctgattttgcacactgcgaacatctaggagaaagatggttttggaacagaaggaaacagcagcttttctgaagcgtggcgcataaggtgtagggatcgacgattactactaacgtgctgagcggaggaagcccaagacgtgtcgatgaaagaaagacactgctgacctaggctatggagctactggatgccaggtcaaaagaggaaaggtgcagtgaacctcacattcagataaattaaccaagttttttgttttgcaacggaatttaagtgggagttattggctagacattttgcaggcaaactctgatgacgggaccgaaggtgttatcaggtcggcacaaggaagtgataggaaacaaatttcgaaagtgcaaacgctgtatggcattggttttttgatcgcgcatacgtacgtacgaagatgcatatgcatctatgaaaggaccctgaactacttttgtatacacgacgcggcagctgtcacggcgtacttccctcacttccccttagtgttggaacgaaccacagacaatgagtgtatgatgtcgtagaggcgaacaccgtctccaccttcgttctgttttgaaaaaagccccgttacctggcgtcctatgtgccgcgaacaagagccgcgccatacatacggctgccgcgcgcgtgtgcagcggcgttttttgacacggatgtcggaactttttggcagctggtagcaagtacgccgtcattgcgatctggtggcacgttactggaagttgtggacgggaaaagaacggagaaggtagagtagcgtcgacagtacctgagacccccctccgcgaactggatgaaagcaagagtggggttacgatagattctcatgcgaggcaccaacctttacactgaggacactgcgtcttcagacccgcgcgaaagtggattttgttggtggttactcttgggcaacaaagccggaaatgtcttgtccgcctgaaaaagtggttctccgtccacatctgaaacacgaacttggcaactttccaacgccacatagcttccttcgcacttttgaggcatcgtatagctgtcctgtcctctccgagttgtcccagcagctcgaacccacacacttaactgttgcatgctgggagggtgactggtgcccatgcgccgtttgtgacatgagcgacctccctcggtgtcggcgttcttatggggttcttttggaagagctgagctggacaatatttttaaaagcattgttggatgatgtcaccaaaaacgaaaggatccccttgtctctgttagatagtggtcgccccttcgaactggacatcagtctttacgatcgttccccgaaaaagagagagtactgcaggttaatggatgaggcgctgctccgtgttccccgtgtcttctttggcaaaacgcggatgtcagcaaaacaggtttgtttaatgtcttcctgtgttcatatttgggagtgctgcggcgatgtgaacggcttttgaactgtcgaattcaccctcatgtgcgggtttgttctccaaagtttggcctaagttcctgaagcggttccacattgaaacattattgccgacgagcgtcggctttaggttccgtcagcgacctcccaccacagtgtatgagcacgtcggcgtcacactccactttctgaccgcgcgtggaaactgtcttagggtgatcctgtcttatgttccgtcaaaccgtgagtctacctcgtcaaaatcgcggcacatatctcatgtgtcttgtctccggagagattggaaacttttgattcaacggtgtgttacggctatactccactgtgtacagggagtggatttgctgcccgtgtttagccgccagcctctctgttccttttccgcatccacccccgatgtccgcgagcagcactcgttgtgaagtgcggaccgcccgcgtttcggctcggcacgctcgtatctagagtctttgagtatccaacactcaacctcttatccttgctctttgccctcattcggatgaccgacgctcggttttcccccagtccatccaagtgcagtcgcaaaaa

SEQ ID NO: 932 - DNA, 2306 bp, Toxoplasma gondii
  source 1..2306: mol_type = genomic DNA
agagtcaagtttgcgcggtgttgtagatgaaagtgattaccatatattgttttgtggccagataaagaaccaaaacaatgatgaagtggtgaagtatagtgctcgattgcagcaggagaagacgcatggtaacagtatgctctcctggttcctttgtcatgggcaggcctatgtgttttttgcatcctatggggaagaatgaaaaagaatctagggacgtggagagcaggggaaagacaagaatgtgtcataaggggtgttgtgcacaaaggattcattttgttggtaccgttgttatcgccacggaagagtgtatggagttacgaaaaggagtggtctgatttttaggcaatagtggtcttgttctcaagtactgcggtaaccaggcaaaacagagcgcaaacgtattgaaacaatatgggggaaaacctgtcaagtcctgatatcggccgacgaaaacctcaagacggcttcatcacaggggcatgtgtctcctccctgcaagtgtttttccttgtcgaacgtgaacccgcgtcgtcatgagatgcagactgtagcacactccacgcgccttcagtttaacgttaaagacaatggagcatatgtggaagacttggtgattttccttgcgtgtttactgtgatgaggtttgcctcaccgtctgtgcagtgcttactcacacctctgcgtcgacatggtagccacaaaaggcacagtggaggcacaacgaagcgcccgtgagttgctaagaaacctcgatattgacattagcaggagtcttgttcacatgttgccacacatcgatggagaaaggatcagaagctggttagggcttagaggattcatggctggtcgcaagtcgatgctgtggtaaagtagacaacaacgttagccggtctcttcttacggcaaacttctgcgaggctcaaattgcggaccatcctcttcattaggggaggaaccggaggcattcgacaagtttgtagcatctccttttcctagcacactctgggtgagtgatggagctgtggttcctcgataggaatcaacacatccgctggaaaaggtactacattcacttcgactggatccggttatttgttagaactgtttacagttccctagggaagaaaccacggccttctaggtttagtgttaatggaattttaggtttaggccttgtttcctaggggttcacatttccccctccaggggctttcagcgttcttctgtccagggtttagagttgtttacggcttaacggccgaaccttttatacgacttattagggttaaggaattttttatggttgaaggtctagggtttctttaaggctttagggtttagtgttagtttaaggcttagagtttagagttagcttagggattttaggcttttaggggtttttcagggtctagggtttttggcgtttagtgtgtgcggtattcctgtacagtttcagtgcagtgaggtcctggttccgcatttcgcctgatcctgcattggacactaaccacttaatcaagtaatgtagcgatatgcgcacggcggaagcggacatctaagtgttgaggcccactattaaaagctacctttgtatgaatcacatccttggtatgacaaacgcctctactactctttgaggcgatgtgactagactggactgcggtagataaaggacctttctttttttcggatgttcaaatggactttttgccgccttattgtgccggactgcagaccgttgctggccattgcctcatttgtccttcagctgtttttatggtggaggagaactaagttgcgttttcttgtctttggcggaaacagggcacgtgtcttgtacgcgaatggatgagcacgcagcaggagcccgacgctgcgtggtgcgtgctgcaacatcattattcgtagctgcttcgcggacggcgcaagctccccgcacattctgttgacctcaatggagatgcatgcaccgcggagggagcagttcatctggaaattacacatatttggattagtcacctaaaaacgcaacaccggctttatagaagcataaataagcaggtcaagtagttcatggattgaataacgttgaacactgccctggtgacccagggtagtctccgttgtgtctctaccgatagtcgtatagacgtcccgatttgagacggttttcgcgaccaagcgcgaacttgtgattgttgttgtgccggtatcgtcccgctgaggttcactgcaaacgataaaaccggtatcctattaagtcgtctcaactcggggtgttaccagcagtgaaagaagaa

SEQ ID NO: 933 - DNA, 1329 bp, Toxoplasma gondii
  source 1..1329: mol_type = genomic DNA
atgagactttgaataatctgaaagcgacacaaatgcagatgcgaagactccgcagctcggcgcagcgtctcttttctgcgcttctctcctcggggtgcactgccacagacaacaccccgacccaccttgcctctttgcatgtccacatgatcatgaatgcatatatatatatatatatatatatatgtttaagtatgcagatgtgattcgcgctacacaagtatacacagagccgcaaataaatgtatctaaggaatgatacgccgctatctagggatgcctccactcctctcggcattatatatatatatatatatatatatataattatatggtggagtttctctcagcgtcgtgttcgtttctttggttagttgtcgctgtgtctgtagaggagagagactaggaaatcggacttgtggagacctcctcgtgggcgtacatgctgtctctccggactctgttgccagtacatctgtgaaatggagcaccatcgcgctcgcatgttgtgtctgatctgttcctcacctcctctcagattccccaacattgtgtctcgacctagatttcttgttggggctcctggcgaatcggattctctagccgtctccgagattttaggagaaacgttttcggacaggtttctctctttgcgaggtgagcagacttgcaaagtgtgtgcgttgcgcttttttgggattcaatctttttgattccacttttttagcgaatttttctcggtaaaataaaaagggtttctcgtcactcgcaggtggagaggcggtgtccacgaatgtcggaatgaagcgtcctctcgagagtcttaaatgatcgtacacgatgctgaaagggtgactcgcatgctgctgtaggggtgctggagctattaaagaagcagaagatatgtaagccgattgcagcatacgaacaagatacgcagaatgactatcatacaacgtacacaaggcaaaaaaagaaactgaaacacaggaagcctttcgttgctgctctacattcgtaaaaaggatcctcgcggaacaagggaggggaaacagtctgaaaaggaattgtagaggcgcaaatgcaaagacatgcgcgatgcagcacacgcagaaatccagaaacttcaagagaaaagaagcaagacaaagcagagttcctcggggcgcaagcggcaagattcgcgaggccttcagtcctcacagacattttttcttttctacgttggctgttgactttctttgtcacttgctttcctttccgattgctcgactttggaatgagaaaaagtttgagttcgtctctcccctcttcttcggagatctcgca

SEQ ID NO: 934 - DNA, 3973 bp, Toxoplasma gondii
  source 1..3973: mol_type = genomic DNA
aatgtttggaggctgatgaagccgggaccttgtcagggcgaaaggacagcgaaggagactcttcggacggacgtgtggggtcggccgcccgactcggctccgaaggagacgtaggaaactgaggagacacgccccctgatggagtcatggcgttcgctgatgaaggagacactgcatgcgctgtctccgcggcgctccgagtaggctcttggactgtccccacattcggatttggagtctccggatccgacagaaaagacggtgaatctcctggactgttttctctttctcgaggtgacggggcagctgtggcggttgtcggttcttctgtcggtggacaagactttagtttctctccagcttcgagtaccggactttcagggattaccggcgaacgcaggctgccctccgcgacctcttgtttaccctttgtatccgcgttgcctctcttaacctcaccttgcgttttcttctgattcgttagctctttctcatcaggtctcgcttgctcaccgttctctgggtcttgtccctctccctgtgcacttgtggggcgtgttccagttcgtttcttttgctcagccttcctatctggagaagaccaaagcgcagcctgcatgctggaagatggccacggttcagtacgcgaaggcgggagacgaatgaactcgctaactatggggtggatgcagacactatcgccgtcacgggagatccctttgagtgcttcaacgagttttgcgtcatcgtcttcctcctgggagatctctttcgcttcccgccgccggtcttcacccgcgtcgcaagcactctcctggaaatcgaagcgaaggttctcgctctctagtcccccgcgtttctcctgcctcgtcgtcgctgctccgtcactcgcaggctgagcagagtctgcgatttgtcttgaagtgcggcgcggcagctccccttctgaatgtgcttcctgtccgtcttctccacaagggagtggagggaagggcgaaatgccacgcatgcgcaggcgccgcaataggcgggcgtggtaaagcccgcagtgcatgccaccaatgccactgtacagaatgagtgcttttagcgtcatcgtgaacgggagcagaaaaatgctggagagaaatgtaactttttgcggggaaaagatcagacgctaccctggcgcgactctcgcaggcacaggctcggcgaggctgattccggaccgacttctccagaaggactcagtggcacagcggaaaacgaggagggaagggaggaagaaacaaaccggaacccgaaaattggatagaaggtgcagagacgaaagaaaatatccgccgtgcgcgacctacacgtaaacaaacagtgtctgaccgtccctgcagctaccaccacaaaaggaggcagtgcgggccggtgacactcgcggtaggttgttggtccaatgcaggaacgctccctgcttctttgacagctgttccattggagatttacagggaaagaatcaaaaaaacatcgagtagaactctgagacagagagactgccgtttcaatgtccctcacccgctaggaaaaggcgagaggcgaaacgccaacgaatttgggatatccgtttgtgccgtacctgcgaggcacgttgcacaggaaggcagttccacggtctttcctgattgagaaattcggaatttctgactcgcacgacagcgtagaccacatctcgtttcgaactcctaccagggtcacctgcccggagcgctgagtgcatgcatccgtcggattttgatgcggttagaaacgtagttcaccgccagatgtaatgcgtgagctgggttaacagtatgcggaggcactttgtttcctatctaccatttaaaagtgtgcaaagatagtcattctatatgcagtgaatacgctgatggattcagttcctctgcatccgcctcaagtgacgcgagtttgaccaagtgcaagggatgtccaattccacagttcacttcgccgggggaggttttactaattaactgagttaaataagacagggatcatatgttggttaacttcaatgcccagggcagactactggattgggtacgcagggcttttgtaacaaagcagggagaattctacatgggggcgcttcatacaagaactcccggatttcgcatacggaatgtgtcgtaagcgcacaccagaaaaccaaagggaaggaacctgtggagtcacacgttacatattgcccaacttgcttggcaaacgagctcaggttgagacaaggagcgatatccagctgggagctcccactgtggaaagcgtactatctttctgagggcaggaagttagagattctctagagaagcgtggctatgtcgaaccgaaagcggtgaatacatggatcggcatccttgtatcactcgtgagtgatggacgtccgaatgtggatgacatcaggtttactgttcgccgctgtttaatcggtgctgctgcgtttgttccatgtgcttgtggaaaacacagagagtgctcaacgaaaacaacgcatttagcacgtgagatccctcagacctttcctacatctttcaaatcccgttccgatgaaagaaagaatgaatcggacatcggactctaaaccttactagaacgcctggcattcgagtgcgtcggaccaccagaaacccccagggttcttgtttgttcaaatgttctacgcaaagagggggcagttcccagaagatagttacagtgtccatttcccacttcggttgaagtgcggcaagatctccagaggtaaaagtcattctttttaatctgtcgcttgcatccaagtatcccgaccacgagttcaggagcacggaaactgcacgtgttaacccgttttcagatgcgaccctcaatttctatcgagtctgaggacgcacacgcacacacaacttcgtgcgacatgctagcaaacaccattcaggtacaatatgatgacagctgtgatgcagcggagcattgaaaatgctgcgtacttgcattgataatgcatcggtggttatcgtacaagcactccgattccaagtgcgagaaagtgagtaattccaaaccataaactagcaatccccactgtctgcggcacgagtaaccaggggtgcttgcaaaccgtcacgacatttgaagccgatgcacgacgtggtcattgtcaagctacgagactcttaatgaaaaaaactctagtaaaaaaaggaaccagcgtttttttaccacccatgtcagtgagtgtgctcccctgcgtggaaaaaaggcaacgaaaaacgcggtttttagcttgcttcgttcaagaaaccgctcgcccgtctctcccaggtacaggctctctcatcagcaatccactgccggtgtttttttgagagcgtgtgcgacgaccgcatccagcgggttcgactgggggagctacgaagcgtttttgacaaaacgcctttctaatctttttgacctttggcttcggtgttgtttttgcttcaatctgcaactcttccggaacgtgaaaacgggtttgcgctgtccgttttgctgcgtagaggaaaaatacgcgcggtggtgttccgcagtgccgcgtgtatttagctagtatttcctcgtccacgaccgaacttcgcagtttttcagacggtaaaaaggtgcgaattcgaaccgtgcccaccacgcggccacgtcattgtggagtgtggcgatttcgatggttaagattcgaacgacattcgaataactatttccctccggagtaactgttgcaccaggccgtggcgtagcagctgctctactcgctctcaccctcagagccacttgcatcctagcagaccaatctccgtcgagcctgcctggagaggcagcgtactttagcggtgttcgttaattcgcggttctttccccccttctctcacgcaggatatttctcgtctcgactgcagtaaatatcggtgctttttgccttctggaaacgcca

SEQ ID NO: 935 - DNA, 2363 bp, Toxoplasma gondii
  source 1..2363: mol_type = genomic DNA
agtgcagatggcacacaaacgactgcgtaggaagagggacaggctgtctccgccggcgacagcgccgtctcctcgctttgtcagacagttttgcttacgcgaagactggcggtctttgcatctgaacagacgagcatccggcgtctgccagggagcgtcgccgggtctgtccttccgtctccccgaagctcttcctgactctctctctctcgttcactcgcggcgttccttgaaggtccgttcactctgcttgcacagggaggccgttcgagctgtttgaccctccctctcgggatttttgttctggggcgcgggagtcgccccgcaagcctttcatcttgacctccgcgacggagacagaggagacaggcggcagcgacaggcgccaaacacgatcgcaggcagagctacctgagaagttcctcggcctccgagaagcgccgcgcctgctcgcagagtcgagcgtccgatgaacggcgagaccttcgagggagagaagaactctgggtctccacggctcgcgtccgagcaggtggctcgaaacgccggcgagaggagacgagaaggcggcagaacgcgactctccggccgattgtccggagaagcatacgaggctcgacgccagccggaaaaactcggtgacgaaggtggagaagcacgaagaaaaagtccgcgcgttcgtttcaagactgctgcgcgcgtgtgtgtgtgtgtggagctacctacagaagagaaaaacgaaacaccaggaggggcgaacagaagaagccggcaaagaacgaaacgagaagtcgagggtggacgggcggggcgggagaacgcagccaaaaagagcgcgctctcgggagctttcgaaaagccacgcgtttttgctcgaccaacaccgcagaaacgaaaagccgagagcgcgtcgggatcaagttgcctttttccgcgaaagagagagacggcgaacgatcacggcgagacacaaaggagacttcctgcttcctccgcagaatcgaaaaaaaccgccaatggacacgtggagacgaggaaagaaaattcttcctcgctctctctccggggagagacaaactgccgattcttttttcgtcggtgtacgctgaagacgcttcttccccgtcttcttcttttccctcaacttttctccgtctctctaagaagcgaaaacgcgacggttccgggagaagacgcccgcggaaaatctcgtgcgagcgcgaaaggtcggaaagcaagaaacgcgtgaaaaagtccgaacaaagctcgtttccacacaaccccttgctttctcgtgaaggaatctgtcttcctcttcttcgtctataagccgatcccgtgctgaaggggcaaggagagtggcgcccgaaaagccgctcacgcgctgcgagcggcgctctccgagatgagaaagtttggagagcgtgagagcggccgtcgcagagaagcagggaacaaacaagacttttctccggacaagagacggttcgaaactctgctgaaacgacgaccttccttttctggagctctcctccgtacatcctttcggagctgccgagacacacacgctcagactcataaaaccaccactgactgacactggcaccagttggtcagtcgcccgctcgggcgtctgtcttgaggacgagagtgcagaagagatgagagaggagagaacggaggaaaggaagggacaaaaagcgagcgagagagagagagacaaaatacaaacacaccgaattgtcgcaaacacactcgcagctcgacccccagggaccgcacaacgcactttttcacggcgcgaaaaagtcacggaaaggagggccgagaggaaagactgcagacgcgagcagaggagacaggatattgttttctctgtgccgcgacaggacaatggagagaaaagaatactctctctgggttctgccttcttttcctcttctgtattccggcttctctcgtatgtcggccagcgttcgtgtctcctctctgtccctggaaaactcagtctctgcagcacgcgtttcactggcaagtctccagatggtaccatacgtgaaaacgaaaaactcgacatgcggtttgacgcttcgtttctttcagtaggtcgcttgtctccttgcgcaatccagatccccttatcttcctgtcctctcccctctttttcccctctcccttctttctctcgtcgcctcgttagtcgcttggttctctgcttcctttctgctgtcagccggatcacacgctctgtctctccgtttagcgtctctcgttgcttcgtgttctttctgcgaattgcattttttcctggaactttcttctttcgcacctcgttcttgtctcgcatcgtcttctctgcgaaa

SEQ ID NO: 936 - DNA, 2727 bp, Toxoplasma gondii
  source 1..2727: mol_type = genomic DNA
aaacctctcaacgaagttgtctccgtccacggtgtctgcttcttcgcctcgcgtctcttcgtctgctgctctgactggctgtctcgccgcggcgttgtcttgcaggtctgcttcggccgtcgcgtctgcgccgtgacctctggagttcgccggcctctcggcgcgcgcggcctcggtgagagcggccttcttcccgcggcgcatgcaaaagtccagccatggctgcggcggccgctggccagtcacgaggtgtctgagctgcgagtcgaactgcgagagcgaaggtccaccgccagatgccaacgcggcgttcagcgtcgcgtcgcgctccgtcaacgtgcaaggcaggagtcgacgcactcctgcaaaaaactcggaaaagaaccgcgaagaatccggcgagaaagcagaagaggaagaagaagaggaagaagaggaagaggaagaagaggaagaagaagagagagaagaaaaccgcgcttcctccgggtgcggcttctggagagactcaggctcgccgacccggcagtcgacgacgtggatggaggtcagaggcagcggcccgaagaactgcggcacaaaccgagacggagaagaagcagaagaagccgaagaagcagaagaagaggcggcagagagaggcgcgcgctcgtcggcgagcgaggagagatgatccatcggccgggagctgttgggggtgacagtgaggaagggagtggagccgggcgccggcggcaggccggaaaatccgagggcgctccctgctggcgaaaacatctttttcaggaagacacgagcgagaggaagggagagagaggaaaggcaagaggccgagagaggagacgcggacgcaagaaaaaagatggtgaacagaggagggccgcgaggagaacgaaggaaggaatggagaagaaaggacaggagagaaggcagaaaaagagagaggagagagagcagaggagagaagaaagcagaggagaacaagaggagggcgagcgagaagaaaccagaagagaagagacgggaaagggggaagaagagagaagagcgagaaaaacagacgcacgaggaaagatcgacgcgcgtcttcgtctctgtgaaaggggaaggacgaagaagcgttgagcttgcgtcgcgtcttctctcttttctgccttggcagaattcagcaaagcagaaaaagcgaaggcatgtcgcgtctacgaccgcacaaacactctcaagcatcaaggcctccaaatctcttgccgattctcctcagctctggttcgctctctcttctccgtttccacctcgcaggccaacgcggcttcgcacaacttcgcttccttccacctccctctcggtgtttcgtctctcttcctgctttcgagttctttctcagatcctttcctcactggacgtcttcgcagctgtcttttcggaccaagacctctccttccatcgcagtgaggagggtgccgcccgatccacgaacaagtgactggcgacagatctccgcgccgcagagagaggagacgccgaaagaaagaggcagaaggaattgcggagactctcttagaatatcccttgggtctttcagagcggcgacttgagtacctttcacaaaaccttctgcgcgaaaaagcacaagcgccagctgtgcgctgtctaggtgcactggcgtcggcgtaaattcggaggcccgcgaaaaaaaaacagagtgcgaaaggaaggctcgcgcatgcagctgcaggcaggcggacaggagcttttttcggggatttatgacgatgcccttcctcctctgtgtgtctccacccgcacatcatcgcgcattcgccgagagagagacggggaggaagaaaggaatccgttcaaagaaccggattttgcaggcaagcacaagcgtccgcgtcctgcatttgagaggctctcaccgtcgctgcccaagcgaagagagcgcgaaagaaacgtcgtcttcgtcgacctcttggttcgagctcgacgagacgcgagatcaaacgaggtgtatgtacaccccacgtcgagggtcgctgtcattctccgtggttcgtacggacgctccaggcattgtctggcgccgcgttcgcgtcttggcccatcgcgaagtctttgcggtttctgtccaggcgcgagagtctctttcaagcgtgtggacggtctcctcgtctcgccctcgtctcctcatcttctcgtctctgtcttctctcagactcctctctggtctctcgttgtcccctcgttatctccgctgattctcccttttctcttcgtttggctctctgttcttctgtctgcgttcccccgtgtgtttctgctttctctccacctttgtgttcttgccttgaccaaaacaagcttcccggctctctcgcgtcgctgctttttccctcgtctctcttcttctttctcttctccgttctccctcactggtttgcgaaagacgcagccccctttccgccggccgcactcgcgaacgagtctctttctgctgaagagagacgaatgagaataggtttgtttttgtgagacagccttcagctcgcagcggagcagcttgtgcctgctccgcctggtccttcttcttccgttttttcttctccctcgtctgccctttctcctcgacccacgaacccactgtctcccccctccctcaactctgtctctgttctcgcttctgcttctcgtttgtcttctcctttgtccggctgtggcgttgcacca

SEQ ID NO: 937 - DNA, 1572 bp, Toxoplasma gondii
  source 1..1572: mol_type = genomic DNA
atttggttagtgaagaagggcaccggagtcccgattgaattcagtggcagcagaacggttgaggggctgcagaagtttgtttcggattacgcgagtgtgagcgggttgtttgatgttactcgggatgaactgtaaattgtttttaggatctggtcaagcagtcacggcgaagtatatgctattattttataggagcataagtggtgtttcccagaaggcatgcattatgtgtgggattgctgttgtcccctctttttgtacgttatatactgcgcgtgcggttcaaaagcatcgtttgttaagattctggttggtactaatcgcgtgtctttgcggggtcacatttatgtggtaacggcgtcagaatgattcagtcacctttcaaaagcaagaacttcagttgagccacagcggccggcactatgatgtggattgaagtttcatcatatcgatgtagctcgcgaggctgacgacggtatcaagaaattttagttgtctataaacattatcaatatttgggtatcctaccacggaatgcggtgtctgtggcaggaacttggatatatactaaggcatggcgcccagttcaagattgctacctaactcttccatggatagaaactggctcgctgccagaatgcttcatttttcgataactcacttaagattggccagcctcgcgcgagtgagtacatgtatccaaaactgtatcagtcgtcctccgttggcttccacatcggtggccagtagcataacttccacgttgtcactgatgcgaaaagctgccgcagtcgttcacagagctattgatagcgtcaagccacaaacttaaaagcaaatccacccgttgattcgaagcctcccgttgccaggcagcgtcttcttaccagtgctcgcaaatgataaaaacgaggtgcttctagatttgttcaactgtaactgacgggaagcaacacgcgaagcagaagcttcccaacacgtccgggtttcctctccttaagatattctctgttgtgtggtggcagttcactgcctcggaagtggcaggagcgagcctctctgtccagaaaacgaggcatgctgtaggttataatttagtagcttgtgcagccccgttcacagtatcgagagtggacatgaatgtggaaagcgtgacacaaacaacgaagttgccgtgagccggcggcaacagaaagaagtgttttgcccgtgcatcagctagttctatgaaggctagcgcaatttcgggtactaccattcccccctcgctggtatccaaacgggagggcctgaggttcaaacccaccagtttgttattggatggcttggttcaaaccaccatccttcctggcctttttccgcactgttcagttgcacaccacggaagtactcgtccagcaacagacagacagctaccgggtgcaccgggtgtctaaatcggcggtgtgccggcagcaaaaaccgtgaattagagaccgactccgtacccgaccggcccgtagttcgatgaccaagcttccgtccgcttgttcccagagcaaagaaaaactgtgagggtaagggggggcaaga

SEQ ID NO: 938 - DNA, 2525 bp, Toxoplasma gondii
  source 1..2525: mol_type = genomic DNA
tggactgcgtatttccacgtacttgagtatggagaaagtaatcaccgaacttcttgtaaaaaagccgttatccacctttgaaccgcaagatcaattccagctccgctacagcgttttccacacctttgtctcacaaaaaaacagggcaaaaattgttgtcttcctttgagtgcgaagatgcgtcagtttctgaagtaaagccacttcaattccgcaaatatcaaaaggtttccaggatggaaagaaaccggttttcaactgcacgctagatttcgcacttcctccacatatctctcagaaggtggtatcgccttcaactttggagggaaacaggtgctgagctcagcaatgagcattttcagattccgctcaacgacgtcaatgccaaacagccgcacaggtgcgccacacccacgcttgttttttttcgacaggggaatacctttgtatattcgtggctcggcggttagacaaagagttcttctctgaagggcccgcgatgagcacgtacgtcgttctgcagtgtgtagtgtgcatctcctatttccctttcacaatttcatccgcactttcgcgtcgaggtcccacggaggcgacttaaatccacgtggtgggcttttctgtttacttgcacgtccaagcatgttgccaggcaaatacgtttcaccgttatcggtgtttcgtggacatgatgataacgtaaagagtaagaagccaccggttggggattgccctaatcgtacgcaaagtttcctgtcgctatgcaaaacgctacggtacgaacggccacatggcacacggactgaactccagaccccagcaaccagtgccgcaagaaacacggggaacctcgtgcttacccggttgtccgggaaagaatctacttttctttggagcgcttcgagggacttcccgtcccagtacggtccagcggttccacttcttccacgacggttccctgcttcttggcactcacaggcctgtcgaggtaacgaaacggcattatccaaaaagcacggcaaacgaaaggcacctcgcggcaccagcttaacactgattgcctttcttacgaagcacaatggtccacccaaccaatacggtccagttgaatgggtacaacttccttgccgaaaaggtcacatgagtccggcgcaccttgctcacgtacgtgcgcggagtttgtacaaaggtttccttcttaaagagcggccttttttgccagcacactcatggctttcgactcgcccggtgggaagcgctggggttactcaatttcgagcgtttcctcttttggggggggagtgcgtccgtgtgtgatcttgttttgaggtgtatgtacacctaagctggttgcgagattctcgcagtttgcggagacatgctttttcgcgttgttctctggtaccacgagtagctggcgtatgcaacgagggaacaaccgtttctgggtcgttttttgtcttggcggttctcttcgtgtgacgcgtggcgcagagtttgtccgtttccgtttgtcaaaatttccgtttccgcgtccgcggtgtgggttcgagcaccgctgaccagcttgcgttttccaccgacgaaactgacacatgcggtgagccttgtttcgttctttgcgcgccgaagcgctcgctgctggtttcccgcgcctgtctggaagaagacgccgttctctctctgtggataccagacgccgttaacgctgctgccagacaacttgaaagtgtttttccgagagggcttttccgcagttccaaaacattccaccgtgtttctaccgttttgtcgggctttttcgcgtgcacgcatttccgtgggacaaccatcgtggcccctgctcgtcttccactcgccaccgtaaaagctaggtttccatcgcaccgtcagccaccgtcgaccgtccacccgccctccccccctggcgtggcccgtctcgcgactcactttcctcggaaccgagtcgcgattgtgtgcaacgaagagcgaattttctccatttccaacaaaaagtgtctcaacgaagcggagaaacatcgccacactactgttctccgccccattcttccgcatttccaacctgtataaaggtatccccttttctctgtcgcggatgtgtgtgtgttctagcctctgtgtatcggtatgcgatgtccaaaaagtagctgagtgcgttggcgtctgtgtgtgcgtttcctgttgtctcctttgtcctcggagtccctccttttgatcgtttccagattgtttcctcttggcgctcgccagcctccgttctgtcgcagactcaaaaccgccgtgtccacccgctgttggcggctacacacccgccacctttgtcttctatcggtgtacacacccccctcccacacttgcgtgcgttgcagagaacgcatttttttctttttccccgcttccccgcgtttctctcctcagtcccccttttcccagtgcccccggaagtcgctcgtgtgcccgtctcaactctggtgtgcctgtcgccttcccgccgagcaaaaaaa

SEQ ID NO: 939 - DNA, 1708 bp, Toxoplasma gondii
  source 1..1708: mol_type = genomic DNA
gagaaattagtgaggaactgtccagtgaaccacagaaagactctcaggaaaaagagaaaactacgcagctggtcgacggcgacaatctccctgatttcactagactgttgagcacagccgaaaggctttgttcttcacgaacagctgagtggattcttcttggcaatgtttctgagatgattttgggactgctcaagacgctggtcgcgtcgctggttccgcacacagacgagtggcaccggcggtcatgaagcattttgtttggtgtcgttgcttgcaattccatttgcaacgctcgcacatagtcgccctcagcgtttctctggctgactctccgtttccgcagtcgtcgtgcacctatctacgtagctagactttcgttcggaactcgaaggggacggaagtcttccaactctcgacttctcctgattgatcactctggtggcttctaaacagtgtctgaagatcgtccgcagaaagcgtggaggtctcggtcgatgcctcatgacggcgcgtcctgaagggaatccaaaaggcttcaccggcgcgttcggaagtgtttgcgaggcggcggtgtacgtacagctgtcaaacttggctttcttctctcagaagctgagcattacacacttttgttgcagcgcttgggctcttgcaggaaccacaagttccgttcaagtcgattgatgccatttctgttttctgagagccggagctgtcggttgatgtcaaccgcgcgaagacagatcgcacaccctaaccggccagcggtgtgcatgcagaacgccacggagaaaaggcacttgtctctctgactcccgattgaaaaaacacgcagcaagagcgaactatctttttgatcaaagggcttctctcgcgacgaggatgctccttctgtgcgcgaggagacgcggtgggaggcgccgcgtcgtctgcagtgtctctacacacacgagccgcttcgcaacgcagtcgcatcgtgagaaaagcaggacttccttggttctatctggcggacgtgagaaacgcgacttcgtctttgtggagagcaaagcaaaaaatctgcagtcgcatttccgcatgcctccgagagcgaagaagaggaggatttttcggtaaaggcgggcaggagagagacagcagtttctcctttgtcttgacgcgaggaggggagctcaccggtcgtctcccgagaaaactcgtgacattgcattttcctgatgcctttctgcccaattgacagtgtctgctttttcctcgtgagacgcgtgttttctttgcctctccctattcgctttgggctcctcttttcctccggttttctgtctgttgctgaaacatagctcgctggcggtccacggacttcctctgaagtggaagaaaactgtgagttcaactgaatttcgctctccgtttttctccctcatcctttgccagttcgttgtctctctcttctttttcaccttcgaaaactgctttcgccctcctcttccgtcttccccgtcttctgcttgcgtctcctcagaggcccgctgcgccttcactcccctcccttcgttcccctgtctccccgaccgtgaagtctttgatttcttttcgcttccttctccttacaaatgtcacattgccttgactgtgtgtgtcggttttctccttcgctcctttctttctcggtgcatttttctctatctttctctgactttccaga

SEQ ID NO: 940 - DNA, 2470 bp, Toxoplasma gondii
  source 1..2470: mol_type = genomic DNA
gagaacggacaaaaaggtgaagacatctgcacatcgattgtgcgtgtcggggctatcctgagcgtcttccacgctcttgtttatcagcttcctctccacccttctcggggtttgcatttctctccagagtttccgctcggcgcctcgtcgaagaaacggaagcgcgacagaaaggatggacggaaaggggccgagacggaagccgatgagagctccgtccatggcggatctttattcttttcagaggcacatctcgaacgccttctgttcttcgttatcgacgcggcgtatcgatgctcgacagttattcgaggcggcgaagagggaggccacaagaaggaggcaaggaccgactctctgctgcttcaactgctgagtaccgaacgaggtgaaggcgccttcgcagccgacgggggctcttccctcgcggcgctgtggcagggcctcgcctctttgtcgccgaaggaacagcaaagagaagtcctcacgggtggcatgttccttctcggcgaaattcaagaagtgcttaaagacgggggacgcgaggaactggccctcggcctcctggctaaagtgcgcacgtctgtgctgtcctgcaggttgaaacggaaggtcgacagccagcaacaggccttgctccagccgcagaaatacgcagagaagcgacgccggcaacaatgcaagaagaaactgtcaaaaaaaagaaaggtcgcgctcctcattgcgaaaaaccgaggcggaaaacgaagagagaaatcctgataagcagctaccggcacgactcctttgtttgcctttttcgaggtgtcctcttcttgttgaggaaagtcgggtttcctttgccgagcagtatgttttttgacgtgagtgttccgccgatggcctgattctctggacgtctattttttcttttgcagcgcagtggttctgatgtgagtgtacggataatattgacgcaccgtcgctgacgaaccgcctgtaacactctggaactgatgtctccagtatttgtagacagaaacgtcgctacgcaggttcccgtttgactccgtatccggaacagcaacgtgatttcggtattgctttgagaatattggattgaagtcccaaaatctactgttggccagggcatacacacaaacgtgcgcgtttcatcgtctcgaggcggagttattcctgtttcttgtgtctgacatcttcaaagcgtcaacccgctaatcactctcgtgttgagatagtttctgcaatatttagttgacatttttagtcgaatatttccaggaaccacaggttaccgcgacgaacggtagctgtcttcactgttaaatcaacactacctctcattaaccgtgggaaacacggcacaaacagagaagcgaagcaaatgaagtgacgtcacagcgttgcgcggctccatggcagcacatgtaaagcagcgacagaaattacaggctcccatattttgtggtatagttccgccgcttcgctggtttcgtcacgctttggaaatcatctttccgaaacttctgcccccgagtctggtgcatgccgagacatcagactgatgaaccgaattctctacgaaagagacaaaacgcgtacagaaacatatctggtcggggtcaaaggtgcagccctgcctttgtaaagaaaatgaaaacaccctctcggttttgagggtcacgaggtattccggagctctcccaaaaacccagtgacgttctgtcaggtgttaaaaaaagtcacctaatgagaattgtgatacgcaattaattgagcacacttcaagaatcccggagtaagcgttaagtggccaacatagactcttgcgggtgaaagaattcctctgcgttgccaaatgcttggggtaatgcccctgtggtgacctccatagagttggaacgaaggaaaagcaggctttcgtacacgccgtttccttgtccagggaaccggccgcagctacgcaactctttcgaccctgaagtgtcgagttattcctcatcatctctcaaggaagtcccccagctccgctagacacaggctgtctcggcctcagttacacaccgtgggtcaaggtttttcacctgcctaaacaaagttacaaggcatagctgccggggcacccgtgaaacgcagagtccaaaaaagtgaatcgcaaaaggctgactgatatttgaccgcgagaactcgcagtattcgctaccgtgtggagcctcgatatatctctggttcttcgagcaaatactccagcccggcactctccgaaactcttatgtacacttggaggtcaagtgccgcgactgaagacgtggttccattcattctgcagctacggttcctgactggcatcgctcggtttgtcgtccgactggcgggcgccattggaacgaggcgtcgcttgcaaaataacgcccccgcagcccggaacagctataacattaagagcacttttttcagcggggtccgccga

SEQ ID NO: 941 - DNA, 429 bp, Toxoplasma gondii
  source 1..429: mol_type = genomic DNA
ggcagtagagaagatgtgaaagggagaagatatgggagagagaagaggcgctggacaccggacgcacttttgcactgccttgcttttgtttttgttcttcagcccgaacgtcttgtcttcgacgattttctgcttttccctctcggcggccttctgcatgccgcgttcggccttcgcgtccttcttcttgggcggcattttgacaaagaaaacaaagagcgagaggtttcacagagaaacagctgtctactggtcagggggaagagtcctatgagagagaaggcagagtctacagggcgcctctcgtcttcggcggaacccggaaaaaacgtgaactgcttcagaaacgcagagagtggttcctagagggagttcgcgttggttgggtcgacgccagagagaagagagaaggaatttgaagagcgagaa

SEQ ID NO: 942 - DNA, 2329 bp, Toxoplasma gondii
  source 1..2329: mol_type = genomic DNA
gtaggctgttatgaaggacgacaaacaatgcaaagaagtaaaacaccgcgtccgccaagacccgtttgcaggtaaagagaagaaaggctgatagcgagatgttccttgaaagggtttacgacgagtgatttctagaaactatcgctacaactgccccatgtgtgtccttgtcttttggggcttctccatagacacaattaggaaatcgatacagactatgcgtctaggaagaggcacatgaaaggcagtgcatgaaagaaggaatatgagctttccgcgcatgcctatcgcgcggtagggacactctactgtagagctcagagctccacacaccttttcagggcaaaggatggccatctatacttggtcacaatgtacatcggccgcgtagtggaataacaatgtcgtaggatattgacatccaacacttttagctgtcataagcagtccattggggtggtggtgtaagcaatcagaaaaaaagtcagtgcatgtctatctgcaataggaaagacgcaactaagatctgcatcgtgcaatcacgactacccatatatatatatatatatatatatatataggcaaatgcatacatgaaaacatttgatgccatacgctctgcatgttgaagcaaggaagcgtccatcctctagttcgctcttctaatttttcaggtgggaacatatctcaggaaacaggggttccctccgcgagtcgcgtcgtagttccgcactcctcacaatcacaaccagttaaaaatagctacaggatacgaagatacacaagagagcgagaacaaaacaatggaaaagaagtgcgagatagtgaacaaaaacagcagggagcatagcagctgcaacgaatgatttcgggtagcaccggtgtgtgtctgtctcaagcacaagcacgtgtactttccctctatttcgtcctcccccgttgcgtgtctggatttctgtgtgtccgtatgtctttctcttctccgtccctctttgtacccccttgtctctcttgctatggtcaacgctggtgtcgcctgcgtcctgatcgcgtcctctgtcgctctcgggtgacagtttcggaggcgctgactctcctgctttccacctttcatcgttctgtgtctttgcctgtacatctttattcttctctgtttctccgggctactgacacgctttttctggggactacatactacgagttgcactcctggtttacatcttaacggcgtctgtttcccggctccaagttctactgtgcttttcatgaccatgttaagtgcattaagcatgattatatccagcttatcttcgagaacccaacatgtgtatacctgctgtacgaatatattcactcagttttcacctctacgcgcttttgtcttgtctcgttcgattactcaacatgcgctgttcgtgccgttcggttatcagagagactgccgcagttcgccccctctcgtggtacgagaggaagcatcgggcaagaagtatcgaactcgcggtaagaacaagcgaagacatacgcaaagaggggaaagcagacgaagataggaatgtccccgtcgtcgcacaagatgatgtgtgccgccgtccgacctcggacaaacagaaacacgaacgacatagacaaagcgagtccaaattcgcgtcttcgtgggagaggggaagagtgagctttgatgtactacacctctgaagggacagagccccatctagaatccgggggttctctgggataggctgaaagatgtcattggcacactcgcgagggcgaatggacgcgagttcgtctttgcgcatgcaggagcacgagaggcagagagttcggaccgacaagcatttttcccttttttccgccctcgcgtttgttcctttctctttttttccctggaacgtggttcgattccgtgctcattttcttctattttcaccaaagtaaaccccaaggacaggaagccacaactctctcgaatcgccgttggtcgacactcaacggggcaacgcgttttctgtttctcaccttcagttcgctggattcccccgcccagtttctcttctttcccttctcttccacgcttcctgtacggtttttctcggtctcagctcgttagttgcctccacgcacatggggtcgctctcctcgagcgccgcgcctctctttttttacgcgctctaccctctcgttttctgatcgagcgttgcctcttcccgagacctttctctggggagaggatacatcgtacgagttcgactcctcgttcaggtcttgaaggtcgtctgccctcgctcatatctgcttctcccctgagcgcgcctgctgaccacga

SEQ ID NO: 943 - DNA, 1262 bp, Toxoplasma gondii
  source 1..1262: mol_type = genomic DNA
aacgagatctaaagaggtggtcgtacgtgcgaaaactgcaaaagcagaaattaacggttgcgatgtcaactaggggtccagcggctccctgtcgggactcacgacatcaggaggatagtgtttttgaactactgttttgacgagcaagagcttctgacactctactgcctgccgtaaactctcgtcaccttgtcttcgtggctctcgagttgcactgtacatctggtgtagtcgcagtgtcaagctcagactataccaagctctttcaacgcctggtatttggctgcctcttgaggggtgtcgtggttatcttgcctgggctcgcaccaatagcaccagcgtctaatcctcccctcgtgtctgataacacatcattccaaaggatgtgtgctcgcatcacgtgtatttattgcagaccattcacatctgaaatcacaggtttcgatcatacagctgtcggtacatggcgattgcggatgattaaaccagcacaagagaccacttggatgcctgcgatacatgattcatttcgggatttctcgagacagggttgttcccagctgctttcgtcctctgcatagacgcagccaccacaccgacttctttcacctggcggttcattgctctgttgttagcttctgttcagggtaatctgaggtattccaccacctaaacagtggctctcagagctgaatacaaacactcaccacgattcagcagctagcaagtcacactgaaccagatggatggatgatcagccaaacaagacatctctctttcgccgcgttcgggtctgcctaaatgactgtgctgcatatgggaaccgtcgagaccatggggtcaacaaacacggagaggcggacattcttggacacgcgcgcggcgattctgttcagttttcactgtgaggttgacagccggcgaatggagaaacatcactgtcttcttgtgggtggcaagtgcgacgcgccgctattctgacttcgtctctactggcgccaagaagcaggcgctggctggtgtgctagctagaaccgtggccgtgtctcgtgatttcggctgcattccaggcagtcttagggccggccgcgcagcgggtagtcgaaataatgcttcgaaccaacgcgaaatgccgcgcgacgcagctgagaacaagcggcctccgcgggaaatgagtggtcggctggctacctacagttgaacagtcagagcagacaccccgccaacaggcacagacactgaacgtcagcagaacggcgata

SEQ ID NO: 944 - DNA, 1678 bp, Toxoplasma gondii
  source 1..1678: mol_type = genomic DNA
aactatatttctacagtggtattagctgcatctagtggcgatacagagcagtcgcggagagtgccgcaaagacgggtgcaaagatctcctggagggggggagcgtttctcttggacgaaacggcatcgcttctctttctcaccctccatgttctgccaagggcttgtatggctcggcctcttttcaacaacggcagaactgtgaggctgttacttgtaggaagagtttgaaatgcttcagatgcatatcttttagctgtagggccgtgtgggctggaattactttcaacaccgtgcacacctggtgatggttcaccattgttcgacaagtgggcgtctgcgaggtagagggacccgcctatgtaaagctttttctcagaagcaattttacattgctaggcagtttgcatgttcaaataagacgacagcggagaggggcgactcgctgcacacaaccgtgcagatcttcacaggtgtctctgctcagtaactgagaaacgataacagtcgtgcgcttctgattggaagtgactcgtcttgagcggcatgcctcaagattcaataatgaaatccgagtcccctttaggaccgggggtgaacgcgagcaaaggtgaatcagtcgagtggtcgtggcaattgcaattatgtaaactcgagaaaatatggcatcggagaatacatgtgaacgggggcagatccaggagtcgctgcttctcgaaaagaacaacagcaaagagctcttgacagtactgagcataacgtcggattcaagcgaagttgcgtgttcacaaacaaacctcctgaccgcttcaacccaacaatacatgggcacaagtactcacaaccatgcaggttgtcatttacatatatatgtatatatgtatatatatatatatatatgtgaatgacaacctgcatatggtggtggtagcgtctgcgtgcggtggcattcgatattgaaaaggtggaattaaggtcttccactggctcttctgaagacgatgcacgtttcactagctacagagacgacagattctggcggtgaattctgcgtgtcctcgtttttggttcccgtaaagtaaaaagcagcgaagcggcaacagtccacagcaaatgtcctgcccgccaagagatgcagatgtcgtcggccttgagttccgcaaagcatttcaagcgtctgtttctcctcgtttgcaatgaagcaagtctttaattggagatgtgttctgttaagtcctgcaggacttctgcgcggaaatacacgcaaagatggatgggcattgatggcatggggagaaatgggagatttgaggagcgaacgttttgtaattgagtcacaagtgtccatccgtctgttgaggttcctggaaatcgctcttgtcttggagtcgaggtggctcaagaatacatcttgtttaccacgcagtatcttctcaggtttcttgtctccttcaaataaaacaaaggcaaacgacacgaaatttcgacgcgcgaacttcggctcccgcctcgagtcgaatatgaactctttcccgtgagcataaatcaccctttttttgctccggtttgttcgtttttcccgtcaccaagggacaaagagactcttctgaagtgacctaatgccttttgtctccctgcctttgtctccatcctcgcgttctcctcaaaggctcttaaaa

SEQ ID NO: 945 - DNA, 2771 bp, Toxoplasma gondii
  source 1..2771: mol_type = genomic DNA
tagatgcacacgatttgtttctacaaacattcgcgccaagacctgcgtaaaacctggaaatgagaattgcgttgtcggcattttcccggtcgattcctgcgtgggcaggagtgtgccgtcgattttcaaccttgtttcaaggacgcttgcatcttctgtagtcatgtactgcgtcttcttcgctttccatattcaaggggagcgagtggtgggggagggaggggcgcttctgtagtacttagcaagcggtggtgtcgaaagagacaactgcacttgtgtgtgtttttgccgagcttgctgtaaggaattccgtcggcacacctgctggacaggcggtccagcttatctgaaagctaatcaatattaattttgatgtggaggcactttttcccttacaacacagctgggtacgtgtggaaggggaatgtctaacggcgccgtgtgtctgaaataaatagcacagtcaggttaacttaattaggggtcggtgtgctctgatgtcttgactggaactttcccatgcgacgcacaagcatacacggtctactcctacgataactggagatcagagcccgctcgttcagctatatgcggtatcggcctgcctcggttttgcacgcgtagagaggctgaagcctcctcgctggctcgctgcactctgatggacgcgacgaatgatatgggctacagtcgaggttctagcacctgaatctcgaaatcctgaggtccaacaaccgcacatgtatccgcaactgtgcactgtcacgtgcctgagaacgctcgaaacagctgccaggtgaccaggaatcctcactagcgacacatgtccacgagtgcctcacgattggagacacaaactggcatctccgttgtgacgaagccctttcggacaagacccccctggtgcatccaggcgtcgacactctttcgcggcgccgatacgacacatgttatctcagaaataaccacaactgtttccggagtgtcataacaagattcgttctttcctttcatcacatattgggtttaggaatttgatatcctctcttggcaggcaccgagatctgcttctgggggcatatctctttgcgaacaagggatacggatgtaccaatcggcaaacaatgactccaaaaaggtacagagtgacgcttcgcggttgttgctgcgcacgtcactgaacacgccggtttccactctattccgtttctcgtctattaatggtggcgcaggatcgtatgagttcgtcctctaccttgggaaagaagaagtgaaagcctgtgcgttttcaccgtttcccccaaaatgaatactcctcagtacgacgcaagcgacagtagcgatagcataacgtttctagtaggaattccgcacatgaagtcgcgtgcaccaacaatcttgtccccccctgagaatgctccacgacattcagagttaactttcgtgctcacacttcccgctgcagccgagcggtgtgcatccatagtgtcggagtttcctcttgcataagcacgctgtcagttaaatccgccaacgacagaatggcaaacgctactagggaagtgtaatgatacgtttctgaagagctgctcattctaggttgtgtgccacagctatgcaacacggagacaggcccaccgatttgtcgagcccgaatcgatttctgtctgaaataggatgagtgtgtgtcgatatccggacagagagaaaatggtgtggtggtgcgacagtgtcatccaagtcttctacaagtgccttccaccggactgcctctgagaccagctgtgaataaggggcatggtgaggggagacagacctgaatcgtcgtgaacggcttggcgggtccgcaagcgacaagacacgaaggtgcccccgctcttgcgcccgtttatttgcccgttacattctttgcccagatcctcaacactcgatgcctttttttacgcagtgtttgtccgacggcaaatttgttctaacttctgaactatcgttttggcctgagcgggcaatcgaagcggtatcagtgctttttacaacgcctcaacgaatctaccgatcggtttgctgcacgtcatgatggggcttacggacggcaagtgcaccactttttccagcagtcgccgtatttcaaggtttggattcagttgtagagcgtctctggtttgcctcatgttgtttctttgcgttgctgcagtcgacgatgcaggcatgtaccgacatggatccttccttgttctcggggtatgggcaggagccgggctgcccgctgggttggctacccgcgaaactggacacagtatttatcacggggaggatgataatgtcactgtttgcacgtgcgtagagatcatgggtgaaaataggcagcgtgctggataatctgaagaagcacctgtcgtatctatcaaaacggccgatctggtattttctggacaaacgaacaagttgacactcatttgcgagggggcgcatgttccggacagcagtaagaatggaacagacaaagtgtgtcatcgtggtgcagatattgataaatgcacagaaggcgcttcgatacccgaacgtgtcaattagcatccagcagctgcttaccggagaaaagcctgaatcagtttaatggctctcaaacccagaccacgataacaccaagtcatattccctaacaattcctggtaacattcttcttctcaccgacaaggccttctccgtcggatgcttgaacaaggacagcacttcgaaagcggcatgtaaagtgatagttactctggaca

SEQ ID NO: 946 - DNA, 1838 bp, Toxoplasma gondii
  source 1..1838: mol_type = genomic DNA
agaagtcgtctataccatagtaccctaattttcatgtcataaggcgtgtacctgcttcgtccgaccagcacgactccttttgctggacttgaagatgctccatttgttctgtaacttccttcactgttggtacagacgcggtagtcattgctttgggggccgtcccaagagaagcagcaggagcctgggctgccggacaagaaagcgcccgggcagggtcctcgcttgcaggtggtggaggtggtggcgcggaggatacgccgcctggagtcacaacacggacaaaaggtatcgttcgatataatactggattcgacaatcgattgagttttttctcatcatccaaagtcgaatcagcgtcgattaaggcgtcggctcgtgaccacggaatcctggccttttgcaatgcggcacatgtgcacaaacacgctcaccgctggtttcgagcaagactcccttgcacatgtaaccactattcaatgcatgtaaaccaattagattgtcggcctactcattttagcactgacaagggccctcttgctcttcagcaaggtgtctcgtgtcaacacggatactgttgcggtgagactggcgcagcaaccagtcctcggcagcatgggtgtctcaacttggctccagtttaaccacgtttcccgtcggcagagaaacactcaatcaacaagtggtacgactatactcatgttccaattgtaccgggctgcagccgaagcctgatggggcagacgccgttcacgcggtcgcaacctaccaggcacgaagacactggcgttcggattgaagacaaaccccgacatggcgacgtgggacgaagaggcaaaggcagaactaagcactatacacaaatcgtccttccgaaaagaaccgagtccttgttgagaatctagatgagggtgcaagtcgtggggggtgacggaagaacgaatataccctgctcaccccaagaaagaaatcgaacaaccgaaacaagactttttccttaaatggaacctttggcacaactgttggaaagacagcaaaattaaggacgtggtcagtcggttcgtttcgtcacggtgcatgccacacgtacgcggcgcggccaggataccgctgcaaggagaagcacagtacgtcgtcctgcacacgtcaacacagttacgcaaggcaagaaacaacgaaagttcatatcgctattgaaaccctccaaaacctcgtgagtcaaactgcagccagtgtgaaccagcgcaccgaatcaatatgccatcgtccagaaaacaaccaccagcgtacgatgccgtggcatgggacatttggaaatcgcatattgcatgcaggaccctctgcgttctctggttgagcggggaaatcttctatcgttatccgaaagcgggaaagggcagactttctcttttgacaaagaaccatccgtaattcgaattcccttggtcacattcccggaggtatgtggaaattaagtccgcctggctggatgggccggtaggggcgccaccgacgccgcagaattcagaagcgcttgaatcttacacagtatgtacattggctgtcaatacctttgccatgtaacacgttagattcgtatctttttggcgttgggagtctatcaagcgtggaagaccagtcaatattgccactctatgcagctcgtaacaaaggctggtcagtcttgcccaggcacaagtattgtcgactggtgtacatacagtaagcggaatggcagttctgtcttggtagtatggcttaaacatcagagcttatccgcatccgcttggtcttttctgaaattaaaagccttagtcaccagccgcttaggttcaaaa

SEQ ID NO: 947 - DNA, 1932 bp, Toxoplasma gondii
  source 1..1932: mol_type = genomic DNA
agccgcctatgagcaaactgctaaatattgaagttctcgagagtgccgacatctggaatttggaacggcaatggagagtagttctgtcccccgtagtgtgactgcccgagtctcttgttgtacgtgtgggccacaagtcgccactcttctatgtgttgtcatttattttctatgaggacaggagttcaggcatgcccttacaagaaatagttgtgaacacaacggacgtccacgagatagcaagtagctcactttcttgggtcttttgttttgccacatttagcctcccgccgcactttgaatcgagttccaggtgtttcctacagaaccattccggaccacagtgatttgactgaggttggctgacaatgaaggggacgaaacactttatttggtctgaatcaatacattttttgctgtgtgtcccttgatgcccgagacacgctataggaaactccctgagttcacccgaagtggacctcacggtcagccgaaaagacaccttgtttctcgagtgcgggtatagattcatcaccttcaccactgcggaatggaaatttgtagcgggaaacaacaaagcatggggtcgtaacatcctctacaggccaggcaactctcatcagtcgctgttcgcgctgagtgttcacggttttcctaagtgttactatgagacaagatggcccatgaggtccgccatccgctcatgtcttttgttttattttggcggtgttcactgttcgagggtcactgaagcgtgtggtacactgcactcagacatctaacgctagtccgtggcttttatggcagcccactcaggcacatcgacttcgtcaggagaaatcggtttaacgttggaaaaagttgaaaatcctgccctataagaccctcctgtgagtgttgtgagctacaaacgtgtcgcccagagtcctccaagaagcatcctcatttcacggtcatgctgttttgcaacgagacatgcgctacacagagtgaattgttagagctgggggggatcctcaggcaaaagttgttcacaagttttacgatagaacgactttatgaccaaacatacatgaaacggctgaataatcctgtgttgtccacgcggagaggtttatcgctgaaagagacccttcaactcaaattgcgggcttttttactgcgtcggcatgccagcggtcgcatttcttcaatattgcatgcagcggaccccgctgccacgggtgaaccgcgtcgcgtttgcatgcttttgagccgagagacagacggatataatgaatttgcacacgccagagtacagcaagtgaaccaactacgtactgcatcataatacaagcaatagaacatctagttttttggtttgacgcagcacaccctcgtcgcaccagattcccgtcgcttgtgtgtacgatgtgaaatcgtcagttgctttcgagacggattgccgccgcttggacgtcattgatctttttctgtgccgtgggtggaataggctgttgtgtcggtgtacagcctagagaaagtgtcgagttaattttgatcatcgactcgggacggcgtcgttcaaagggagaaatcgggaccctgaaggctctgaattgtggtgaatgttagcagtactaaaggcactgtggctcgcctgcctgatacggtagtatctcttgcaggcactgtcctgacccaaaggattctgaatagcagcagcttctttcagccatcgtcccgaactgcccaccgagcctgcagccgcatcaatccgctttctgccatccgcgggttgtgtgcttcggaggcgccaacagagcagccccggttgacgaggtttcaatcaagtcgaatactcgcattcagtaggtctaatttcaggtgcaagcttcctatgggctaccggccctgttgacgccgacttttggatcaccatcacgaccaaaa

SEQ ID NO: 948 - DNA, 2660 bp, Toxoplasma gondii
  source 1..2660: mol_type = genomic DNA
aacagccgaaccttgaacaaaaatggcaaagttccaggccggaagtagcggaacgtcagtgaaggggggggggggaaatggtgactacaggtcaagaaaccgaacaatgaaggatgaggctgcagcggcgattgccgcatcagttcgaaatggcatgggaggaattggagagggtaaatcaagaaatcagatatggtcacagccgaaggcaagttctttttttgatgccacgcagcctgtgcctctgtgtggactgtgtgactttgatttcttgtgtatggcaagtttgttccgctagtgtgttcttttgtcaagtacaacgctccctcagcagcgacagaaaccaggcagcctgccttttgttagagcatttgctttctctatcgacagccggttctacttacaccagccgacgcaattgcccgagcctgtcagggtgtgcttgtcacgtgtgtggtattttaccccaataccaaatccatattcgtgaatagagaagacataatgatgtacgcactcagtcaaacgagcagtcgcgagcaaaacgctctttttttgtctgtgcggggcgattaggaaaacgaggtgactcattctgtgttgtgtcctcttttttctttttgaattatgattttttccatatggggcacgctgtcccgtacttctggaagtccgaccgagtcggctgctgtacgcacagtttcttgattcaaagatggcgcatgaaacgagattatttgcccttctcgagcaaaacgcctgccccatcctgactgagtaatccaggtgctctgctattttaaaatttagaagcttctgtgcccagcggtcagtgggctggtcatccacccgccgctgcgcgaactgtagacggctttcaggttgcctctcgaaaagcctatcaatctcaaactccatgttgtccggtgcgtttttcgtgaagagaccaggtagctcttacccccactagcatcgtacgctgacttcagcgtaggtacggcagtatcagcagcttcgttagacctactcagtgcgtctctcatcaggaacgaattcgctactcatgcgtttcaggttagatttaaggttgttcgtaaaataaaggaaaccacctgttaacgccccgccgtttgcaacttagaaccgagtttgctgtaaagaagaccgggtggttttgctcagtgggctggtgcgcggaacacgcacggcagttgatgtttgctgagaaaaacaatccgtcttcctagtggtgtccccagttcgtgatcggccgttgcactgtcgcgtcgaaagcctcgacaaaaagacacaggcagaaagacataccagcggacgaggataacagcgttgaaaaaaaatgtggcgcgcaacggcacatgcattggagaggcgcgacaggcggccgagcagacgagaggaacagtcggtgaaaatgttagaaagggggacgttcgtgtgtgacaagaagcctgcaaacagtgacgcttccttgacattttcgaaaaccctgcacgagcgcagaagagctttttaccgtgcagcggcgagtccccccccccaaggctaacggagcgacatgggtttttttccaccgcttttttctgcacacttcgcccctcccgagggcccccatttttgaaacaaaaactgcggtcgtggcttctgttagcgaaaacgaacttcattgaagaagtgatttctctggaaccggttcgcgagtccgccgcttgttttgttactgtggtggtgcactcgggccccgtgtatcctgacgctgttgtcaccctccatgccacgcatgtttgaagcagtgcacaccacataaacgcagagtcaaaacgaggatctgcttctgctttcgtggcccgacggtcctcctttcttctctgccttcgttgtttctttcccaattcctcgtctttcgttcctttcgttttccgacgcgaccgtcttccccccagctgaacgcaagaccagcgccactcccagcacgctctgcccccctcccccctcctctacgcagactctgcagctgccccccgcttttgtgtcgattctcccgacgtcaagcagattttttctcattcggtggatgttttcttccttttctccatattgctttgtttcgttctcagcggtttcccccaaactcttccttcgctttgtgggtgtggacccccaggtttaacggaggtctgccagctgcgttccactctgggaagctcgggtgtctgtacacgcgaagaactggatttctgctcctggggaaagagtcggatgcaagtgaagaaaccacttgtttccttccgcaattgttgcatgctttgagtccccacagaccgcgtttttcttttcgttgcgcttcaacgccttcgcaacgcggatagtgtgacagcgtgcccccttctgtgtcacacactcggtccagcagacaccagggtcgatctgcggccgatccaggttccgttttttcctcttcgtcgtttcctccgcatttcctctctgcggtctttcgtctccaagctgcggcctcttggccctttgcctgccttctctgtacaaattaaagacccgcttttcgtccttttctcctcctgcccagccgtgtccgtgtcgcgtcgccgccgtctgtcgagaccctccctccctccttgttacca

SEQ ID NO: 949 - DNA, 4822 bp, Toxoplasma gondii
  source 1..4822: mol_type = genomic DNA
tcagactgcacttcgagtcctgtactcgacgacggctcggcaaccacaggggaagcgatgttcagagagttgttatccgctgagttgtcttcgtcgagaatgccgaacgtcctccgaaggaaatcttcgtcttcgcgccgccagacggcttcacagcgctgggcaggcgcagaggcgagcgcgagaggagagggcagcaggggaaaggagaaggcgtcttgcgtaggctcttctttcagacgggtggaagaagcctcggagaagggaggagaggcaaaagagagccgcgagctctcgacggaggggaggtcctctgtctcctcgtcgtccgaggtccagaagtccgagtcgttgccgtacagatgcctcgccgccgcagccatcgtggcaaacaacgagagacgaggggagcagggagaaagaaaggcaggtcgtccgaggacggagacggcggcaggggagtgcaggagaggagagggaaaaggcagatgcagaagagagggagaagaactggagagccagagagaggcgtaaaagagcaagagagaaagcgtagaggtaccagaaggggaagaacgaagaacgggcggtggacgcggagagatgcgagcaaaagcgggggagacaagtcgacagaggagaacagcgagaatgttcgagagaggcaaaagcagggcggcaaggaaacgaaagaagagagaaatcaaaggtgtcagtgaagaagacggtcgagcgcagcaggatgtctggcgttgagaagaggaaagcgaaacgcggaagtgtatcgattttctacacggtcggtgcatgcagcagggaagacaagagaagttcttccgtgtaattctttgcagaaaccaagagaggtctggagtctccactccctctcagtgcgtggagacaaggcgagaaagcctgagcggctgcgcttctctaaatgaggaaaaaagtcgtttcacatgcgttccgagaaaagggggaaacgcagaacgagacaccgtcgccagcagcgtccccccatcgaagcgcgatatcagaagaaaggaaagaaccttttgcgtaggatttgcgtcgaaaaatgcaagaaaagctgattcgggtgttcacatgccggccgtctatcaaactcgaaatgcatgcgacaagacaagcagacgctcgcgaaaaatgccgcatgcatttttagagcagggaaaaaaaagggtgtgtaagcgaacatgtttttgcagtggaaaaagagtgcctttgccaaccctccatttcctgcttctcgagagacttggagctcttcagttccactcttgttcgcctccatttgtcctccatgttcttcgcgttgccctcttgcgcctctggcgtcctgcaagaaaacatcattgacgcgcaaccacgaggtatttcttttttcttccaggcgctgcaccgcagggcagtgaagtactcgaggcagcgaagtgctcgaggcagcgaagagtttcggagctcctcagcttgaggcgttaagagtgatctttgcgccacagatgattgctcgctcatgtcttcctctaccgtactgtccgctgtgtgacggtgtctgtgtacaaagaaatcccaaactcaaacacagagaaaaacagaagcaactgcgtctcagtgtcacaggggacggctgaaattcgtgtataatccggtcgcagcagtaacgagtcgaagatcgggcaaggaaatcctacgtaaatgcgtatgtgaagaggcttgcacatatacgcatccgcacagatagggatttcgattctgtaaagtgtctgtccgtctcccaactgaagagagacaaaacgacagacgcagagagacaccgcaaagaggagagggctgtctcgagagagaaggataagcgtatatacacatagggatagctcgatatttaaggagcacacaaaaacgaaagttcgcggatcgctaaataataatacaaacatgcatacatacctgttcaaggaagtgtgatgcctgtaagagatgatgcagcagctttgcagcctcgcttctaccacttgacctggatgttgtgcactggagaacgcctttcctgtaaatcagggaaactgtgcgtctttctccttggcctccgcacaagaaatgcataccgatgatgaacttgatgcaaaagaacctctggaaaagtaacaccctgcaatgaagcaactcgagcaaacgacagcgaccgacccaaagtctcgagccatttccatctctatcgacgtaaatatgtcgatctctatgcctaaatgtctgtatctgtgtatgtggttgtttgttcaagtttaatgcgcacatcgataaacgtctggcgcatgcagataaatgcagacatatatttcggtgagaagcaagctaaggactttccccaatcagacaagtggaacagctctcgttgcgtttcgcccacgctgacactccgacatgggtgatacggggaacttcttgtttggtcgtggtgtacggcaggaagaagaggcgagttcttggcatatttcccggataaacgagtttcgaaaggccttgccgcgcgagaaggcaattcggtcaagtctcaaaacgtagaagcggttcttttcccgggggtctgtctgtcatgctcccagagacatctccggtcgagtcctagacagcctgggctggtttctcaccatctgagattccacaacttttccgaggcaaagcaaattcctttttttcggggcagatccgacatctccgggctgtatgcggaattccagctgcctgacgcgcctagaacatgtctgtttgacgacgcaagtgtctgaccaagtttctcggccaatcttttcgacgttccgcttttggagagattgtacgaaatcggcatgtgtgtttcgaatgagggtagtcattctacgagagtcggtcgtctgtctgaggctttcttcgactcttctttccagccatcgcgcgggaatgcaaacgaaatctgaatctgatcttccctttctattattgatggcgtttgctttcacgttttcgcgtttcccaagaaggcagacgaaacgcgtatttgtcattcatttcaagttgttgtggcttctgcatatttcgctttgaagttggagaacccccagtcgacgttcctttcccccgttttcttcttcttttgacaagcaggacggccgttcttcccgtcgttctgctgcggccgcacggctcgctcgctctctttggcctcggcgccggcagctcgcgcgatatttttggaaggcgtttctctatcagggacgggcagagccaggaaaaaatagaaggcagagctccgttaacagaaaggcgcttttgagtcaggaaggaagaatcgaagcaggcgaaccgcgcggttcttgtctggagatgacttttctgcttgagggtcgagcgctttttttgtctcttcgcgggggtcttcacgtcgcgcccgcctcgacccgccggcggcccgggaagaagcgcgggagacgaaggccgtctgtttgcgtcttgaggaaacactgtgtcacagccgtgttttttctgaaggtttgccaaggcggagagcgaaacgaaatcgcctacgtttttccagaaaattcaaagttgtcacagacgtttctcacctcgcgagactcccgttgattgggaccgagtccccgtccgcgtcgggagatttccagagttgacccgctgcgttcgcgtctggcgtacttttaccatttgaaaacatacgaggaaggctacgcgccagtcggcgtcttcaggccgaagtcgaggtatctctcgccgcacaaattcggagaaaacttttggacggtcccgggcttcggaaaagcggaagcgaaaaagttgtgcgttcgatccggttgagcgaaccccgtgtgaggccggaaatcgcaattttttcgtctaagtgtggacggactgaactctgagtcctttccttccgtttgtcactcgttttcacctttttccttggaaagagacaccacgttggtggactcctgtctcttcgtcccagaggagacttcgagaacagacgctccagcgcttggttgacgagagtctctccctcggagacgccgtcgtctggtcagttccgtttcgtctgcttcatggaaaagtctcctggcccttctgtttcgagccaagcaacgttcgggacgagacattgacctgcgtttcctcaggcgctttctgcctggcgctcctcgcgaacagagtgcctcgaagaggtctcgatctttctcgactggtggggtggcttgcaacttcgtctgccaatatttggtcgttcttcacggattctcctctactttcttcgttctttccacgcatgaacctcgcagttcaccgcggaggatgtgtctttttcgcgaaactcacttcggaacggttcgtttgttgcgcggccaggcaaacgcgtttcccgagacgctcgctttatctcttgtttctcgctcgcgtcggcttcgtagccttccaaaggaactctcagtgaggacatgattcctaaactgcagtcaacaaaagcctccccgcctcgctgcgtcccttcaacaaagtcacctccgacgcccgtcgactgtcgcagcgcgctttgtcttccgctccgtgacgttttttcacttccaaagcgttgacgtccagcctgcgttgcgccttctgcccctcgaaggtcgagcgcccagctggacggcctctccgcgggggattcgacgcagagaagcaagttgtccccaagtgacattctacgcttcgcccgcgtacggttttgtgtccgctcttcaaggtcttccgctcgcacaccgctcgaaaa

SEQ ID NO: 950 - DNA, 2987 bp, Toxoplasma gondii
  source 1..2987: mol_type = genomic DNA
tgaaaacggaccttcctctcgcatcttcttcgcgggtgacgatggagcagaagaagaagcagagaaaggagaggaagaagaagaggaagagttagaggacgaggaagaagacgagaaagaagacgaggaagaagaagagttagaagaggaagaagagttagaagaagaggaagaagacgaggacgaggccatttcggggtggtgtctgtttcttcgtgaggtgttggacgtttttggagagggagaagagaggtcgatgaaaggatcggaggtaacgcttgttctgaattgtctcttctcctttctgttgccttcgctccaatccatttcttcgatgtctcctcctccgccgacgacttcgtcgccgtcgatccagagcacatctccatctccgtcttcgttctctctcccaggtcccggagacgcaggagaggaacgcgtcagcgaggaactagaagaaagaagagagcgtttgggagcagtcccgcaggcctctgaggagcctcgcgaggcggcgggacacagtggcatcttgcggagttggcctgaggagtgcacaggaaggcgagacggggatacgtttgggagcgtcagagggagagactgaagacggtagcgagcctgaacagacgacgtcttctccgcgcggctcttccggactcacgcaggcgcacctggcaacccagagcaaggagacgagaggagacgcagagttccgttcaatgcgtggagagaaagaacgacggagagagaagagagaaaagacagagaagacagagaagacagagaagacagagaagacatgagggaagcggggagggcggaggccgagggagatgggagacgagagcggagagaaaaacgacggctgaaaaggatcggcggaaaggcaggaagaagaagagaaacaagggaggaaaaggaagaaggagagagcggagaaggagagagcggactgggtgtgtgtctcctcgttgctcctccagggagagggaagacgcgagaaaagaagaactcgtcgacttggtgcttcgtccaagaatatctttccctggacacaggaaacagatgcgtcttcggtgtcggataagacttgtttctttcgagaaaaaagaattctctccagtcttccaccgcgcgtccactggatggcgagtagggaagacacaccggcgccggccgcgaggcaggaacccccctcgaggaagatgaaaccttttcaaggcatttttttccttcctttccgcgcttttttggatgcgtttttttctcacgatgaaggaagtggaaaccgaggagaaaggcgaacatgaagaaaaaagaaaacggaactccgcttctctagcgcatgagaggagcaaagaggggggcaccaccacagaaaaacgaaccgctcagcgaaagtcgcacgagctgaagacacaactttcgttctctcaatccctctcctggaatctctctcccttcctcaccctcctgcaatccttcgccttcttcctcacgcctttaccttctcgccttcaccttctcgccttttccttctcgccttttccctctcgccttttccctctcgccttgttcctctctcttgttcttggactggttgtcgtactggttctggttctctcctgtctctctcgcgcgctttacaggaaaaggctttccagtctcctctctctgtcttgccactgcttccctcgtgtgctctgtctcccccgtggagattcttgtggggtcgggtgtttctcgcgcctccaagtttaaggcgaggcctcaggggttctccgtatataagccgaatccggcgtcgtcaggccaaccgggaggagtcgtcccagggacgcgacggtacgcgcgaggcagcagctaagcttgcctggatctctttttccgttcctgctccttctctctctctctgtctctctctttgtctctctctctttgtctctctctctttttctctctttgtctttgtctctctttgtctttgtctctctttgtctgtgtgcgtgtgtgtgtgtgatcgcatgtttctctctgaatctgcatagaggtggagagatctgcgaaacgctgtgaattggacgcgactttgctttttcatgccgctgaatcgaggcagggacgtcgcccgcaggctacgggagagaagtccttctggcattttcgcatgcgcatggcggtcgggggttctgcacatcgcgcgcgtcctccccgagaccctggaatgaaaggtgctcttctctgtttcgcttttttaactgttccttttgttttccactccgattttttgcacttttaatgtccgccgtcgccgtctgtgggcctccaggacattctcctcgtcgcagtcggggaccgttggctggtttttcgtaccgccgaccggggagtttcctgtcgctctcctccccgttttccgttcctctttccctctctcttcttgtccaggttttccgttttctctctctcttctccgttcaaacgcttttccgtgtgactcgcgttttgtctctccgtccctccgaccaaaaacgtaccaatcccctgtccagttcagcaccgcccccgcctgcgtctcgcgtgtcttcagggtttttgacttttctttgcgcggccttgtctctgtgggtgtttgttcctctccgttctcttctctggggtcctcacgctggaaacgagaagctgcaagccatagtttcaacgcaactgcccagtcgtcttctccgttcttcaaacagttcgaggaagctcgaaacccacagcaaacgcctatctgcgcttcgcactgtcggctccttcttctcgtctctctccccaacaaaacgcgtctctctcctcgtctctccttccctctctccccctatattctccctttcaccctcccccccctgttctgccgcttcgctgggcttggccttctccctcccgatttgagagtttccgccagcttcccctcacttttttttctcattttttcggaagaa

SEQ ID NO: 951 - DNA, 3837 bp, Toxoplasma gondii
  source 1..3837: mol_type = genomic DNA
acacaatagtcagcttgcaatcgttgaccgatgctacagcaggcgccagaggtattcccgcttgcctccgttgtttgatatttgcagggaagtgtaatgcagttttttaagactgagggaactcctgaacgagtgaggccactgttaccgtctcgctccagctgtaggattccgaccttctccgctgcgtacgaggcattccgacactgtgacaccaacgtgaccacggtccgtgttaccaaggcgggagtctctggtggttttgttcggatttccaaacaaataaattaaaccactaattggaccagtgctctgagcatcgcttcacatggaagtcacgtgatctttccctgaatgtggcgtagctcattggcttcgcgtctgaggtggaaagtggaatactgttgcaaaaacagcaggaaaagcaacagaatccaaccatagaatcaaagtttcaactgggccccaacttccccatcccccgacgtcaaaaagttccgggaccgaaagagctcgtgtggaagcaaaactgtccttgaatgctgggtcacgaggctcctgtatgaagcatcgacccggttctgcttgagaaacgtgctgtttcagcgctctgctttgtaccgacagcatcttacttttctttccggaagcttgccccctcattgtccgcaggggtcgtcaggaaagctctccttcctggaaaatgtctgctagcgccggctgcccaattcctacagtgatacgtttcctgtaacacctttggagaaccaagtatcaatggtgcgaaactctcagtaccggctgctcttctttaatagttttatttcgaggaagtgtcgtgttcttctccttcctctgctgaacagaggttctgcatcattgtgtcacagcttacacagtttcgactgcggaggggggaacactgcatcaaagtcgacctcgctgtcccgggtggtattctcgtggcagcaggttgagtgaatgcgtgggctagttgccacaaggatatatgcaagtggaatgccgtctgcctcctgtccaagtgagggagaggcactataaagcaggaggggaggcgattatgttggacatcaggcatgactcacccgccgttttttgcctctgctctgcctaccttcctgggatctctgtgacatgcttccctcaggaattcgtttttcttcactgtcgcacgcattaacaaccctctctgctgtccaagacggaagcgcgtttttccctgcgtgtccatgtttgctgtggccacatacagtactgcgccccaaattcttccgcaagcaaacagacaatgtttgaaccctctggggatcaggtcgcctactgaggtaacgcgctcaacgtcgctaaagctcagtgcgctaacgtaatctgagcaggcacggcatacgcaaccggttcccagtgccactgtcttaaaaaaacacttcgaagactgacaatgcaatgaagaaacgtgcatttctttgtgggatcaaacggtgcctcacactacagacgggtcgtttctgaaatggaacatttggaaatgaacgcagcaacagccgtggaagtccagaacggccaccactaacggctgtcaattgggtatgccttccactgttgaagtgaaagtggtattacccccaccttggaaacaagcacctgcgcagtcaccctatggccgtcttatagacattacccatgtgagagggcaggtgctcagtcaattagttctctggccgtcgaccaccccgttttgaggtcacagtctcgcccactcgcatgctgacagattccacggtccctcctccactgaaaatcttgccgatcccgcaacgaggaccgcgtttcagctaacgttgacgtctgtgagacatgcacgattcgtagactctggtggggaacccgagcattctgcgggaccccagaacgactgcagtagtttgaccgcgaattcttcgccaatgacagcccacctcgcccataaaatggcacaacatacacttaaacgacgtcaaaattgtatggtgggattgacacccacctgtagagaaggaatggtggggttcgttcctggatcagaacctccgaaagcaggttgtttccttccctcacacaactgtcacattccctgttttgtgatggtccatacccgttcgtagtgaggtttacggccaaaaagcgcacgcagactgaacgggacgaactgcacgtgttgggcattgacacggcaccgcatcgatgacgcacacactgaccaggtgtatgtccacaccgcggaacgaaggagcctaggaccgtgtacgcctcattacacgaagatatgtgtatttctgttgtttttaacgggccaaggccgtcgctggtcacgacatgctgacttcagccggttgctttcccgcgtcgtttagaggagtgaacccgggaaaattcggcgttagtgaccctccaacaggcctctgcatttcgaggaatctgcagcctctgccggctgctgttacgcgccttgttcgcttcctgagaatttccctggttgtccgatgaagcacgcttcttctgttcccgatgttcgcagttctgacgggcaagtgggccccgttcttgccgttctcagcgcttgcagtttcgcagaaaactcgctctccccattttcagcacaccaggattaagccactctttttggctgcggcagcggttgctagaaggcaaccccccaagaatgagtgtgcggctcgttcctcccccccaggcttgttgctgcgtcttgtccccatctcccatggatttcttgtcttttctcacggttttcacctccctcacttgtcggtgtttgctcgtcgtcccctgatttctcgccacttcttcctgtctctcccttcccgtactggacgaggcagctccacactgcgcagggcgccgtgtgcgacttgaagagcatcccctttcttgatttcgggacacacagagccccctttcttttctactccattaagaagttcgctccgtaaataattcttttgagcaagcttaaactgcttccgttcctcttttttgcttccctcccgtccgtctctcccgtccgcttctctcgacatcccagggtacgcggtgtttttccaggtgtttcatcgcagctaacgaagcgctctttttcaaccgtccccctttccttagggcagcttcttctcgtctcgcctaggtagattattggtctcgtttcctcatttttgaccacaccctctccacggttttaaaacgtacccactcagcgccgtcaagagaagacacgtggttccccttttgtcgtctcttcctgtgcttctgtgttcttctcatcctggtgcatccggctgcaaggcgccggtccgcttcgacttcgggcataccagtgacgggtgagttttcctatcgtcttcggggaaaaaacggttcaaccaccctgctggtttctcaggcgtttcagaggaaagagagccgttgctgctctctaaacaacgactccttccgtgcagttccttgaccacccgagctgagacaacgcagttgaaaatgttgggtgtctccacctctgcccttctttcctctctgttctaagggtttctttgcttcgcgcatctgtctccgtcttccttttttcctctcttgtctctcttccccgtctcctccactccaagacttctctcaagtctcttccctttttgcttccgcttcccccgtcggtgccctctatagcgccctgcattctcctctcgtctcttcttcgtcctttcctctgctcacctgcggagattcttttcccgtccttctctccttcctcttctcgcttttcttgaaaga

SEQ ID NO: 952 - DNA, 4574 bp, Toxoplasma gondii
  source 1..4574: mol_type = genomic DNA
gactttgtctctacgcgataagtactgcgcccagttacactggttagacgtagcgttgacatcagcgggtggttttttgaatgctgcagggaagaaaacaatgttttctactatgtggataacgaacagtttagattcgttcgatcaaagctcatcgaagcgattttggcaaccgacatgaaacaacattttgagacgataagccgatttcggcttcgtacttcagcagacgatttcgacgtggcgaagcacgttgatgatcgctgggctgtgttgaagatgttcgtgaaaatggcagatatcagtcatgtagcgcttccttgggacatgcatttccgattgtcttgcgacatcgtggaagagttctaccagcaaggagatgaggtacgacttccagcttgccactctgctgtaatatagattgcttgttcttgagtaccgacaacggtctatcaggaaaaatgctgaagtccacaagggattacggtttcaaccaacctgcgggccgattctgtcaacttttttgatcgctaacggatcttgcttctatagtgataatgcacatctgcaggagcttcggcgagggatgccgctgtcacagctgtgtgatcgctcaaaacataatgagatgccgaaatctcaagaagggttcatcgagttcttagccaaacctttggtcggcgtgctcatagagggagactccaccggaacgataaagtaagtgtttttgctcatacgtactcgacgcagaaagaatttgcctgtttgccatcctggtggcaagctgaaaatatagggtcaactgctccagtaacaacggaaggtgcgtgttcattgtcactttactgcgtcggcccaggactgaggtcagcgagcagatggagcgaaatcttctacgttggaagcaaatggtggctgaccaggttgttgtgccgctacgtcctctgggccctcgaacacaagtgcgaacgttcactgcttcagcagttcggaggctagctggtgttgaaagcgttcaagctgccccaactatctcgcagagcgttatcaaatggcccgagacaacgggcaggcagtgcggaaagaatagtgtcgaagttgaaagaggagttaatcacactatcggaagtcagtcggtcactgcaatagagagcacggatccgtatccaacccgccgtccttggggagccggctttttagccaaaggcctgacatcggggaagaaatggacgggtattgctgctgcacgtccggctgcgccactcgctgatacggaagaggtcgcctctcagcgaaaacaccgttcggaaggtgagagagagagcactacgtagctctggttctcgcgtgatttggaaagttttcctccacgtcgctttccggtgaaacatcagcttctcgtcggtgcaccgttgatgcttttatagaatgaactgaactgagtaatcaaggtcaacgcttgctgagccacctgcttcctcgtcgctaagctgctgtcgtcggcggtgtagcacagtaggagtccctttcgtccgcttcgtttcagaggaagcgatgtgattttactctcctcaagtcttcttgtcttatttcttcaggaacagatacgttgaattggggatcgttgccaccgggtgcaacacgcaaggaagctgggcccattctgtttacgcaggacgcggaaacgactgaagtgtaggtcgtgcgcgcatctctccgatcagctattgttcaggcattggccattgagaacacgaagagaacgaatcacgctgccgttgctcgtactgctgtcgatgtcagtgctttgctttgtgctctgctgcccgtctctactacagaatgtcgcgcgagaactcccgcaggatggtgtgccgatataattcgtcatccgaaacttcttacggatccgacggcaacactccgtgtggtgccgaggcaaacaccttggagtcgtagcgttgaagccacctgttcttcgtcggcctaaatgactagagattcgatcaaaagcagctttatgggagtgcatctgtgttacgggtgttctattgatgtgatcgcacacccacggtacctcagattcccgagacaacgacgccgtaaaggtttggtacgcagcgacgctgtcgtgtctacttttcgcgacagaattttgtctgatttttgagttaggttcaagagttcgacaagaagctgttttgatttgatcatcgcatatacacggccattaactaccatctcgtggtcactgtgtagatatcgaagcgactcctacccatgttcaagatgtttataatgtcatggcaattgagaagcagggataaaaaatttttataaagcaaaaacaaacactctaatccaagtagtgtccgtcgagaattgtttttacaggtatccgctccctgggattccacctgagaagctgacataccacatcaactagtggcttgcccctagaaaggaggccgtgtgtgttttgttattgaaccgcgagcgtagacgtagacgtggctcactcaatcccaatgacagacaaaagcaagtcatgaagtggaagtggtgccagccctaccatctgcttgaaaattgaagaggcaagagcctgagaaaacgacggtttgctcaatacacgtcacggatgaatatattccagtcttaccttcgcacgctcggggcaacctgtacaaagcgattccgtatcaaccctgatacattcgcaaatttgcgaccgcattagggagtgtctgtcgccttataataaccttgtgggtgcaccaagaagttcggaaatcttaagaatctggaagggttctcccaggcatctaatgggtttctgctcttgcatcccgtgcttctggttatggggctcgcattctaatagtggtctcaacaggatgagttctgcaaggacgcagcccagggctgggttccaaatgcatagtttgtcgagatgggaaatggagagagcccttacaccacaaatccacggcgacctgagtggggacagttactgccactgacgagtgagtgtttagatgtgacatcatggtcttacggtgtagttagtcgaacccagaagcaactccggtgcccgatacctaatttccagtgttcatcatgttgatttggcgcgggcttgtcgcttcataccactgtgagcatatgtagggcattgatgggcatccctggttggttagtgctttgctcgagcctgtccatgaaactcgttcatttacagaacgttgtcactgacatcaccaagcgcaccgaaatcacaaattcttgctagaatctgaccaccatagtctttgatctgcatggtgaacgattgctggtgcacccatgctgccgcgcggttgtgccacaccaccttacaagtacattctccggtttcaagtccctatgagccaccgcccgccgatggagagcgaacagcccgttacatacttgcttggcaatgctgatggcggtagatgcttcaatgttgtgtgtctgatccttttgtcgaagagcgagatgggaagcgacgtatcggtgcagtgtgtacccagcgttctccatcaggatattctggaccatgaatccggagggagtataactgtagaaaacctcttcggcgcttataagattcggcgactctttgccaatctccaggcagagtacctctcgtgattccttcttcctccatttttgagttcttttgagcgctctcgttgctccagacacggcatcagtgacaagaaaaactttaccgaacgtgcctttgccaagctgtcgaatgacagaaaagcgatgcgaaagtgtgtggctggacatggtcgctgacagggttggaggtttgaaaagggtactgcagtttaaatggccttcctcattcgaaagtgttagtaggcttgggtacgattccagattgcacagctcccgtgccgcgggtaccacacgctgtacagacactggctggaccgtgcggggttcaacttcgcttcgagccacatttcattggaaggctgaaaaagacaaacagctctgtcaatggccattagaagcagactctattcgccatgatgtgaccacaggtgaggcagcgtagcttggcgtctctgatacgccagcagaacacacagctcacttgctcccttttccgccccccaccctcgtggcacggccaagtatggacagcaaaagaaaagacagacatgcagttgggagccatcgcagcaccggaaatgtgcgttatttgctgaagtagtcggggtgtaagcagttagagcaaaactaatatcttgctgttgtttttggcaatataaggatgacgctgtgttgcttgtagactgaacctcactggtaaatgggagggccatcagctccggggaagtacaatagattgttggtagggacggcaggtccctcattcacactgtcgctttttggaataatctttctcaagggggttgttccgccctcgttgacgcctgtggctggaggcggcttctttgctacattttttgagttttacccacttaccgagacccgggaccaccactgatagtgacattttccgttacacggta

SEQ ID NO: 953 - DNA, 2616 bp, Toxoplasma gondii
  source 1..2616: mol_type = genomic DNA
agaacagaggtgggcacccatgttgcaaccttcggcgatatcttctgcagcagtcgcttcgcgacaaaagagtggtgacaagcctttttcgacggcagggatgtgatcgcgttgagagtggagacgcgcatgcagttcgcaggtctcaggctgaaccggcgttctgtgaggcgtctgttccccttgtcccactccacacactggcctcagtgtggaatgcgctcttcatcctgattgcgcttcttaagctcctctccaatggggcttccgtcttgttgcctgctctgtgttccagtcaacgagaaaagcgcgttctggggtcgcctgctcttcgcctatgctgcatgcaagcctctcacacctgtccaggtcaggctcaccggcttttcgccgtgcatctccttgacaagacctacgtgtttcgtgtctttgctccgattgtctcgctgcatgcgcacgacgtgagccactcagagccgcacaaccaactccttctcatgtcttcagtgagggctgagacttgccgaccgtagctttcctaaccgccttgctgatgatctgtgccgacagactctgcttctcttctagggacatgtctgctggatccgtcactttaggaattcgaccagaaagccataaccgtctacgggaggagtaccatatgcgtgtcggcctgccgttttaagaaacgtctgcatgagaaagcttgtttggaagctattctggagctggcggctgctgcccgttacactccgtgtcgcaatacggcgacttccactgtgggccgaggacttctcgtcgtgtccatgcctctttcctgtgtcgcgggcaagtgctcaggcgtgggttcctaccagtccgcttctgactgaggaacgcgctaggaaaaggcggtggagaaacacgaaggcgtcattgtgatggcgcttagcaggggtgttgccacacatgcaagctctctgtttatgtaaccttgcgcggtttctgtccactaactttcaggttgccgtagcgttttggtgcactccccacctggcgcgctttatgggccgccgcggcattcctgttcatgtcagcaaggcgacggtgacgcatctgcgaggaaagctccgttttcgacggcgaaaatcgtgtgaaaagaataccctttgacgggaacaaagcacggtgtcaacggctctccggcaccgtgtcaggaggtgtgtagtgacaccggcagacggggctgctcggtgtctttttcgaggggttgaggctgaagcggcagcctctgtttgtgtatgtaacttcggggtcctacaactcagcgtagcacctcggtagtattttggttcggcttcgtctctagagacagctcctgtcgtgttacacaacggcatgtagtttttatatctgcgattctgcttgcggtgtcgataagctgctatccagaggcgtccgtttgaaacagtcctcgctcgtgagggaatacgacgctgcggccgcgtgaacttgccttagaaaacactgcccctacgaagaatggcagcttccactttggctgggtacggactgaatgcggcgccccagaacatcagctgttacaggaagtggttgcctagggccgcacgccgctggaaacacatgtaggcaacgccaccaatcatgatagaaaagcgtgagagaggaacacacagacaggttgactgcaagacttaacaacacctaggataaaaatccactacgttcaagccagggaacggaggatgcgtagggaggttcgcgtcgatgacaacgacacagctccggcttaggtctgagttttcagctgcaaccactttgccaagagcagtgttcgcagctggactgatgcacggtcgccaaagtgaggcggcagtgcgtttgtcggtgcagcctggacggttctccggtggttacactctaatcaggatgaccagctaacgcgtatctcggccacaggtcgccgaggtcgttcggagcgctttgtgacgctttcagataagacttgcatgggaaggaggagtcggcgtgaaaggtagcaacgtgtgcgggagagacggttggaagggttgaccgacacaaaacggggtgggggtgacttcgagactcataccccgaccgtatcttgcaggaaaacgccgtttggcaagcggtatagtatttgcttttctggagtgacatcctgacaggaatcggttttgcctcactagaaaagaaccgttacagcgtggtgagaagaacatcaaagagcaccgtcgacgcagctagcgccacggtgagtctgtggcacagtcgccagcagcattgccggtaaagagcgggagacacagactgcgcctgacttcctggctgtcgccatccacgcctgccctgcacattttcgcgagggctgggtcgcgaccggaacctctaacgatacagaagtcttcttcaagagggtttcatattccttggagtctcgtgtctgttcaccgtatccatctgtgggattctcacacctgtcgagctcgcattaatttcatgtttgccagttgtctaaaaatgagctgggggctggactccgcgtcaacagaggaaaactgctacctgatttgccggtcagctctgctcgcgaga

SEQ ID NO: 954 - DNA, 3233 bp, Toxoplasma gondii
  source 1..3233: mol_type = genomic DNA
cacggaaaaacaggacgtgagaagccgaaaggcaaaagaacacaaagaaaaaacgacggaaactcaaggtcacgcaggtcaggctggagagactccgaaaaacgcgcccctgcagctgcgcgtagacgcacctgaagagacggcaggccgagaaagagagaaaggggagaggaagaggaaagaagaaaggtagagagatgaagaacagaagatagataccaagagcggaagagaggagacggcgagaatgagagcgagatacagaacgcaaactcctggaacgaaggcggttcagagagtgaagcagagagagacgcaaacaatccgggatgtgtagtttcggtagtgttggagacacccgctgtttggactgtcgaatggaggactgagaaaacgtttcaggaaagcctaatagacagacggaagatcggcgccctgaacgaaggcaggtattctccttctcgcgtctgtcgtcttccaggaaagctttgtgcttcgttccaccctcgatttccttccgacgaaaagagttccccttccttctccctccgttttctctccctttcctcgatccccgacgttcttttttttcttctctttcctgtattcgatcacccgctttgtcactccaccgacgaggggggaggaagcgcgagcggagagatgaccggagcgaagcagaagtcgaagcaggggggacaaggagaatcgatcaatggatagtttctagagagacaggaagagacagaagcagaaaaaaagcgagggaactacatgttgctaggggtggagggacggagcagtcgcgcggtcgcgaagcgtcgcacgaagcgagacagagcgcttctcgcccacaaaatcggaaactggatgtcgattttagattggcatgtacggaataacaagaacgcaagcgagaaagtggaaggtgtgtcgactttgcaccgcgaaagtgaacgaacgcgtgaacggcggtaggagcacaccggcgagacaagaacggcaggctgctcgttctttcgcacctggtaaagacaccccacccggccagctggggagttggcgaaacagaaagatggcgggccgttgcttctcttttctcgatcttcgtgtacaagtgatagtgaaagattgacgcaagttcgcgtggagaaacaggaacttcctcgcaaagtccggcgtcaactgaacagccgggactgtgccaggtcacgacgaggttgacgtgggttcctcggtggacaagcaacttgctcttgacgaagagaatgagggaaaacctagcgggtctgaacgtcagtggtgaactgaagcagagggctcttgcttgtcgcagctacgcaacggtggcaagacaaaacagcgagaatcgaggtctcggtcttcagccggaagcggccctcattgcgaacggaaaaagtgacccttgcggtgtctgctctggtccattcaccttcttcctgcttcctctgcatacgtctttcataggctcacacaaatttaatgacaccacccgcggctaccgcctgagttcccgctcatgtaaaagcacgggagcatcagggtgagagaaaagtttcagcgtctcaccgccgaagcggtgcagcatgcagcgaagcagccaacggaagacattatttgggatagtccatcagagcgtgcacttcattaagcagaaaaaccagctacacaaatcacctgatcgcgggttgaacaatgacatatgcgacagttccccataaatcaaccgtaggcagccgaactatggagttctacacccacgcacgcagctcgcctacgtcgccatcaccatgatacttgatttagtgacctcagtgaatcttctgaccgacaaggttatttgtcaaaggcgaaggtggccagcttcacacaggtgtaggctgtgttgatttttcggacagttgtagagttattgtctcacacagcaatgctatcgagcgggggaaccgtgtgaaagaacatgttctgtatgttttttgtggcattcgtcctcatagacagaacatcgacagggggttgggcgctgcaaacggccatcttcgtcggaagtacctgccaatatgaccgtcgcatcgatgttgtcgcgctgatgcagccaaggtccccgccatgtttctttcaaagcagcacgggttccgtgggcactatccaaagacgcgtccctcatgtgtggtttgaaacacaaccaggtgtggcaatcaaaggccagcataaactcttcctgtattctttgtattctttccccctccagcagcgaacttggcaaagcagcattgaatgtcggttgacctgtcgcgaaggcatcccaaagaatttacctcggtactgttttcctttgctcagctcaggctaggcacacctcactggcttacttgctcaattgcttctcctcattaagctcagtcatatgcgggtggattctatgaagtgacaaagcccccgaagggcacgatatacattttttgaagcgtaccagacaagctcggtgtcgtctttcacttttcggcctcgcagtaacgatccacggagagtaagcaggtgattccgtcgtgcgcggcggaatgggccgctctcgattgatgacccaagggcccggctgtcggcagtgtgtctgcagagcgcccctccagcagaaagcagtttctctttcgtcgaaagaaacgtgtatgggtttgcgctcggcaaagggctggacaaaatgacaaacgagaaacttccgggtccacagtaatgttgtatgtggattaccggtaatgctcaggaggttagactacatggagtctaattaccacagagcagccaatcctgcattcgaattgtctgccccgtccgtcactcggtgtcctgtgttcgttgatccggtgacccctctagtacgcttgcatgcaacaagaggccacggccgagaagctgcgttgaacttcgctacgagtcagctcgctgtccgtcgatgaggtacgctctttcttctgagggagccgtcctacctatgtgaatggttcacatttttccttgttttgtggaaatccgtgttttgcggttgtatctggcagcagtgcaaccaaactatttcggacccgccgaaacccgtatgtcccgattgagtcgcaaaggagcagtcgacgccctagtcgctgtgcggccaatatttccccctcgaagatctaattagttggtctttcgagagttgaaatccgccgaggatgcaaaaa

SEQ ID NO: 955 - DNA, 4131 bp, Toxoplasma gondii
  source 1..4131: mol_type = genomic DNA
taagcttgctgccgtgagcaccattcatcgttgggatagttcctggtcagaagggacgtgcgactcacgcaccctaggaggtagccatcgaaactgtggggttgttcaacgaagtgaaacgatgttctctttcctgctgcagtggacttctgacgcaagcactcgcagtcacacgcatgttctgtctgttgatgggcgtgaaagatggagtacgtagttcctccgctaaaagagaagactccgatcattggcccgataaagaagatgaatgataaaattctatttttgttgagaaaagctcaacacagtctgaatactagtcgtacgcgtgtgctcgggaatatactgcaggagaagcagatgtcattcttatgcctggaagtcttgcggctcgtagctgatgttttgtttctcgctggctcagcttcaccgcataaaagagaaaagtgttgcatgaaaggtccctctccccgtcaccgctgacgtgggataaaaagcgccgtcgttcccatgctgcggtagctgttgtgtgtggccaccggatggcgctcaaaaaacgcagacgtgtattctgcaagcgcaggatttgtcgtgtttctgtcagtctccgtttgcactcttgatatttgttttcccctgtgactggatcgcacttttggtcgcaatgtgaagtggaggcaacccccggacgactgttgcctcccacctcacatcaggagagggacaagagaaaagaaaacaccaatactgccagcgtcatcatcatgcaaaacgcctacatgtacttaggttttcttcatctctttaccgaaccagaaaaagtccgtgttattcggatgtgaccgtgtagtctttaacgttctgtcagtttctgcttctgttggaagatgatgatttgtatatttacagaacaaatcggccgtttacatcggacgctctgagatatcgtacagttactctgcatcgtgtgcctttttaagtactttatttgtctccatttgtttgtgtccatgactacctcggagctgagtgagagactttcgcgcccagccgcgatgtacgagaaggcttcctcttggtgttgaagaattcccgtgtatccgcttcctttgtggatccaaagtcgatcgaaccgttctctgatgctgtatctctcctttttcaaaacaattgtcaacgcgcaggcaacccaaccagagaatacctaggcttaactcagggaggaaggcgaatgcaacatcattcatagaggtcgaagatgtgtgcattcctgtctttctctattcaacttatcaggttctgttgtagagcaacatttcgataccatcttttttttctttgctcatttcccttgaatacacttttgccgaaaaaggaacagatgaaccggattgaattttataatatgaatttgtatttcctgcttcagggataacgacagacaccgtgattttaaagcagttttgtgctaacagcatctgtagtcgtctacggccccaaagtcatttggctggcctcgcgtgctcttatgttagcattcatgtatcgttttacctcactgggttgtttggtcagacacgaggttctctcctgtgggttgcacaagtagacgttcaggtagtgagtatcgcagtaagccatggattaggataacccggagggacaggaataaacaatggaaatgttgtgttaaatttgaggtggtatcacctcgttcagtgccagtagaagggtcttgctgcttcactggccctcctgacaaattgtcttttctgtacggcgacatagaagttcagccgccgatgaaacaaccacactaattcttacgcttcctgtcattgttcatacttaccagttgttttccatcggattttgcgtggttaagcctcgtttgtgtagtaccgattttgctgcccacgactagggtgggaccgcactttatgcccctcccagttatttctgtactgattgttcgttcgtctgtttccggaaagcgagaccgcatggtcttcgttgatgagggaagcttcggctctgctgtatcttccagctggccgcaggagagaaggcaatgcttccgagaagatggcgccctgcaattcctttctctcccgagagcctcgccgagaggcaaagttcgctgagaccgacaaaagtggtagttctgcagtgtccactctgagctctgcagacgagaagaaagcaaaaaacacaacggaaattagtgatataggtcatggtgcttcgagacgtgtgccaagcatgcttcagaaatttttgcgtaagcaatgtcgtcgagttgcgatagcgggtcatttattttttctcttcgtttggaattcctggtcttcgtccgtcgatgggttggacaagaacaaaggagacacaagcatcgatttctctgtcgcagcccctgagctttctcttccagcctgccctgatggtttcgccttcgacaaagaaacggtccgtctagactgcagtaccacatgcgtatgacacatgcggatgtgtatttgtatatgctttgtagaagtatttatgcagtgtcgcatgtgcaaatatgtacgtacacacaatgtttacattcgtatatgcatatatttgggtaggtgcctccgtgaaaccgtacgcaagtctgtacttgtgcctgtactcatctcttctagagctgcaggcgggtttgtgtttgtcgaaatataaacgaccttattcaggacggttgctgtttcctgtgggcatgcaaggaactagagttacaaatagcatttctaatcttgttggtcaaagatgtaggatcagttgtttggtgagtcacttctcggtattttctgaaagctgatttcgtgtgtttatgttgtcaactgcagttcagatgtgtgcaggtcgtttctcacaaaccactcaagaaatgccttctaggcgtcatcaacgaaaacatatgcgtgcacttcgttcagcctatctctagaacgtgccctccaggctaccaccaaaagtttgtcagcgatagcacaccgaaatgtgccaaggtgaactatgcgcagaagcttctcgggtgtcatcctcaagaagagatgatcgatggactctgtgtccgcgtaagtcagttcacgtgaaggaggagcgttctaacttttgttctgcgctctaacaatacgttcaactggttaggaggtccagcagcacgaaacggtgaaccaacgagggtataccgggtttgctgttcctgagttttcagttcctatatttcctgcgctgcagtagcgaacacattgtagccacacccgagtaacagcgcagaaatcctggtgttagccacctgtcagctgggtaagctccttcattttctaagaacgattactgcccgtttcaatgcacacaatttgttgccgggctagtggacacgcgaagaaggcgatggatgagctctttttgaggaatgcaaaagcttgctaagttcaaacccgccgaatgcttacacataacggtgtagtcgcataactccaactaatgctggttacacgttgacaaatgtgtcgctttggggtcggcatgataaccgcgtctctgtctacacctggatgtgtatagattccccacgaacaggaagcatgcgctccgtagcgtctccatgctccatctgtgtgtcgttattgttttcccttcagcgcacgtacaaagaaatcggctacgtttgcaggaagggagacttggacgaaaacaacaggtgcatactgaaacaacttcttcctccaattcttaaatgcccgccgggctacaaggtcatcgaagacctatgtgtactacacagaccgatttcttgtggtgatacagatgcgccgccttctttcccgttttctcattctttagaacgagaggcagccagttttagtatcaaacgcgagcaacgcatttactctccacacaaaggtatctcgaatgcgttcaacacccatgaatcaggcgccttcttaggagtaaataaatcgccacattcaaaaaccgctaatgaggttagtcaccgtggtgttcactctcctgttttcccgtatgaatatgacgtaagtggaggaaatccagaacagtcatatgtctccgtagtaacatcgaccctcggtggacacaaca

SEQ ID NO: 956 - DNA, 2624 bp, Toxoplasma gondii
  source 1..2624: mol_type = genomic DNA
ttaatgtgtaataggcagtcgggtttcatctgttacttgattggtactgcatgcctcattcttttttctatggttctcgttcgtgggagaaagacgtagaagttgcattttaaagtgtggaagagagagtctagcttcagttgtcgtcttatgatacactcagtatatctacgagtctacttcagacacaccgtgttgctcttcaggcagctgcggtgtcttctcaatttctgctggcccaagagcggattctttctgttagtggtataatttttcatgctgagacgtcgcacttcaagcgacaccctctgagctaacttcctagcgtttgctttatctggttacctccaagaataaacgaattcacatcgggtacgaatccgatatagacgtccggatgttgagacactaacaaagagcaagcgcacgattctcttaagttggacggcgtacacgttcgtgcgaagcctgtgctaacaaatgccacgccagtccacacacggaagatacgtagatgtgtgtctgtcgtcaatcggcgtggcattgccacgtcagccgaggggaaggaacagtctctctcacggcctctccctcgttattcactgaaaagtgaacacatggcttttcgtagccttagttcgtttcctgtttccctttcaggcactgagggtcctgtcggacggccaggaccacaaaaacaaacaagcaacttgttctcaagcaaccggaaaccaaacatgacgactgaaggaaatgcgctccacactctaatatgtacttcattttgaagttggagaacggaatcattattaagctcccggtagaaacccgagacgagtttgctgccagtgagggagagcagggaccactgttttccgagtatggtggaattcccgttgaacggaacggagtggcgtgttgcgaatgaaacaattgtggcagccgttcttttgccggtggaatattccaaatggaacgcttggggcggaagaccgcacgaggggatcgattgtaaatgccgttcggttgtgcatgcaaagagtcaggtatttatactcaaaccaactcgtgtcgtctacgttaccgccacacaggagccgcaggttctttgttaaggggcagtttatattggttcacgctatatggaacggtgaatgattttgatatccttttagttaaggcagtttgacgttctgatatgagccctcctgcttttctagattcaagaggaccacatttgtcaaattgacaaacggaaactgatgtacgagtagtgtcacactgacgacgtccgggtaggcagtcggtcctttcagagtttgaatccaccggattaccgcgtcacttggaaaaaacacctctggtcttctggtttctggccgcttcgcaaacaacattttgcagaggaatgcggcctgacacaaaagaaaataatgcagggtcagcccttcccgtgtttgctgatggcagcaggcaacccgtgtgcatcacgcgttacggtctgaactgctgaagttgtaagggagtgaagagagccaataaagaagagacaagaaaagaagcagatgaattcgcgactgtgcacgcgtgcttacctcctcgtatcaccggcaatctcagttgcttccgactccactagaaactggaccccggtggaacggcctgtgctgtcagactctaggaccgagtcacttttcccgatccgactacgcaacgatttcgtttttctaccgtaccctctcgtcagcttccttttatgtcggagtcccaccctgaaacaacagcacaaggcaattcagtcccctggccttcggcgacgctggactgcccaccagatcacctgcctagaatttttactggcaaaacctttgtctcgttgccctaatgcttcgaatcctgccccagttgctgagcaaactcccgctccaccatggcacagaacggcggcggctgtttcttctccagacgactccgggaaggagaggcagtatatgcagagggatgtgtaggctgtgaatattgtgtgggttgtgtcacaggtgactttcgctgtaattcttcaccaaacctcgacgctgtatgtgaagcactgggtgccgtaccactgcctacgcacgtgcatgctgctttctgagaattcctggagcgaagttgtcacggtcaccacgcgcgttactagtttgcgaattgcttggcagagacacagaaaaggtcacccgaccagccacgaggcggtgtgcggttccggtgtatggacggctcgccgcggcagggatgtgcacgctggcgcgcagaagcttcgcgcggacactgcataaaattatgtccattttcttcccgcgagacggggtcgcggcgacaggatccgtcgcctttctcgatgccagttcagatcgcctgctccatccgcgctcttgcaagatcattcgtcgctttcgcgagactgttgtccgtcggaatgtcgatttctgttctggacgactccaccacacttcgtcatcgttacatgagaacttggcgccgttttctgcgcaaaaccctcgctgcagcgctgcagccgtttctgtgcagaagcgccgggggacggcaacacgcaacgttccttccgctccgtgtcgctccga

SEQ ID NO: 957 - DNA, 1614 bp, Toxoplasma gondii
  source 1..1614: mol_type = genomic DNA
gtggagcaagagcaagtcaaggatctcgacaaaggttctcgccatgcgccattttttttcgagaagaaaaactcaccgactgaaatacatcgcgggcattttgcgcgagggcagagggtgcgtctgcaggagcgacagagagagcagctcctgcggcgttggcggcgacgagagccatgcggaagaaggagattggaacagacagaaaaaaagatcagaagatctccagtcccgcggagaaaagcgcgacgcaggaactcagacgagaaaggagagaaaagaggcagtccttttccccagataaacaggattccgtcaagaagagcagggaagaagggaggtggaagtgaagagatcggagacggaaaattgaaaggacgatgagagacccagggtgaggcgaacgacatggaacgaagcaagtttgcgcgacgcagaggccgaatagccttgagaaaccacgaggacgaaaacaagaactgaaagcgacgcgtttacgcttctccgagagagcgacgaggctgtgctttggggaggactcaaccagagctttttgggaagctctctcaggagaaccgaggagcgcggacagcgaagacgaagcagagagaacaagagtggagagagaacaagagtggagagagaacggaggatgagtggggtgcgaaagaagcagagcagaaggaaaggatgaagaaccggagagagaaaaagaagagaagacgaggagaaggagaactctgtatctcctgggaggcgggaaacagcctgggagggtcctcgtctccgagtcgaagaggaagttgaatgaagagagcgagtggtttttcttggaaagaattcgaccacaaatctgcggcatcttcgcagcagatcgcgccagcgcatcttttctcccttttctcccccggagaaatcgaactgcatgcaaagacttggactcagccgacggacgcttcttcccgatgaacgacagctggagaattcagggcatgctctgttgagagattcgctttttccttgaaaagagcaagtggtgtgtgtgtgtaagattcggcgttcctgtgtgtctgttttttctctgttttccccgaggccctgcgtccgacaaccaagcgcaggtctccctgtgtgaatgctctctcggggaaaggaaaaacgaaacgacgctaaaaaagcagaacagacatttcttccgagccgccgacgcttcgcaaaatcgtctctcgcactccttcagaaacttgaaagccatcggcttgagaaggttcgtgggcgcaggagctgttcccaggccagactcggcgcgaggtttttaaacgtctctgtcgcgcgtcttctctctcaggctttctctctcctgtgttctcaacgtccatctggtcggcactcggacaacaacgcagcgttgctcttcttctctgaacactgtcctctgctctccttcgttctccactcgctctgcactctttttcttctccgtcttgcctctccctgtctccctgtctcctcgtgagtcacccactggggtctctgcgcctctggcttcctgccagtcgccgcctccgctcgtcctcgtctctttgtctcctagcctctacgcgaaagccgcca

SEQ ID NO: 958 - DNA, 3035 bp, Toxoplasma gondii
  source 1..3035: mol_type = genomic DNA
aaatttggacaccttccgaacctgagggcggtccagcacgagttgaagttgaacaacaggtgcacgaatcacaatgacatcttttgtacacactgagctcttcggagttgagggtaatgttttggtcatcgatgtcggcacaagcacggacctcaggtgtgactgtatgcctgagtaatatcggtcatgtgtacacttttcaggtgtctgtcggtgcgacggtaccctcgacgaactctcgtgaagggacgtcgaccaaggacaccaaatatattgtccctattcgctgcgcgtgcaggtgtttttgtctcagaacacactgcctcttgtatagattcagattatttaccatcgttccgacgtactacaattagttaatggaaagcggaatcttctgtcagcagattaccagagaacgtatgtcacgagcagtgtcgtgggtattttgctgatgcgtgcaacgatgctagagttcacccagcactggttcaaagatgacgtggctgaggcaagcgatggataaacgcgtgactgctccgtaagcacccccgcacgccgtacgacacgccagtaagcgtcgagagaactacgctttgctctgatttcaaattgaatagtctccagcaccaaattgttaacgtgtttgtgtcaccgcaagcgtcatgcaagacttgtcaggtgccaccgaaagtgatacggataggagcggctatagctgtgcaaaccatttgcgacaacaatgcacctgagttatggtagagatagcttaccacaacacggcacaatatggtgcccttgcagcgtctcttaatcaacttttatcgtcagtgatttgtttcggaaaactctcggggtctcttgacacagccgagtgattcgctggggctgggcgaaccgatttttcaccatggagtttttacttgccttgctccggaagcgaggggaaggcaggtagatatttcgagcgtaatcgcagtatccgaacggaaactgcctcacgttaattgatggtgtgtctgtacaccggaatcagtcggttggtggctcgcaggctacgatagttgttgacaggtaccctggttcagatgcaaaataaaccgtctatctcttcgaaatgtggaaacttcttcttctggttgcggccgtagggcaagtccatgataatagctcagcgtcctcggtaacaaacggttttaaacaaacgggtgctccattccattttcagaagacggcagttatccctgagcgtaggactgaggataatgatactgtgtggtggccggctaaagggaggcctccgaaactgcgcaagcccgctcacgcgtcagtattgatagcttttctccccatgtcatattgggaatgatctctgttttccatctattccaggcgtctgccaccaaccggcttcatgcacacagtagtgtcatttccaaacccgttcacggatccagggaagtgtgtttccttcgaaaagttagttcaccactgtctccacacactggagcactaaattatccaaagactgcagcgtatcccacgcatgggtctgcgatcctgacaagttgctcaaccccaacgagcaagctgaccttgaggcggaactcatgagacttcgcgacatcacagaacactcttgtggtcccaagaaacctcaattttaccaagttagacgtctccagtgacaaggatgtgtcagggtcacacttgtgtcatgttgtaggcagcagtggcagtggccatggacattgtcgtgccagagaaccaaacgccacaagaggcgactgaccactttgcgcaaacactcctgaggccagtgtgcagttcagttcagcaacccgagcacgaaaaagagcaacgccccttttcaggcagtggggagttggcaacaggggatgccatgatggaatactccttttttacgtgaaaaatctcggcacatcatctctagcaacgcgcggtacgtctcgacgggctagtgtggcagttgggcgcagagatgtttccttgcagaagccgtcgacaagcgtgtctccagcgacgagttcaaactccagcttcgccaccacatccattcaacatacctcgtgactggatcagttgctgcagctctcaaatctggagtcggccttgtaacatcgcacctgcccgtggccagaccaggtgaatatcgctatctatgatggcgactcagaaaacactggggaaacacgaatcttcaggaataggggtgattggccggattctgatattgctgttcgcagtgtacgccctctctgttgtagctgtttacttccttctcactaccgtcctcacaaaacgatatgcatcggaggagtgatgcgggcagtgttgtcaagcttaggcacaataggcgtattcttcagcacgtcaaaagcctttgtgcagaagtcacagggtgaataatcgagcagacttgggcacaagcgtgcgagtgtttttgagaaccctgagctaccgaaacccgctggcgctgctatgaaacctggtcggtagcccaatggagcagctgcctgcctgtacatcatttgccttccccacttcttcaaatcgaagcagcttcacctggcattgtcacttttaggctagctttgacagaggtcgcaccaagatgcggaacacgaaccttcatttatgagcgaaaatcacgtcgcgtgcaacacagtcaccccatcgtgtcggatgcgttgctggtagcgtgcatgcacagttctgtgccatcagcgcgctaggttgtagcacggcggcgccttagtttgaattgcttctaaatcaccatgaacgtgttgttttttgaactcagacgagatgcatacagaccgaagtatgcaaataacgcgttgtgaacccaagagacgctcgtgaagggtgcgctgggcgcctgaagttgtgatgacactcatgcatacatctctaggattctgtcttgtcatctgacatgtgtttggattcgttgtatcacccctaataactcttccgaatcacaaaatatctatcaatatatttgaatagga

SEQ ID NO: 959 - DNA, 1436 bp, Toxoplasma gondii
  source 1..1436: mol_type = genomic DNA
aagacctaccaacatttggagtcacagcgacagcgatgcaactcggatataaaaggtcgtttatcgcagtcggaatatgtctttgacggtctgagcaaatagacgtaacagggaaacgagggaaatgtccatccttttgcgtgaaatgtcgtgaagaccgacagacatggcacacatttccagtttttacggtgccagaggaacaacggtgggctcgtcagagaggactgccggtgaagtccaagaatctctacaacttcgaacgtaagaagaaacggagagaagtgcctgttctcggtttatcgaccatgccgtgaacaatacttgagtattcacgaaattgcaagtctttcctcaaatcaaccgactgaggcgcacgcgaactacagcgtttcggttttgctattgacaagcagagtgcgtcttactacacacttaacgctggtttctttacataaaaagtacgaattggcgtgcatttggacccaacacagcgaagaagcgacgtacctgttccgttgtcacccttcttgtcagcattctcttcctcctctctgataaaaaggacaagttcccacgcaagaactggaaaagcaaacatgtgctccacaccccacctgggggacaagaaaatatgcagcgttggaactgacggctacaccacgcttctaggcagaaaaaacgaggcacataggaactaagactcacagcaggaggctcgaaagcattcccgatccaggaaagttgaatttattcgcatgtaaaactagcacatttccacccgccagcaagctcaacatcaccatatcaaacatgcactttcttggcagccgaatagattcctcagcagagttcaagcatataggtatacgaactggaatacaggaactttaagaaatcggacccgtcgctgcagtttgtgagatcgactctcgaaacgtactcaaggcgctggagggtcacgtccatgagctggagtgcccggtctgtgcacgaggcacttttccaccgaagcttcaccattttttcgcgtggttatggactctttctgcacgtttagatcgcttgtaccacacaactcgtgtttcgctcctcgaaattccagctctcttagagcaacgagagtcatccactcctcgcggccacactggaggttccttccttgaagaggcgctgcgcttaggtttgacgatgacttgacactatttcgcctgaagattgatcaaaaacttgcgtctagttaagattcttcgatccacgaatgaataaaagccgagggtatctccaggcagagaaacaagtcgttttctgcctcgtttctgtgcagccgacaggacgcaagacccagtccgatgtacccttgaaacagagaatgctagttcgtccgtccggttgagaacgtcagaacgagcataagaccggcctaaactcaaata

SEQ ID NO: 960 - DNA, 2803 bp, Toxoplasma gondii
  source 1..2803: mol_type = genomic DNA
cgaggcctctgtgcttgtcccacagtcacccgttcttggaacatgtgataccgtttcagcattcccatgaacaatcgggtaaattaccacctggatcgggccagactccaccagacgaacataggcgggaaggttgttgagaacttgtttacgccttgtgtctagcaactccacattttctctcgcgtcttgagaacatctttcacaagcgtgtctgtggattcctgaaactctttcgagtcctgccattactcgttcatcagacgtgtgttcctgtcgaaacacaccttcagaggacgatgcttcaccttttcgtccattcgcgggtgcgaacgatgaagcgaagcaagacgcggaatgtgaatgatcacatctactcgagaaaggcactttgcttccgcggacaccacgacgggtagctaagcatcgtgagaattccgctctgctgcgcccggtgagctgcctgtttggtaagtctgagcagactaacgcaattccccccgttgaagggagcggatgcgcacttctcattccatgctccgggccgaaagtggcggtcgggtttctccctctctggaatttctcccacctcaggttatgaaccaaggaagcagcggattcatgcctggtggaataccagtctctcgatgacgaaacaccacggatcgccagacgaacacttttacgttgatgatgtgggcgtgcctgcctcagaaagatgcccggccgtgttgcacaggagaaaataccacgagcacaacggcatcttgacaattgccggcccgctgtgccgtgcaggtatgtcctgcagtgcatctgagacaccgtctcagtaaccggatgcagccacgccctgctactacgggttacagacacactgaaagatgccattaggactgggacaacgcctttcctgtcatttccaatagaagtcagcgcgtgtccacgcaggtgtgcgcaaggtgccactgcacccaacggtcacgctgtataatttgtgttaacaagccatggcttcgtagtcccttcaccagttctacaatcagtgacaagcagatagaaaaaggccaagggataaggtaactcacggacacggggtggcgcacaccgtccaccccgaatcctggacacagtgaacactgaagctgtggagttcctgtcgcactgaatggccgtgaattcgactctgcagtgaagagtctagcttctaccagataaattgtgtttttgatcggtgatttgctcgagtctgtctcacgtgccgcctcccaactgctgcacgcgtatggtccaatccgcatgcagcttccggtttcgctgaacagccgcagcgccactccaaagggggctttctgggaatctctactagttcaacccaaacttgtgtcccgtcaccgatgtatttccatcaacaaaagtgcacagcagtaccagtggttttcgctcaactgtgtgcagcggaatgttagcgaccgccacatcgaacaaggactcggtacacctccggctgtgtaagtcctctcccatcccgtagctacaggttcctaacataacagtacgaagacagaatctatgcgaccagcaaagagtatgtgcctgaaaaggcaaggcaagcataagaaagtgtacagttcacggaagcgctgtaattagtgcagttgccatgactccacaagggtattatccaggaacgacagcgtcttggatggacctttccgcgctcgaactgttggtgcgccgcacgagcattttcgtgctgtcagcggtctgcttgcatttagcaccaatcggaagacgcatcgctttctgggagccctcaagacctcgaagacaaaccgaagtgcaagaaagggtgaggtagggaacgtaaggcgagttgtggggcttcagctttaaaatccttttaggacgggggtggcggggaacataatcgtccagcatccagtgaaccgcaggaccaccggaatgcgtcgccccgggcaatcagtggtggggcggaccccgcagccctggttcgagttcaccgtcccatcacttctgattttccccggaatctttctgtaacaggctttttttttcaacgacccaaaaatttacctggaggtctgcattgcctgcaggcaagagaaggtgcaaattaggtaagcaaacgtcgaatgaatgtcgggccacgagctggcggtcacatactgttctacagagtttcgtgggggtgtttcttccgggtggccgcatccatttcccgaactactacaacgtactcggacgcgcgtgccactttttcccacctatggcgcccctgtttttctctgtggcagtatcaagttcaattagcggtttcccacttcccaatttgcttcccgattcgttttccactaggtcgtgtcgggctgtagttgttctgtaagcgcaccaccgcgttttgccggtgtttattcttcaactggtggtcgggctaactgggtttgatttttcgtggacgagctatgacgccacgttatctgtccaggacgcagcgtcagaaaacatcaccggtagattgtggattcagggtgttgttccccgttggaactctgaaaggataacgcaacccgggtctgggtgctgcaccaggtgccttggcacgcaaacgttttggggcaagggcaatcgagtttgtttgcgggtgtgtgcatacaaggggatcagccgtccgagaggaagtggatcgttctttccgagagacgtgcattgtttttcctgttgtttccagcagtatacccgtcttcgagaccccgacttgtttcgaaggacgcgttcatca

SEQ ID NO: 961 - DNA, 2484 bp, Toxoplasma gondii
  source 1..2484: mol_type = genomic DNA
tcgaccaacagatgctgctcctgaatttgcttcatctgcagcgcgtcgaggtctgcctcagagacgcccggattctgctctgcgacctcgcgcctgtgcttctccagcgtcttgtcaaacgcctccttcaccgcagaaacaggctcgtggcgcgcgatgcggaagagggggacaaacggagacaccaccaaagacgcgcccggaagagaagagacaggcgaagctccagagactcgtggagaggccgagacgcctggagagggagagacaggcgaagctccagagactcccggagacgcagaggctcccgagccacccgcgtccacactcgcgccagtcgacatctctgttttgggggaggaaacgcagaacggactgggttcgagaaacaggacaaacgggggagaacaggacttgagggagaggcaatcgatcaaaaaagagacagagggcagggggagggggacaagcagtggagaggagaagagtcgcaaggaaaggagcagagactgaaacaaagaaaagtgtaggcgggagagagaagagacagacgggcagcagcaagtggggacacccccagaacgcgcgacgtgacgcagagtctttcaacaagttcgccccggcgaacgcgagagagagaaaggagaagaagaaaagaaaagaggacgaattaggatggaagggccaaaacgggaagtcgatgtttcgaaaaaacaacgtcgtcgcagagacacggtggtgaaaggcaacagttcgtcgaaaagtcctttacttccttcgctctcgcgaaagcacagagggcagagcttcagccttctctgcttctctgtctcttcgcgaaacaccgcgcaaaaagacaacacaccttagcctgagcattttccatcatgcatgcacaagcccgggagtcgacgtggagagacgcgcagcaagaaaagacagtaaagacccagaaaagagccggaaataattgcgagaaagctgtactacagaaaattgcaggacagtgggggcaatcgcagtgtagcgggcctctcacgcgggaagaggaaacacgaggcgctgaagcttctcctttctgcccgttttcctgcctcttccccgcgagagacacacgacgcgcttttccttcctctctttttatatccttggcctctcgacaaacgaacagccgaagaacggtagaacaaagcatataagtgactcacttcctcggagaatccgctcccccggcagagaaagcaacaagaagcaacagaagacggcgaagaactgcgtagaagcagggaaagcgcactcgggaagattccacccgcggttttacttctacccccaaattccacatttagcgctagcaacatctggttctctaacagccggggaagaaagagaggctgcgactgcaaaaaatgtgaacttcgtggttccacacatgcacgaatcgagttttatatactacacgcgagggcatactcgccgcagagaaccctgcgcctcgcactcgtgtttgttcgcccgtttggcacggatagagggcaacgtaaaatttgttaagagtagatgcagctctctgccggtcgtttccggttttttctctgcttcgtcccccctttctcgtctctgccagcacacgaaccgctcggcacaactgcgcgcgcggcttcgcaggcggcttcggcggccgcgctccagcagctagaaaaccgactctgcagaatatgtttgttctgcttgtacttccgggcaagagaaaacgggaaaaaacacaaacacgtcctggatgccgcaatacgtggctctctctaccctgtcaactcccatttctcgaggcgttgcgttgaatcggcttatatccggatagcgctccagccatgcgcaaaatcgtggcaaatgaaccgtatatagggcgaaaactatccgtcgagtgccggggagaaagccagctgaagcgtgttgccttcagcctttttcgtgacgaatgcaacagcaaggagagtcccggattctacgacaaagcacgcagactgccgttcggaacttgcttcttccgcctgctttaattgcacgcgagaagtgggaggagtgggagcactcctgtttcttttgcactttgcgtcgggaggcgggccagaacggacagcagattcgttttgttgagtagcgggcggcggcagatctgttcgcaaaattcactgctgtgttccggcagcgggtgtcgatatacgactgaccaactttaaaagcatttaacgcgtcggaatttgtgttgttcacttcacggaggaagtcgggctctgcgttgactgtgtgccttttcctttttgtggtcaaagagttaaacggaaaggagagttgctgcccgacacgtagcagctcaggcggacgcagggccgacaagaccgccgggtggcggtttggcgtgtgcgctgcgcgtgctcgcttcttttttctcacttgtgcatgtctgtttctgctcgtgtgaaa

SEQ ID NO: 962 - DNA, 1970 bp, Toxoplasma gondii
  source 1..1970: mol_type = genomic DNA
gagcacataagcagaacaattgtggcttgagccttgcacagagctggccaaggaaacgtgtggtccccgatagccacacaggagtacttttttactgtcgcatgtcggcaaagacagaagcaccttcatcttctgccccctgacatttagagattggtgtcagtgtatgtgcacgtaaccggactcgaggtgatgtcacggagctgtaggttatacagcattctccaagtgggtggctgcagatccaaggcaaccacatcgaagacctcccgtcacaatattagggaatccagttatcgccaaaaaggccaattttttcagaaacaactgctgccgacgacaaaatggaactatgctatgtgtgccacccgtagatgactatctatttacacggaacctgctgaccaccatcatcttacgccgtgtgacgcagtgtctcccattgcaggcaaccgtgatcacatatatgaagtgagccaatcgttgtcctactggctaccaaacccacttttccagcttacacaaagcccctatataagccaggaattccttcttgtctccacaccatcttcaaggcgtgtcccgtggaagttagaagcgaacggtacactttagcgggagtacagtcggcagcctgacccaaagctgcgcctctagttggtcctcttgcctcgccgctcagtccctgctgcaactgcgccgtgcccgaagacatgattgtggaacaaggttgaatggaagaaaccgtagatgacgaacctagatattgccttgaggtcacttgcgcttggatcattgcctttgctgtgtcaattggataaaaaagacatcggccgacgaagccactgcaggcggatgcaaacatcaaggccctcatctttcgccagtcaatcgaggaatcatcagactcgccatggctgagatgttcagctgaaacagtcttccaggagcctgctccggtcgcggcgcatgtggcgtcattggtagaaggctccatcaatgtgggattcggtgcgagaccacgccagcacacatgaaatcggctggcagagatgccgatagaagtctccactcgcagatcaacgcaaaatcctggttaccttcgctgccaccactttcccagactcaagcgccaacgacacactcgaaccgtggcacacttgctaagcggcagacaacgacaggcctgcaacgagtcctagtacttgtggctgacccaaaagatttgagttgggttcgcgtgtgtcgcacgaaggcaaagttaataaaaaacagataaatggtgcgctgttgggtagaagaggatgcctggaaaaggacagcagcggacccgcaaaaaaacggtgccggcaatttgctcgttgcatgctcggcagtggaacatttcaagggaaagcgtggccgacttccacgaacggtacttgagctggcgcacgtgctgcagtatgtaagtggttgtagccgaggtaagcaactgagtcttccaaaaaacctgttgttagccgaataggagagatgaagactccgatatgtatggaaagccctaaagggccaggaaggagtgtgcgtcccgttacggtagaggaacctgggcacagtgtcgagcgtaccaactagcggtgtatcgacacgtcaggacaacattccgctgccccctgtgcagatataatccattacaggttcacgaccgaatgcaacacggtttctgattcgaggtgccccgaatttatctctaccgcaatgaagatgttgcaggtcttccttaccttcgcgcttgcaccggcacaccgagcgacttcaggtgtttgtgcggagcctgtttcgcaagacgtgtacgtccctccgggcgattctgaggaaccctccgtcataacaagcgccgatgagcaaagcaaacacgcgtgagacacattaaaggacctgcacgttggacgagtgaagtagttgaaagcgaaaatgcagcgatgcca

SEQ ID NO: 963 - DNA, 1982 bp, Toxoplasma gondii
  source 1..1982: mol_type = genomic DNA
gttgaatgacaagggagcactgaaccgacacggaggcgctggagagacacgaaaggacatctacaagttgcagcagaagagccagatcggtctttccagacgccgcatgctgtagggaactgtgcatgaatgacaacatcccccagaggtgagaagactacatcgtcagcgtggggaagcgtggcacgatatcgaggaaaataaaacacgcatagttctcaattggcgacgcgagcctgcagcagacggcagagtgcactcgcatacgcatttcgttgactgaaaacgcgcttacacttccgtagctttgtatactgcgtagatcgggccgaagcagcacacgctgctggcgaagaagtggaggagcgtcatcgagtcggatggagaggtcctggatttgactccgcgatttctttcacttccacccgagttttcccggcgagcaagcgcaggcgacccgcgagtcgtctggggcacgacgtctgtggagcagcggcggcttcgacgacacgcagaaaccggcttttgtatgtagaaggaaggaacgtaagtggatgagagtgcaggctgacaggaaggcgacgctgactggtggcgagaagacgcaggggggaaggcgacagccaagcggccagaagagaactgagcttgcgttggatgttcagcgcacacaaaggacggcgaaacgtcggaaacgaagctgaggaagcagaagtcgcccaggtggcatgccaaggcatacagaccagcaccaacgtcgaaacagcaaggaaacttccacctttgatgccggggcagaaagatcgcttcaaggattcgcttttcctcgagagtgtgtgtccagacagaagaagatccaggggtatcttcgttgcgtcttccaagaagcgcttcagacgcccacgtgagacgtgacgcgcttgaagtgacaaacagcggttctatactgttggaactcagagacaggaactcgaacgaatcgctaggagcctcgacgcatgcaggtcgacgcggcggcgacggttctcaggaaccactgcacaccaggtaaagctacaaaaacaagctgttctgcaggtgagatgagggcacctcgaggcacagtctttgcagaggggcaagactcattctgtttccctcataaagcaaataggtatagcggagaaaagggttgcatgtgcgttggcgtgcctccctcatgcagcggaagtgccacgtttctccctgcatgcagtccccccaaaaatccgctggtcttcagccacatcaacgcgtaaaacatggccttccggttcttcgctccactctatgcgtttaacgttagacaacgtgaccatctgcggtagatcacttgactttgactcttgaagtccaaacgtgcgctcaaggttctgcgaggtgtttttttcaagtgtgttggcgcctttctttttcacacttcatggtatatacacagaaaagtttttaacggggttcagatgcggatgttcgtcgcctctggcgcgcccctaacctgtttttttcgcttcatagaaggtgcccttagtcagaatgtgcacgcaccgcagtcgccgcatatgtctatagactccgtgctcaatgtttctgtctacctatacagcggagaacctgcgcagtctaagtgatcgtctaagcgatcctgcccctcgtttgctctgtttgacaccatccatcttcgtttattcctaaaaacaacccgactatgtctggagggtgtgggtttcctgtaaagctgacccctccagcggctttatagtcacttcgcgccggcgcacccagcgaaggcaacgaaggttgcctgtgaacagcaggcagtgcaacgagcaattccgcagccgagagttatcgtgctgtgacatgagactaggcttggaacgccctggcccgttcaagtcttccaaaagcccctttgtcgcttggaattttggcggaagtcagaaagtgaagatgcaccagcaaga

SEQ ID NO: 964 - DNA, 4655 bp, Toxoplasma gondii
  source 1..4655: mol_type = genomic DNA
ggcagtgaagacgcgattcaactttgagaacgtaggaggagaaagaaaggccggcgaaagagcgtccggcggcagcgccggagcagatgctgcaggacgcatgctgatagacagggtgttttcgagtccgaaaaggaggcagaggcgaaggagagaaggcgagaggcagggacgatcggcaacggcagggaaggagcgagacgacaagggagaagtgattctttattcgtttgatgaatctggaactttggtataatgtccagaaacctggtgcctggaggtagtccttgactcatggggcggcctccccacagttccttcctgttctaaagtgaagacacaaacagttcctctcaactgcctgtcggtgctcctctgtcgccacaaggtcttctctctttccttgggcgttcgaaatctccacgtcgaaacgggaaggcggggacagaggaagaaaacaggcagaggaaaaaggagttgtggactgaaacgggaaacgagacgaagaaacaaaatgagacagaaagactctgttttccgatggtaccgagatggttcggaaaaaacctccagcccaccatggcttctgtccagcagccggtcggggccgtagtgttgagaactccgactgtcaaatgtgctgaaagctaaagccgatacgaactttgccttttgactgcttccccctgcactccccctcagaaaacccagagagttgtgctgcctcaattcaaatgtttgataagaaattagcgaggaaagcccagcctacgtgaccggccgtcaagatgacgcgaggctgagaggagacatccatttctcctcacgaagaaatgcacctgtacgcgacgaagggttgaccaaggcgagacttgcacgggaaagacctgagaagaaacatgacgcgggggaaaaatcactttgactcggcgggatgccaccccccccaagtttctgctgtgtcctgcacagaatagagacgagagagttgcagataaagggaaacgagacaacttgatcgacagagagaaaaaaagacggagaaaaaaagacggagagaacggcgaaagagtgtgaagttccccttcgggagcccggggtccaggacgcagaggcaagcgggagaggagcgacagtcccgaaccatgtgccggagtaagaagcagaagcagcgtttctgaagaggcgcaaaaattccgaagcaaggcatttcacttcttctgtggaacagcaacacaataaagggaaccccctttcgcgaatcagcaacgcatgcactgcgccaggcacagcaacagcgtctgggaagggttgccagagaagagacaagaaaagaagggaagagcgcacgggtgaacgctgactagacgcgtacgaagagggcgcgaaacacaaggatgacgttgtctatctccggaaaagaaacagggaaagccgcaccttaatctaaatcccggcttcttccattttctcgccccaagcatctcgaggccagcacaccctctcggtgccctgcgagctgctgagtgagtcaactctgaggatgctcgcatgctgttttgcacagaaaacagacagaagccccaccacagcttgttagcgaaacttactgaaggatgcctcgttgcacaattgactcgaataagaaaattcactgtaaaggaagactcggctgtctgcacgtcaaaaagactggaatcacacattccgtagatatataagcggatagctgttatgttgaggacatatctaaaccgagttggactaccggttagagctgaaaggtcttttttacccggtccaagtacgatcggggctctgtggaagtctttcaggggcaaaatgtgcaaccgcgtgtgtggtcgacggtgagacttgatacagccgctggttgcaagacgccgcttattacgctggattgcctctcttcagcaaggaagaggattccagtctgacttcttcccttgcgactccatacccaacggaggaatgtatagaggaatcggtgttcgggactgtggcgccattctcagtcagaaactacacatagtcctgtctgaatcttctgttgaggaacagaacttataacccgacatactgagaggtgtgagaacttcctttcgtcggtggaagtgtacagatttctcaccgtatcaagctcatcgcggggggggagaggacagaactcgagaaacaagactaatggagcaagacctgccactgagaatgatgtgccacgattatcatgtttgctaggaagtatcgtgtgatgcggtggtctgcaggtacaagaatggaaaatgaccgatccatacctgatcttgtgggggattgtttgagtggacaggcagaacactttatcctcttccctctaatgtagtctgcagcacctcagtgcataaaagaatactacgtggggagaaaacatcgatctgatcccgtgcgaaagctacccctctctgctttttcagttgacaagcaacggtgccagtggcaaaaaccgcgtttatggagatgtcaaagagttggatttccgtcaacgaacacccttcacagtctagaagaccggtgtccgtgtctaacaagtagaagcaaatcgttacctgcggtctgaacgcaaatctacttctggtaatgtagattcagtacgtcgtcattttctgtgggcagttccttgagcgataccatcgggagccatgggtgtagtgttgtgttaggggcttgtttacagaacagccgtcaccatatcagaactagaggtacgaataagacgagtaccttttcttagaaatctcgaagaattcgtgatccacctaggtccctaacacgcatattcaaaggctcgtcatactgtcaagcgaaagtctttgagtatgacatgtcaggcagttccactttttgaccatttggtgtttatgtaccggtggtgttgcaactacattatggcgaccatgggtgccacatcactagtctactctgcgattttgtgtcaattctttgggaactttgcccaccgaccgaggcagcagagaatgcgattttcccaacgccctcgaaccatatcaagcaactagcctgcgtcatgcgtactactggtcacctatgaaagttgaatgttcaacggcaaatgctgtggaaaagccaaggaaatctcatattcgccgttttccagacaagagtgatgtgttgtttcacttcttgaggcgaaaccttaaccgtgaaccaaagtgggaatttgtgcccacggaagattccagcagccgcagagaatttgtattaaggtaaaaacccatctagctgtggcttggggcattcagccgatgcagcatcaaccctgacatttttccatcgatgacaggacacattttgattcggaagttcaagagtccccagttcgccatataaactatcggtgtgaacgcgtttgtggcactgaaagtgcaagggaaccttgctacagcctgaccgtgtcttagttttgttaagtcgactgactcactggtgtcaatttacgtttttctatattgcatcgtggtagtcagtctctatccacaggattcttgctcctttaataacagaagtagctgatgcagacttgcagacacacagaaccactgaggcaacttctccgtttctagacactcgtcgcgcatttttggtgggggtggcccgtaccgggaggggcgttgcaaaaacctgggaaatacccggtgtttacgcctccaccgtcaacacctgtcgtgtctcccagtgttccgttcacggaatgcggcaaggggttttataacagtgactccttcttcacaatttatgtacagatgaagctgtgataccatgtctttttataggcacaaacatgacgccaaaagtttcctggtgtcagtggcagttgaccttggttacaaacacgcttcctatttcagtctcgcgtcgaagtgtttccgtttcaaccgccgttgataggtagcaacgtcctgcgcaatggtacccggcaaaaggaaatgtaaagtgtgaaattgatgctgagaacgatggtttcgtggcagggattcacgtcagccatctgctgtgcagttatccgcgctcgtcgtcctttgtgcggcgctgagaaagagtattagcgtggtctgtgcacaagatgtactcgtttttgactggtctaaccgatacactttccaggtttgaacccgtctgagggtcggatgactcgaggtgcgtaaccatgctcttgaatactggctcgctgccaacagcagatggattttgagcatgtccgtcgttgtaaatgactcatgtctggttctttctcccttttttgaccccatggttccctcggatgcgctttcgcatcgagacgtgggacagcatagcgaggcactgaagaagtccgtttcaggaggatccgcgagctcactgtctgctgccgagtaatgaggtacacgtgcagactagatagcacaggtttccactctccgcattttctaccgtagccttaaccacgcgtggcggaaaatacgcataccacctacaatagctctgctacgcgtgttttcgtgtgcaggagggcgctagacacccagttgctctctgcgaccgagagctgtgtgtctcgtacgcctgacctggataaggctaactccacagtttgaacaaaa

SEQ ID NO: 965 - DNA, 3144 bp, Toxoplasma gondii
  source 1..3144: mol_type = genomic DNA
ccctgaatgtcgtgagatatcgaaataaaacaccttcagcagtattaagccggccactgggatggtgattgaaagcaaccgtacaaaacttgtctgttcgtgtctcacatctaaaacccactcagcatccatccccaggaactgtgttatgcctcacaagtggatttcttcaaagtttttgtttcgtcttttttgtcacgctagatttgatggagagctgcgagaaggccggctgtggaatgtgaagcccgggagcaagggccttcttccagacgggggcattttgttgggtggggcatgcattcaagggaaaattcacggaccgaatgggaagttgctgcggcgacggaaactttacgtcggcaagttccggaaaggcaagcttcacggtcacgggctggtagcccgagctgaagacggcgtcgttttagcggaaggcgtgtgggaaaatgggaaactatgtggcatatagttgcaggaaaggtatcataaaaaagcggtttcctcctacctgcgcactgaaactatttttggcattcatgcaacctacatactgggctaagccgagtcaggctcccgcatctgccggcaatgagaacaaaatgccttttcccagagaacagcgagagcgcacagcggtttcctccactcacatagaatgttctgaaccgacagtggcgcctttgccccagagtcttgctagcaagaggaaacgaaacgctactgcgggtggtagccgggaggatgcaagttactgaggaagcatacttccgacaggtccacagaacatgctgttctaaagttatacttccccatcctagaaaatgacctagctttaaatacagagtggtgctggacccgtccacatgtcatcgtaaagcaaaggtaaacacacacacattttgctgccgaaatcaaagcacagggaaagcatgaccgtacggcgatctgcagttgggcatggcacgtgcacatttcgatttacaggctttagagcgcaaaaaggcactgacacgaaagcacacgcttgggcagcatcgtggataaagaggaggcaggaacgagaggtgggagaagttctcaccagtcgcaaagatagaaatcttcaatgaactagaactcaatgcctcgtaaaagctgtaatggttccgttcctatccaacgggactggtcttgtctgcaagatgtagcggcgagcagcacggaaactcactcaaaagactatgtagagaggtcaacagatcttccttatctccggatattatagcctttcgtgtcaaactctaaaaactcagccattagaacgaagacttcggagtcgagccgtccgtggggtgggcgctcaatgccgtttttctatcttctcgtaaggcctgactgcccgagtcgaacttcggagcgacgctacgggtgtcaatacaacttcaccagaaacagtgctattaacgagtcgcgtgcgaacctgaaagacggcaaattcgtgtccttcagtttctgctgtgctccggatatgcgtttgaaactgtcctcacagaagtccttctgcggtatcggcgtggtagacacactgaagtcacgctcagtttgcatctttaatccatcaaattgccactcgattgcatttcactaaactaatcgtgtttctccaattcgaaggctgtcgcctcccttcttctgcagagaggacagcaggccaccagtagatgttcatgtacgctttgcgtgtccgtcacgagagcttccagttattttatacgcgattgtattccgaagtcgcatcaagattctcaactatgtggcattctttcgatcaactcttccgtgtactggtgaggttgcttcgctgtcttgccaagaaaccgggggtcacccaaagtgaagagggggcacgtaagttcacaaggaaaggttgaccgggaagtctctctgaaaactgttagtgttacatcatttttgctataatgacgtggaatatatctctcccttttcttcacatctctctgaaatttaatcaccccctcatatgtcgaaggtaactgcattttaaacggaattcagctcttcacaaggcggctgccggcgcggcggtactttgggcgcgttatcaagacagtggtctgccatgctgagtcgaatgcgctgttttttctgttttcaacccagcattacttgtctatagaatcctgtctcactattccttctttaccgttgcgtacctctctcagttcctgtttatggcgtgtcttcagtttgtgaaaagcctaacggtttgtttgagcgcggaaataactctttcccgacgtgctgtctctcagtttctaatacatcctttttcttcgtgttcacgttgcttacttgcgacttcaaacatgcatcttccctttagtgtaccacagtaaagcggctcattctgcgaccttctggaaatgcctgtcggaattttcttccgcattttctggaccggctgccacatgcaatagtgccgcagagaggctagctcgccctggctcacgcgctagcgaaggttccatgacgaacgacgtcgttccttttttcgtcgctgctcaactcctgttgtatttgccggtttgaacctctcggaccactttgtgttgtgcgctaaagccagtcattccttcaacgaaaccctgctgagaagggcgagcttgcagtcggctgccctcgcagccgttcctgcggccagtcccttcttcgcacgacacactctgttgaaaattgtggtcctcaccactgtattcccgcagatacaaagtctcggcagatggcttgggtagagcgcacagcgaacggataggcgaagttctaatcgagggtcttttcctatccgctgcttgcttcaccgccttcgttttgctcccggagtcactactggaaatttctacgcagagtccgtgtttccctcctgacgagaaacttacagcatctgagaagacttccatgttccacagtgccaaggattcgcccacaaagtgcctggaatcgtcaaagagcagtggattcattgcactcttccagcggcatcgttgcactcttcgggaatcgtcgctgtctcctggtgttgccgtcgcgagggttcgcgtttgcgcacctcatcgagtcttgccgtttcttgtgaatgagaga

SEQ ID NO: 966 - DNA, 2250 bp, Toxoplasma gondii
  source 1..2250: mol_type = genomic DNA
caatggcgcgatccaacttctcctcgtacgcagaggcatccattggggtgtacagacactcgggagctgggcggcatcgccagaggcggggaggacgccacgaagaaacgcgaggaaaacgttctccgcgcgaactctcagcgcgaccgagaagaagaggaacggttctcctgtacatgcacaccgcatgttttcgaaaaggaaactgcgaatcgagtggagaatcaactgaaagcaactacgtcgatgatcacgcatgccaacatccatatccatccaggcataagcaaagacagacgcaaacatatatatctttatctatatatgcatatatatatatatatctttatctatatatgcatacatatacatatatatatatatatatgtacgtatatatacagaggtgtctgtattcaggaaagcgagtttggaggtgcattttggcgcttgttttgatgcgaagagagatgagtgacgagaggacttcaggtgaaggagcaagagctcaacatcgctgagaagccagcgacggtgacgctccgccttcagagactgttgggataggaaaaagcgaggttgagagtgtagaagcgacgctcacaagaggaatagcattccctcttgtcccccctttgaggaggatgaaggaaaagtcctccttttcctcacttagacaagccgttcttagttcttcgtctcggtgaaaggacgacctgtttgaagaggctgaactgcgagtccccaaggcgccgcagagcgagagcgaaaaggagagtgaggagaaaactgcggagaacagctgcaagtgtcgagacagcggaaacgctcagcttctgtccaggcggctggctgcagagagggccgccccgctagctcgtcctgtgtgtgtgtgtgtctctgctgcggcctcaagtctcccaggagtttcctcggcaccggcgagcgaggcatttggagcggcgcgggcgcgcgaaaagacaggaagccggcgaacgcagcgttctggaaacaggagagaagcttcaccgcctgcgcaaacggagaaaaaacgacaaacgaggcgtcagctcagccaggaggtggagaggcgagtgtgcggtgtgacggccggccgcgagccgaggggaggggaggaaaaaaggaacaactcaggatggagagaaaacctggagagaagacgcaggccaacggtgccgaggagcgagcggtcgagagcaaagaacgcatgcactcacaagcgggtgtgttgtacttgcacacccgccacgaggatgtcagcgggtgacgtcgcgcgggagattcttcgcggcggaaagcggcgtttcggcacttcacagagttgttcgtctcttttttcgaacagacgaggaccctggacttgccttgtttcgagaaacagcgaagaaacagtggagaaaacgattcgcatccccgccgagagacaccggcaagacactcggtcgttgctcaaaacagtactgtggccgtgcatgtctcgtctcggggaacgaacgactggaacgtcaccgcttaaattccttcgtttatctgcggaaggtctcctgcggattgcctctgagcatcttcggcgaaaacctgcgggtttttctccccatttccggcgactgctctcgtcgacactacgcaaaaggcttctcttgtccccctcccccccccccatcccctgtgaagcctgttctcctttttcttcaagcacacaaagccgcagaaggcgccgttccgtctcctccactctcttcgcctttttcagagctccagggcgtcttgccctctcttcgagtcaacgtttgcgcagcttcgtccgtccttttcctgccctccccctgcgacaagtgcagcgccttccccggcctcctactacctccctctgccccccaactgacacacactgcgcgaatacctttttcctgtcttctctctcactgattctcgcagagtcgattctcaggaagatcgcctctcaaccgtttctataactttcaccttcctgcccttcccttctcctccactccccccttctcttccactccccccttctcttccactcccgcgcctctcagcctcggcgccatattcgtcttcgcctgcttcgcctcctctgcgtcttctcctgggtgttgttcttctgtgtggacgtttcgtagcgcagggctgctgagacgctgcgctgcggtttctgggcagagcagcagtggtttttttttcgccgccgcgcgttctccaaga

SEQ ID NO: 967 - DNA, 2271 bp, Toxoplasma gondii
  source 1..2271: mol_type = genomic DNA
gtccgttctgcttcaaaacatccagcaagagctccctttcttggtgccgctctgcattctgcgtcgccgccgcctcctccagcctccgcatgcgtttcagtgcggcgcgcaactcccgctcgcgccgccgcagcacccgctcaagcgtctgtttctccgcgaaaagatcccccgcctcgacttggccatccgcagcacgcgccggactctcatcttcgtcgaacagctgacacggcttgggagctgtgcgtagacccaaacttggcgggaggtctccggcggcgtctgccgccgcgctcgcgttcttcgcaccagcggcttcgccactgcgccccgccgagcagtccgcatttgctttctccgcactccctccagcttcgttgctgcgaccgcggctcggggtcggaaacgttccagaggcaagagtcgaggtcagggtggagaagaaggaagaggccgccgctgccgaagctgagagcgaggcggtagcagcagctgcggccgaggtagcggcggggctctggagagacgagaaacctgacggctgttgagaactcgaggaagacctcccaaagaggaaagacgaagaaggcgatgcgccgagaggtgactcattcaacgcgcctagaaggctgcttcctgatatctgcggcatcttctctgagcagggcgaagcaaagtacatgcatctctgcgcagagtaagaaactcgttttcgaccacataacctgcaaagacggccctaggcgccccttcagagaaaatagattacagaaaggcggacaggggtgaaatgcatgcgaggagatgttcgtttcgaggcgtcgggactgagaggctctctccgggtgacgaagaccgcctcaggcgctgtttggaacgcaggaaagggaactgggtgaactgacgacgtctggtgactccgtgaagaaaattctgttggtctccacggacggagaaacaccttgaattatcttttcttccacgagtttcttgggagtcaagcggaagaagggacgctcgaggcgcgcggccgacgcaaggcgcgcactgcgttcttggaaactcacaaagaaaactgcgaaaaccgatctcccagtaggttccgcacagacacccccgaaaaggatggcaaagggtaaaggcaagcccacaaaggccggcttggcatttggcatctgaggaaaacagagaagcaggcgaaggcatccgccgaaaaagagtcctagcgcccggtcatgccactcgcgaggacaagactcaccagagacacacatctattgagaggaaagggaacttggagacgagagaaaggagattgagaagcggcacggaagaccaagccttaaagaatagagaaaggcgaaaccgacacaaagatgtggacaaacgcatcgctcagacagcgaacggcctctcttggaaatccttttcgacgcatgcagccgcgcgcctcggagctccgcttttgagaggaaatcttctgggttttcgcgcttatgaccctcgaagaaacacacgctggaaatgaatccactatttttcgtgtctgcatgcgttttgacaggcgtagtcaaagaatagtgcgaatcgcagcgggttcggaacgtctggcgggtcctgtagaagcgaacagtacgagaaaaatcggcggcaaaatcgggccttcgtctttctgcgcacatttgttttctgttacaagtgcagctatctctctggacttgtgcaggtatatattgacacactagactcactccagcccaagaaggtatctctgattcttattgtacgcatactctgtgtggctatccacgctacgctgcctcagagcgcagcgcttaatcctttcttgactcgtccagaagagagtcgtctttgttcgtcagtctttggaggcttccttcctctttatttgagaagcacatgcaaggcttctgcttccagtcgaatttcctgggatgcgggcttgaccgtcccggtttcgtgcgaaagtcgttgagtgccggaagcagagttttatcccttcgtctccaactgtcactcttcctctttcagtctctcagcgtctgtctcccaccgtctgtctctctccgcggctgtcacgagtctattgaaagagagaagagaaaggaggaacggaaggtcttctatccatgaggactcgcaggaggcgctgacagcaagcagccctcgtgtgagagggcggccaagggaggccgagtgtacagacagatggaggtcgttgctttgcctgcgattttcgtgccgaaa

SEQ ID NO: 968 - DNA, 1607 bp, Toxoplasma gondii
  source 1..1607: mol_type = genomic DNA
tagagaggaagccggaggtgtctccatcgtttcgatctcttgactccgctgtctcttcgctgcgggggacggtctctccttgaaagagtgacgaaacatctttcctctcttctgctcgatgcgagtatacttcctgccgctctctctccggtgaaccaccagctttcagcgagctttctcgcgaatcaagtgtctgcaagggagacaacgtcggcgcagcagagacagacgggggaagaagaggatacagagaaggagaacaaagaagagaaacgagaacaagagaagggagaagcagagagagacgagaagaagagagagagaggcgatagggagacacaaggagatgaaaagagggtaaaggacagcgggtgctggctggagagggaagagaagaatggggagaagaagagcgatgtgcctgggagagacgcatagaataagagggaggtaaagaggaggaatgagaagaggaaagtgaggaagggcgaaggcgcattgcgggaggagacagtgaagaatgtggtaaacacacgatttttttcaacggagaagagagggaaagaagagcacgcgacacagtgcacaaagcctttgattcagatcactcacgcaaggatttcactggtagcagcagcaactccagaaaagacagagatagaggaagaaggcgaacgaagaaggtaaacagaggtaaggaaagtggataaggaaagacgaaggcgaggaaacaagaagatgagaagaggagacaaagaacgacgaagagaagagatgcggagagcagacgaagaaagtggaaagcgtggagaggaaaggctcgggagagaagaagatacggaaggaaggacagaagagaaaaagaagacgagtatggaggaagacgagtatagaggaagacgaagaaggcagaagatgaggaaacaacgcacagaccgtaacgagctgatatttagtcaagcgcattcgatttcgtggcgaggaccgacacactccgaaaagagacaaaacaggagaatccaggcaggccaacccctctaaagtgagagtgagaacgaggaagtggagttcgagtcaaaaagagaaaggattcgagctgtacagtgatggaccggcagccagccagaagtcgcgctgcgcagacaagaccgcctctggggggtccacacggggactgcaagaaagggaggacatctgagtcacacattcgcctcgaagtgtgtgtccaccgcgccgtctacaagatcgaagaaaaacggagaaaaactagcaagtagaagaagaccatcagagagagagggaggctgaaacgcgatgcctcgtcgacgccagttggggcgttctttgcgctgtcgatgcatgcacactcggttcggcttttctcggttttccctgcagcgactttttgcttggatttctgaagttcatttgagaagacgaaacggcagtcgagcgaaaatacaacttgacaggaagaacagctgggcctgagtcgcgggcgcgccccggtcacgctgatgcctgacaccgaccgggagacaaggaaatcgcggatttccagaaatcatcctgaccttggaaccaatcagaaacacacactccacgca

SEQ ID NO: 969 - DNA, 2365 bp, Toxoplasma gondii
  source 1..2365: mol_type = genomic DNA
cccacccaaaccgtcaaatgtaaaacgaaactgaagccgagtagatacaaaaattacactaattcgttttgatgtgaactgtggtcgcgtctcatctcccggtcgtctttgttatcgcagtgtcgcactctatcagaccttccacgtacaaaagtgtgcaccggatgtcagctgttgttgctacgaaaaatatttttgtgtcgtgagcgtcagtgtcaagaaaacggcggttctacggggtaggcggattaacaaacatagggcatgccttgtacctcttttctaagctaaacacttgctcccaagtgtgcgagaacaagcagaagtcgaggcagaaagtggctgacttttagagattcaagcgccttgttgcggtctcgcgtttccgacggtgcccggaagactgccaatggtatgtgaatcttagatacgaaaccacactagagggtaacgttaccttcgtgacacggactttccagtttgctattgccttagtaaaaaacatgtcattgagtcagtggagaaaaccgggagaacaaaatgacttcgacgtgccttttcgaagattgactcctgtctatgtacctgtccaatatgggagcagataagatccagcttcctagctcttcggtccgtgtagaaccgtttgggacagacgcttccgacaaaccttagtgcttacgaaggtttcccgaagtctctcacttacttgccagaggcgaggagcattgatggaactgttgtttccgctgattatcaaggttgtgtagtgggtgagtaactatatgttgacccgtgtcatctatgatcggtacggggaacaatgcaacgactgccacgcagaataacttcgcagaacgactgtagaaacactagatatatagccccacattttcgcaactgagcacttttcagtgatgcccgcatgacttgttagctgcatctcagttactggtgaaagcgtttactgaggtgctgcgatcctggtgagaagctgcagtcggttgtgacttctctcaccgtaggcacctgcgtagcagtctgcttgagggattaccgcaagaaggaacaggagaacgggtgtttgtgaggttgttttctgcacggtagtttgttcgaactgaaatgattagtcgttcaccggatctcgaaccgaggctggtgcctctctcgacggcatttccataaacggactcgtgtgattgaaaaggacagcttatttcgctcggacatattgggttgatccgtagtgttctttctacacatatgtctcaaggcacagcgtcacggtggttatgaaagattaatgcaacgcagatggcgttccgtgccactgtcagcaacaaaaaagcgaatgtcgtttgtcgctgccacgaagctcgaaggcagtatccaagaaaaggggaagccggatattctgaagacaaagaatacaacattttactcagaaacatttgcaccgtgtatttcttcggctgcaacattcgttgtgcacgtgatagaaaacaggagaatcgatgtttagtccttaaagaagcgttgtctagctgcagacagctacggaccaagttgactcatcgagtccacggcggtgaggggcggcgactcagtagcaacacagagccataagtcgtccttagtatttttgagtgttttttagtcgtagaattaggacgagaataccgaaaaactgaaaagacaggcaaatactgcagtggaaaggacgaaggatatgcgtcaactatgtcgcgcgcaggaggccggacgagggtcgcgcgggtcccccagccaagcgtatcatcggctttgttaagaacaggagcgcaagaagaaactccaaagcaggtgaatcgtctttttcccgtgccgacacactttcaggttctagaatctcaattgtgtttgccttaacctagtatcgagagacatatttctccatcaacaatgatagcttcccacgttcggacgaattttcgccttctgtgcttgcaatgaagaggaccggagctgagacgtttcttttttccttgagagaaggactcgcaaactccttgaaggagatcagctgcttcggcaggtattcttcgtttctcggcagaattcgatactgacggttttccccagtgtcactctgtcattttgcttgcttgcgagtgatcgtcttcgtgtctcgtggatgtttgtgcttatctgtcgaaattcgcctatccagtcagttgatccatgaagagccagccatcgaacgtctcgaacccacatgcgtaggcagccaatgaggcagactgcccttgtgtcttgtcacctttcctcgattgtgtttcgcctcacgtgataagtcgtgtattaaaagtgatcgcgtccataa

SEQ ID NO: 970 - DNA, 760 bp, Toxoplasma gondii
  source 1..760: mol_type = genomic DNA
ggccgaaaagcttcgcctcggtcgccatcttgccaagctctcacaacgctagatctccttttcctgtcgaaggcaagacagagacaaagagtctgccatgctgcggatccatcctgtcgcagacgtacgtctgacgggggcctccaacgtactgggcaaatcaagcacttgctccatgagcgcacgcgagttaaggaaaaaaacgtgtacagacaactgcgcatgcgtctaaatgcctctacgtccacgtcagtatacgtataaacatttacatcacaacagaaggatgtgaatcctacgcgttgtcgcctccaagggtccacagaacagcagcaagcttcgagacagacgatcaccgcggcacataacgaattcaacattgagatgaaacagtctccaaactgtcattacttgaacacatacttgacacctgaaaataatctgacgaaatatcagtccgatgcacgaaacagctcccttggcagatgccatgcagctcgagtggccagcccaggtcggcgagtgcatgccaccacaaaacacgtatttccatgcagcaagagggctgaagcagcccctatacatctattgagaataagttaagatttagaaggaagcgaggacttctatcacagttacacacgggagcaaggaaaggagctcagccgcgtctggtctctgttcagccactgacgtcaacgataggaagcagtttctgggaatttccccagtccgtctaactgaactactcagcacagca

SEQ ID NO: 971 - DNA, 4117 bp, Toxoplasma gondii
  source 1..4117: mol_type = genomic DNA
cgtctgaatgtaaagctgcttgagtggacgcaacgctttgctctccgttcaaccggtgtttccgatttcggaaacgcaatgaggaagcggatgtaccaaccctttcacgcttgctctcaagcttgctttcaaactcgacctcgagttttcgtgtctcagccggtcccagataaagatatcccgtatacggattgtgtcccaacatggaccgtgacccgcttcctgtaccgttctctggacaccagtagagcttgtttccatttgttgacgcgtcccttctgctttgcgtttctctctcttcgtccctggatgcacagccaccgctgctgaggcgagactcagagtcttcctgtctgtcgggttctcccgatttcctcgcaagagtgacgtggtcgcttgcttctgggaggaacccatcagacaaacagtcaaaaacggtcccagaaataccgaaaaacttcttcaaaacactctggatcgccgccaagcccgaccgcgtgcttctctcaatgaagcaaacgtgtctgtacgggcacggtcctttcggcctcgtttcttcattctgcccctgtgcgcgtactggggagtaaaccccacagcctttcttcagattcacttccgacagctccgattcactttcttccgacggtttcacgccggctgagtgagcgaccagtgaagactctggactcgcagctgagacgcttctataggcatctaagaagtcctggctttcagttgcagaagatagaaaatcacagccattcggaaatcttctcccttcgtccccaagccacagcggccggtgaacgtgcctgagaggtacgcgtagcggagaagtgcacgacactgtagactgtatgcggaaaggaactgctgctggatgtctggcaatgaagggaaccagacttggcagcagttcgacggcctgaaaacagacacgcagaccgactggagaactacccagttccacggatagatgaggagagtgcgtgaaacgcgtacaaactttcacactttatgtccgtacatcaagtgccaacagtatccagctttggactacgtctctcgttaggtctcagttttacaggttccttccagcaaccctcctcccagatatgtgtacggtccacacagatgaagacgcacgctgttttacttccgttttcaagcagccgaaccagcggcttggcctctttcaaagaaacctgccgttgtcggggcgtcggtttggccaaaccgacgccccgaaacagcgagcttggagtcgccacctgtttagagaaacgcttttctgttatacagtttctgcagcagcgtatgcttttgtatggtgacatcgtggaagtgtgttaaaatggcgcttgcctccccttggtacatatcaaaaatgcgcactccggtttccacggcctgcccagctatgatctttctgttcttgatgccagctccaaagatctgtacacacgctgtagagtatgcctacaaacggtttaagaactcggacaatactgctacgaagaacagcaaatcccgcaattaggcaaacagtagcctcacgttgaagagccatcaagctggtacttaatggagggtacatggcccaaccccaactgtgcaccgctatttctgcacgttacctgcatcgtcgttgctaccctttcaccaagacggtcgtcgagtttttgtgcatggccactcgcgacccgaagaagaagggcagcatggagaagccccagttttcgctgctcctccactgacggaaatgaagaaaagacgctgcttggtttctgcttaggggcaacggatccactggaggcatcgttcgacgactgggatctcatgttcaaacagaaaacggcgatgtcggctgcagtacccagtgagcgcaagcagggacaaaaatgcgcattccgtattttgcacgagcacagaattcctccgcagaagagcagtgcagtcgtttcgccgtctaccactgattgtctgtatcgtgcgggaatcccagacgtggatggagatgccgtagtgaccgtcctagcgttggcaccggtgatacccaacgacgtgcacgccagagggtcagaagcaaaaactacgaaaatctacacacagtgtatcatgcattctcttcatcctcattgccactctgtcaccattccattttcgtgggaaatacgggcatgagagcgaactcattcgctgaaagttgagagcagacaatgaaaactacttgccgcgcaacacgggattctccaaggtcgaagatagtaccattccaatcgccttttgtgccacccgtgctgtgagcaagctgttgaggttctgcatattttgtggtaagctattgctttcatggcttcgaagttacgtgcggggatcacgctgcttactggccaggagagagggatctggagaaagtgtgcgtccgcattcacgaagggattccacatcgtcatgtttttcacgcagtatcttctccttttcgagaaatcggccatctcgtctgcgaccaactccctcttccagtaaaagagatatagataagttcagcgctgccgagagagaaattgtctgcggagagactgaataagcgaaagcggcactgtccgttgatcccgtttgcgggtctggacgagaatctatcgaagaagccggcgaagtgcctatgcgtaatatttcgccgcgaaaccctcccttttccgtgttatgcattccactgcgtagcctttgcgtgagatgctctgcgatttcatggaggccaataccgtcccttccagcgcctaggacagcgaatgccgcgtagacgttggcaagatcatctaatgacagcactggcaacaggggcagcgcctcgttgaaaatgtttttgagaacgacagaattcctaaatccgcagtctgccagtgcacacgcaattgagattaacgcttgaggactcgcgacccgagagaaatctgttgcgctggcgtacatttgaaggaattctgaatcaactatgccttcccgggaaaaatttgaaagaagagcctgagaagccacgaacagcgcacagatacgaatgaatctcccaacacattcacggcttctccggaccaagatggtgtaccagtgcagagaagcagagaaccagttctgcaaaaatgtgaggtgctcgtgaaggacgacagcgtctgatgtggagggattgtgggattgaacctacaacgccgattacgcgtgtacacaaggttgaaccacatcctgtgtatgctttgatacagtcgctgacgcggacgacgtggtaacagggttttgcaacaaaaacaatgttggacacctaaaaattatcaggctgctcagggtacacacaagtgtgtaccacagcgacgcagcaacactaactgggaactaaaaagcaagtcgcttccagaacacagaaaaatgcagcagcgatggggacaggtatcctgcctcatcctcaattttgggttctggaagccattcagagcagattcgtgataaaacgcgcggtgaaagcagagtggaggcgctcacatctccggcaaattgcatccaacacttggagtgaatgcccctacgatgacatctgaagctactaaaccccgcaaccacagacacaggaactgtcgtaccttccttaggaaagaaaaacgaatgcttggtcttccggcttgtagccgccacaccacgtaaccacaaacaaattgaagtccacaccttgctgaggaatggaaacgcatgtctgcttgtgcggtttcctcctactgacgctaaagcttacttgtagatggcgctgcttgtagagatgactattttgtctgacatgcagagtaaggaggtccacggtagcgccgctgtggaaacccaagcgtgacaaagcgtcggccaagactacgacgtcgtcggggtagaaagtcagaagaagtcggggtagctgggcaatcagccgagcaactagccagttatctttgacccctaatgccgcacacgcgcttaaaaccacgcagatcgactgccaacaagcaaagcgcaatgaagacgaagaataaaatgtcaaggtgccacaattcggtcgaagcagagtaaagcaagttgtgctatgtgggttaccatg

SEQ ID NO: 972 - DNA, 4830 bp, Toxoplasma gondii
  source 1..4830: mol_type = genomic DNA
actccggcagctatagaaaagtgaatagatctaaacagatagtagatggataaagtggagatgaaggatgtatgaagaaaattatatatatatatatatatatatatacctttgaatttatggagaggctaatcacagcaccacgttcaacgttgctggcttttcttcaaagtaaatctgtgtagaggatatctgaatcggattgttacctcagtccactttgtcttcgtcatctgtctaggagttttcggatgggagaagaaacttcgaggtatgagtgagagatactctgtacacgatgtggattttctgagtttgaacatcacgaaacagaaaaggaaagaagcaacagggcgtagcgatggtcgtctttcgacattatatgagcacatttgcatatacaggtatgcaagtatgtacaaatgcgtgtccagggttgtgttttgtcgtgtatgcaggaggacgtttctctctgttgatttcgcggacagtctcctgtgttttgttctgaaggacgggggaacctcgtcttgacattcctggcttgtttcagctgaacgcctgcttttttgtctcggggaagtagagagagatatgcggataagaaaggatgtttgtcccgcagtgcgttcatttctcattggcaactttcgtttaccgattccaggaagttcccaaccacgtgcaagttcgagtttcttgtagtttcaccgccctcgcgcctcgcatccgccagcgcctgcttctgccgctcgcccacgtttccagttggtcgtttttcgtttctccctttgttgggatgccagcagaatccaccttctctgctcgttcgctcggaaacgtttgtttcggtatcacggaagtgaaaaaccatctcgtgattgcgcacgttacatctttgttgtgcggtgcgtggtttggggtaaatggtactccagcggcaagtcaagagacgaaaaaaatgtgactgcatttgtctttccggcgcttgtttttgcttttttggcttcgcaacaggctctcgcacaccactcgcgaccgtccagtttatgatttcgcttttccttttcgtctagagtcgctgcagttaggtttcggtggatgcatttgcctcttgtcatcatcttagagacacgcgatctgcgttccctccttggaaacgaggacacacgaacgaagctagtcaagtctatcgcacaaaacgctctttctgtgctttcttcgattctgttttggggtttgcatcccttaaaactcggaacttggagagccggagtcccgacgtcccccaatttttttttctcgaacgccgcgtttcccccctcaagaaatacatactccgttggatgccgccattctgcacgttcggcctttttgacaagtaggccgtttttatgttttcgcagaaaaaacgtgggtgtttcttctagacttccaaggcgaacaagtagacgtgcttctcgtggctcaacggtgctctgtgcttttcgaatgcggacaactttttcctgtctcaagcagcgggaccccccctcttgcgcgttttctcatttcaatgacgctttattccgaccctcgtttctgcgagaggcgaaaaattctcatattctcctaaaccagaacaccagtcaaagctcccccccagtggttgtacagcctttcttacaatcaaacaacatagagtttctgtctgcatcgacaagagacgggtgtttcttcggatacacatatctatctatatagactcaaatacgtattgcgtcaatgtccgtgtatatgaccagggtacgcatgtcaaagtatgtacgagtgctttttaaaaggacttttatgggaacggaatagggcaatgtcagttgcaggttttcccctccgacctcaatccccgcaatccatgttccgttgcacaagctgctctctttttcggttgtttcttttttgtgcgttttcacagccatcggctaaaattcaaggagcatctaggtgagacactaacacccgtttgtttccgtattccccggcctgaacgcggtcacacagttctcgctgcatcctgcagttcgcgccgtctccttttcatttatcactagttacacgcaggtcttgacgccgatgtaaagctctttgttagagagtctccttcacgtagaacagagacaaacgctcgtgttatcctcgcaggcggcagaacctttcacctttccattttctcaacgccgtaccgcgacgtcttcaaaagctgctttctcaaacacaaatgctgaagcgaacagatgacacacacttccgaaatactgctaaccattccctcaatcagcatgcatacccacgacacactgatacaatcgttgtacaaggactggtccagttactgagagacgcacactgtgcagaaagaagtgtgcttagtaaacaacagggcgaaacaagttttcacgtggagttttcgtctcctgtttactctaggaggtaacgtagggaaactcgccttgaacacaccgttcgttacgtataacagagaaacatcacaatttacattgttaatacagaatatcaaacctctgggaagccgtgaagactacgaagttatggttttgggccgcgttgatgtacactggtgcaagggtgaatttcgaagttgctcattttgacggcaggtacgtgtcgtgtgagagcaactctatagaggtagggtttctgtcttgtttgcacgagtcgcgtttgagtcgttttccggtgttccttgcagactggccgacaaaagatgctactgttctggccggttgtagaacaccgaaggagtgttacctctgcactttgccgttgtttttcccgtttttcagttggcggaggtggcacgggagtcgcagagtttcctgggtttcctgctcgctcggagccggtcttcgagattcagtgcttgcggtattttcggcatccatcgctactaaatctggacggagaatatccgaaacagggtaagccgagagttagttcgctcttctgctgggagcggcacttttctgcgcctgagagaggcacttgtccggtgttcgcggcggccgcgttgcgcggcggtttccgtgtcggttgtggcgtgtttttcggcgtttctgggtttttttatcaaacctgcttctgcgagcccactctccagcgacgattcgaggcggtctcgcgaaaactcacacttttcccgggggttttgcgaccttcaccgagtcgtgtcaaccagcggctgcacccgccgcgggtttgagagcgctgcgcccgcttctggctcggttctgcgcgcgcgatgcttttttttctgaggattcttcgagaaacgcgtccgtttttcgctcgttttttgccgtactcactggaagaagcagcaactcgaccggacgatcgagggcgagcgggtggcgcggcttttttccggaagttccgctgggaaaatcgcgaaaacgctcggcgctcgccccctcacccgagcgctgagaatccgacgatgtacccagtctgctaggtcacgtgtgctgtgtcgaatttctgcaacacggccgccacgctctctgcgagtttgatttcttttcggcaaaatcgagactgtgccctttttgcgagggcgctcgccattcctcgtcacatagagaaacgcgttttctccgctctacagaggctcgcgggagcttcgcgttcctgccatcccaatctctaccgcacaaacaacggggcacgacggaagcggcattctctgccttttcatcttcgtttgtcccgcgtttttgcgggaactttgggttttcgcttgctttccttgctgccgaccggcttccgtgttcgtgtttccccgtggcttgttttcttcgcggctctcggacgagaaccgcacgctccttccttttcttgtccagctttttctgtcggtcccgcttttttcgtgagcctctgggtttcgcgtttttggcgcgtgtcttcttcgcgtcgaaacctgtgccttttcgccctgtctctcccccgcgagcgcggtcctttctctgcgattttctgcttcgagaaatagctctgcggcctctgcgcgacttccctccggtggaacgcgtcgctttgcggttggacgcgtctgcctgtcgtcaggctttttttgtgttcgtgtttctgtcttcaggtttcgacgttttcgtctttcgaaagaaactccggactgtttggccgccgagctcttctcagcctgactggccttcctctcttggcttcgcagctcctttgttgacttcaccttgtcgagtgtatattcctcctacgcagatatacgcaaatgcttgcgtgatctttatttgcgtatatgcacttgcccttgcacgcatacgtttttctgcgtgcgtacgatcctgttttcgggaggccaggtgtttcatctttgacgtttacgcagctcttttctgtgtccctgcaaagacctttcctgtctctgcgagataaacgtgacgtttcccctctttcaacttgtgtacggccttttcgtgtttggtgtcgccgacggcgctctgatacgcaaggctgccgcgcagaggcgtctctggggtccaccgttttgctcgcctctgttctggagaggcgcctgtaccaaccagttcgcgtgtacatacacccggtgtcgtcagcttctggagaaagacttgtggcggcccgtgcctggagggtggacctctaggagtgtcagacagttgaggattccggctttctgttctctcgctttcgcctgtcccgttcgccgcgtccgtcggacgcctgaacaacgcttttctcgagcgacgtcgacttcccgccgctcagacaaaa

SEQ ID NO: 973 - DNA, 2173 bp, Toxoplasma gondii
  source 1..2173: mol_type = genomic DNA
caaccgtccacgagacttttggcgcgaacagtactgaggataccatccgccgctttaccaagcctgcagcaccaggaggaagagctggatcgtgacgctacatgtcggagagtctctcaacaaacaatgactctccatcactttacggaatgcgagtatcaccgtccgcgtagcacggacgcctgcagcacatgattcacatcgctccctgttgatctgcaatcactaagggattatcaaagcatactcaacttacctcagccaccagctttctcaatttctgcagtatttgaggagggtgcagcagcttccagtcacatgcaccctggggaaactttttgccactttttgttgttatgagggtcccgtcgaggtcaaagagagccaggccggcacatcggtttttcctgcagaacacgtctttctctgtgcctcggtcttcccgcgaggaatcttgtgacgcgctctccatagtaggattcactcgtgcgcaaagcctagggacactccactgtgtaaatagacacccctctccacttccagaggcacaacagcctggcttttctgctgagttctcccgcgctcgcttgtatccggtaagaagcgctgagatgcctgtggcattttctgatggttcctttcgctgcaattcatcacgactggctgtttgagggccaggagaggtgctagctggttgggactgtacaccatagaaccgtgcatgcgcttgcggacagtagtgacgccaccagaggcctccgtctacacagtgccaaaagggtgaagaaggcaacgcgacttgattaagtaaacccgtggcatctgaccggaccggagtcttcgccatcttcgccgacggctgcatggtcaagaaccgcctctgctctgcctcggaaatgaccgcagctaatagagacagaatcaaaattcatgccgtgagagacgccaagatatatatagagacgaggttaccacacacaagcacgcactagcattgagccacgttggagtgtgcagattgatgagcaacagcacagcaagacaccttcacacgcgcattccggggcaacactgggaggatagcttcaaccacaacactctttgactgacttgacacttccagattcgtgaggcactgagacgcacagagcacgcgtacacaccaggcaaccacaatgcagaaacaatttgtctcgctgcagcgtgcggaatgactcggacagcgccctacagccgctgtgcagaccctaccagccatagagcagtgatatttaagtgattcgctgtccacaccaaacttcggaagtcataccggcgttggtagtactaaagcgttcaagcttaagcggcaagccccaagcttcccatgctggctaccggctatggatgaagctcacagaggacgcttatgccgagttctgcgtgcgcttccgcgtcgtcggcaatttgcggatgacggaagtagcgagaaaatagacaagccgaaacacacctttttcttcgtcatcctctggctgccagaaaatggtaatgcctagaaatgaagtgcgtagttgatccgacatactcgatcttcaccgcgcatgcgtgtgaaggccacccgaccgcatgcacggttcaaagaaccagtcgaagggtttcgaggcattccaagttcttccctctttgttgtttcttttgcagacaggaactaatgccgactcagctttttttagttgtgtctttcctcttcgtcctcatgaacaacgctcgtgcactgcccttttcttgcgagctttctctacgggttgcccgctgcaggcgctggaccgaatccagagggccttcgcttcctcatcaccgtccttgatgtgccacgcacaggtctgtttcgggcgtaactccatgctttttatgtttcatggtctgtagctgcttttttgaagtaaaggtggcacaaaaacgagacgtttttagtccatcattccgtcgagtgcgaagactcacttgcgtcttaccgcctgcggttgcgaatacagctcctttctgcggtgatgccccggcgaagcagccacacgaaactctcagtctttgaggctgtgctcacccgtttacctccacgtttttaaaggcagtgtgtctacctgaggaactgctgacgcacttacaattctgaggcgatctaaacagacga

SEQ ID NO: 974 - DNA, 3583 bp, Toxoplasma gondii
  source 1..3583: mol_type = genomic DNA
gaatgaaagcaaatgatatgttcagcaagcgggcttagcagcggatatgagtctgcttgggaaggcctgttatttgggcgagggtaatgatccggggcagccttcgggcgacgttcgtttttgctggccagctgtcgtgcaaacagtagttccacgctgcgggggacaatgtggaaagcgagctgagtcgttcactgtgttcaccagtatatatgttttttttgacttgtaagctgagtttgataggtgctatgtcggcggacagaagtgtacacccacagtgtggagggtcgacttcagtgaaactggcggttaccgtcaaaagtccatatgtgcaaaggcaatcagtgtatgagtcagattttattgtgtttcccatacgtcgaaattgaaagactggagaaagggatccgaagccacttatattcaaaagataaacgtgatattacgcacgtcagagtttttctcgtgataacgatggactgcggtgaagcgtgaaaggcgaaaaataccaggcttagcacctaaaaggagggggcggaagcagaagcggtgaaagtggagactgcctctcgccgtggaaattactgcgaagagcagcgagttcacgccaccgcttctacagacatgaggcgctccaatttatgtgttaattttacgagtttcatcaccctgaccgcaggcgcagttaaatgacgcgtgatattgtactgtagtatagtgtaagatcacatcatagtttctgccaaacgataccaacacattccggttccacacgacgaaaacccgtctgcactgtagcgtcattgcttccttcatatacaggaggacacccctacaaaatgcatcgcgaaattcccgaacgatctccagctgcgcagtaaatgaatgtagcaagacacaccagaaagtctggctgcaccacaactttgagcttcagttgcagttatgcctcttctgcctatggcgtctgttcgatggcagcattatttgccctggatattgagtctagctgctgaggcgatattggttcaacagtcgccaggtcttcttcggatggaagagcgagcatcgggtaggttgcttccgtggaggaaggacgcgtcaccacaacgggtgatgggggaacaacaggatatacttgcggagttgagggagctgcaactcttgcgggttgcacttcacttggggcgtagaaaacgtcagtaagatccattgcctacagttcaacgcatgtggaatgatttactggcgctaatggtggagttggagtgtcaacgtacagctcgaagcaccggaatagacacatcctctgttactgaagcacggaatcctctgtggtccgactctggattcgcatcatacaacgttacctggtagaatttcttccgaggaaggacactttttcttgcactcctggtgccctataacagtttagagaccacatggtgctgtgatgcgcatatgaggcttaccagatgagtacggtcctctccagcaattgctaacgagtgcttccatatcgctcgctagaagaatactcatatgaaggaagctgcttacggatagcggctctcctcataacacagcaaatctcgcaagggatgctggcgcattcctgtaagcacaaatatatttgttgaactctccctacgtaccctgtcagatcgacctgcctcagcttcctgtgacgtagcagtcgaagacagtgcggcgcacttctctttcatggatgctgcggcgaagcagagagatcattttccttgctgcatgtaaccagcggtgacacactcacccaagcggctaaacgagcaaccgcacgtcggcgggactggctcgcttccagcacgagactcgtctagcaggcaagctgtccctgggggtcttataggtcctcgtcgctctgactccgaattgcaaatatgacgtacccttatgtacatcgacgatagttgcgtacggaccgcctgttgagaggatgcccaaatttggccggagattcaccgcctgcaccatccctacccaaccaacaagcaccgccacgagacttttcatcttgttgcacggatttagaaccgtgaaggaagcatcggtcaggtacgtgctctttccaaaagtcggtaatgaggccagagatgctctacggtgagatagctcaccatcaagggagaggtgtagtgacactgttcttcgcggcaaaactgggagcatccgtagattcgacccgactgtgcacacgaacccacagattccttctcggcaatcctatcgtactggaccagtaatacattctccttgcatcttaaacggtcgcaccaccgcttgcctctcttttgtatttgtgactgaatctaatagtcactcaaatattgaaacgaggcttatcctcctgtggcctcctcgtgcacaaccatcagacgatgctggcgacgcaccggagggaccgtattcccaggttaatgagcaaagagcatgttttgcaacgaagaatcactcgctatcacgtgtcaaaatccgtccttggacgatactacggctgcggacaacgtcatgtacagaaacggatcgtctgaaggtattcatcgaagacagagaccccagatgtgagtatggctacgagtgtgtaagcaatgcgactctcaggagatgcatctgagaaggggagatttgacgtggctattacgttagaatccatatctaacaaaacgctgcattgggctacagcagggcacctacgatcgtgttcctgtttacatcgtagttccgctttttgtacttccatgcaagtacactctgtgtcatagccaagattaaatctggcataaccaagatctgctaagaaaaaaactcgctaaatgagttcttctactcgttttatgacggaaattcttcacctgtgctagtgccgccattcactcgttgttttgaacgccagattggcgggactgcatgcgcccgtccatttaggaagcttgaagtgggacaaccttgtccacatctattcgaacatcagcaagaagctgcggcaaacaatctctttgtccagttccgaatcgtaaatcagactgttcccgattccgcgggaaactgtgttttccctctcagcggaggaggggctggaacacctccgggcaatccccaaaccctggtgcgttcttttctccacgacacggaagacctcagcagtacgcggtcttagaagtactgcttctcaaaaaagcgcccatttctgcattcatgcgcatccaatgaatctgtacctattttattgacatgcgcttgtgtattgcgattcacaatccaatcgtattgtttcctcggggcggcgaagcccggacgactcgggtcttttcagctgccccggtgaagcgtcgtgctcattttgaaagaatcggtaatactctgctttctgcctgttctttgtctttaccttcaacacctgtataattctatgtggcacgtacccgtcggactccactttcttcttgccggcggttcaaaatcgtctcggagtttcccggttcgacaacttcttcccgctgtctttgatggcccacttgcagatgtgctgtgaaccaagata

SEQ ID NO: 975 - DNA, 2034 bp, Toxoplasma gondii
  source 1..2034: mol_type = genomic DNA
aggatgcagcgagaaagacaagaggaaacggaaacgaggcgaaactgagagaaagggggacggcaggaaagagacgaaccgaaaaaaggagagaaccttgcaaaccgggaagctgcgttttcgggggtgccactgctacatgttgcatgcgcagggacacactcgggtgtacgtacatctcagatcgagtacggggtgtgcgcctccagacaggtcgggtgtacatacaccccaggaacacacactgagaggcgcagaagcggagatgcctgttggacgctttggattctgttttcagagaaggcgaaggcgaacctcaagatgagcaccagataacggagagcgaggaagtttcgctgtccagtacttagggaaggcgaaagacatgctcactggcttccacgtatgtcccctcagacagctggagatgcagacgatcccttgttcctttcgtacggagtgtgaaggctcgccctagcggagagaaagattcagtcactccgaaaacgcagattcttgcgtgcatctgggtttgcgaagacggtgtctcggtctctgccctctggtctcgacgtccccccttcacgacgacggggtgtatgtccacctggaaagcgggcacggaagacccttgagggtggaaaacgaagagaaaaaaaaccaaagtcgtgtgcaccgactcgtccttctctgtcctctcttttgtttcaccacatggaaggcgaaaaggcagaagaagactcctcggcctcgcgttgttttcgttgccagggtctcttttcttgtcttcttggcagcgagagtgagagggcagcgacggtagatacgaacgagcaacgacccgagaagaaaacggacaagacgcaagcgtggaaccgtttcttttttcttcgcactctctccgtcctttccttcttccgaggacctctaaaaaatccgagaagccaagaagagagctggtgagctggccttgcgtccgccgggtggcgacaggagccggcgtccagaaggcgttattataggagtccgccgctccgatgtgcaggagaaggtcgctctttttcgcgcaaaggcggagacgtaacgaggcgtgagaacgcaggaactcggagcgtgctggagtgaagaaggcgacagaaatggagaaaaagagaatggaagtgcaggaaagacagcagcgacaggctcgtgaagcgcgagacggcgccagcgtcctttctcgttcctcccaagccagcgcagcgaagacagctggagagttccgagaagaaaaaccactcaacgaggaagacgaaagaaaagaaccgatttactgcagcctgaaaatcggcttcgacctctcgcgcagggatggcagacagaggggggtgtgctgcgtgctgctgtctggctagtcgcgcccgatttgctgcaaatctcagattagccgaggagagtgcatgcactttgcaggacagaaaacggcgtcagcagcttttcaggcacgagacgaaaaaaactcgaaagaggcttctcccttctccttcctcgtgacgataaagatgtgaaaagccgcggatatcttgcttcgccatttccaacgtccgtagcgacacacagaaacacaaaaggcactcgtccgacttctctcgctgactctcacttgtcgccagcagtttcctcgtttctcattgtttccgtcctcactgtcgtctcctctcggtttcgcttctctcttgaaagcaagactctccggggggtcgccttctctcgcgtgcgtgtgatctctcccccccttggcggcgcaaaatacggaagagcagatctcaaaaaacgaacgttcccagcttgggttccccagccgccgttgcctgctggatttttcacctctcctcgacggtcgccactcgagtgaggtgtacgtacacctcacggtcgagcgccagcggcgccacggctgcctccagaaggcggcgaaagagacgtcctcttccgccttcttgtctggacttctcttctcgacatgcactgggaagaactaccgagttcagcaga

SEQ ID NO: 976 - DNA, 1511 bp, Toxoplasma gondii
  source 1..1511: mol_type = genomic DNA
cacatggcaatccttccagatgtacaactatgtctaccttcgtatatacattcagagagagagggagatatttatacatatatatatatatatatatatatatatatagatatacagaaagaaagttttacccgcaggcaggcatttctctgttacctcgttaacaacggggagtagacgatcgaggacgctgagccggttgccactgggaagtgccggcgttcgggtcacaaacacactaagttcagttttcggaatgtttgtatacatataatatatatatatatattacacatagagagcacatatacaataacatatacgttttatatgtatatatgtggattataaatatatatagtgagattgtatgtatgtataaatttatataatcatcgtacagataggcgtttggcagccacaacagactttcaccgagtaggacagatgcgggtgctctaatgctgcgttcagatctggcgtatcctcagtccctgtaagcgctcttgaaaaatttcgacatcatcattttacacgttcgtgaaagtcattctgtccctgtaaaagacacggactctggcaggcccaaaactccgcccgtcactggtcggcttatattcggcgagagtttcggcggcgaccgaagcgctgaatgtatcgagcaattggttcacatctagtttaggctccgtccgaaaagaaaccattgagtgcgcgcgcgttcgtttgctgcaaagtgctcggctttcttcgaacggacaaggggctgatccgatagcgtatcctcagtgtctggtggcacttttgaaggatttcgacatcttctttctaagcggagaacagcatcctggcgtttgtgaatttggaattaaaaggacgcaggctctctgaagaaaagtctctatcaagccaagcccatcccacgcggtatttgcgacctggctcgcggtgtccacgcccgccttgcgacgctcttttgcccctctgaaaaacctccggctcgcagcgtagagaggcgccgtctctgaaagaacgtccgacccgaccaggggatgaaagcgctttttcgctaaacctccacgagttttgaaccgccgaagtggactccaatatcactgcatttcgtggcttttcgaaaacacacacgaagccggatagaggtaaccggtttccgttgtcgctggctggctttccgtgtcgggcggctagagcaattcggttcctcgttttttccgcggcctcaaaaggccaagcgtgtcacaagattttcctctgcgcggccaacgagctgcggcccaacttgtttgcctttttttggcgtcgtggagcgtgtgtctcggcactgggtgcacaggctgtttatagcgtttttcgcggcgtttggccggggtttcggtttcttgtataagccgaattggaagttgccatgcttttgcctggatgccccgacagcagtttttgccctggcaggtggagctgacggtgcggaggcaacggccgattccgatgca

SEQ ID NO: 977 - DNA, 4758 bp, Toxoplasma gondii
  source 1..4758: mol_type = genomic DNA
aatagtcagggcatctgtggacgggtacatcattcgaggctggagagcaggagcagcctgcgaagtgaacgtggctgcaggcagacaaaaagggaaccaacacaacataacaacttgttgcacgcgaaggtctgagcgcgacagcataagaacaaaacactacaatcacacgatctgcttcaatgttttttctgctactgtctcttttttctctctctatccacgtcgtacaagtgacacgaatatcttcgcttttaagtcgcatctgcggtgaagtctctctgtgccccgcctgccgatgatgagcacgaacgtaaagaatgcggcacttgccacaaaaaagcaacctacaaccgacgccactactagcgtccccagtgcccacttcagcgtgctccttccgtatacacacagaaaaatccactccaatcgtgcctcgcgtagttttctatggtcactgcacacgtttcctgtctgtgaagccatgaaaacgaacgtactcgtctgcggaattggggatcccggaggcgggcactcgacgctgtggccgccatcgctgtgaatctcgttgtcggtgtaaacacggccttccatggggctggattctgtggcgaacaaaagagagacgcaacaaggaatcgacagaatctgtgtgaacgcgcaaatattaccaaagtccaagtgcagaccacctcgacacgtatgcttttatgtcgttagcaaacgtgtgcacattccctgtcaacatgaagagcacaaatgtcctctcggacggtgtgcatacatgtgataagcttctcgttgaggcgtttctcagatatttttcttttgacactgactatggcgtacaaacggctgaagacactggctggatatatatatatatatatggggagagacggacatatccatatactccatggtccacaacacagcccgacggccctactggataggttacatattggcacatcgcattaaccgtcgacagcagcacacgtagaacaaaagcataggggaaaactcagcatgggaccctagtgtgtcagctgattatctgataaattttcgcattgttctcataacttctttctctccagcacttcacacaggcggggccgcgtagcccagcccgcgtctcccggttcccgtctcggcagactttttccacagcggtgatccacgaaatggctctccgcaattagaaccatgcatctcaggaaacagaatttgccttcagaacggccgtcctcaggctataaaggtcatggcttaccaacttccaactgacgctccgaagcgccacagttgagtggtgtgccgggggagacggtaggggaagttggttgcgacattgctgctgacaatccctactgggtacaaagatttctgaaattccctcaccgcttagtggaaacaatttcaacaaagacaagtgcagagagagaggacgcgcgccgatacatgcctttcgttgggaacggataaggaattcacagccctgagggacgcggaagaagggagcaaaaatgcgccggagcaaagttgctgccgcgtcggctgaaagaagctttccatttgtcagcggggttcctcagtggtgggggataggaaggccgcacacgctgtagcgtacgtaatgcacagtccccaaacgcaccggcttttcccccccccccccccccaccagggggtatctgtaaggtctcgcaactttggaggacgaaacgacctgtcgttgtgtcttacttctctgttcacgaacaggagacatcatcaagtgctgtgcatactctgagaaaaccttgtcgcaggccagcccaaacatgaaaaaccgcatagttcttctttttgcagaagggagacatcgaggggccatagcgatggactgtcacctgaatgtagcctcataccaggaagccgcgccctctggagtcacaaatagactgaatgacagtcttcacccataaagaatgccgaagagaactatttaatttagaacagactggctgtcaatgatccctgagtacaatgccgcgggaagaaacctgctctttcgtggagccccacactgctcgtggacgcggcccttgtttcgtcatgcgtgcttgtctaaatgcatgaaacagtgtgtgttggtggagaacgggggcgcggctttatgtttgcgtttctcccatccggttcatatatggaaggcataccacctgcagcaaaacgcttctgcattgcctcgctttgctgccggtaaggtacttccgatgtctgttttttaagggaacgtcaccgtcgcccccacgtttccattgcggataagctcctgtgaaagctagtgatgtaaaattatagaacaaaaaagtcaatacagaaagaactccgcgagctcgtgatgtcgacgttactgcccttagaaacctcaaacaggcaaatacggatgcacacaattctgcagacttgcgcacgccaggtgatcgcttatcacgctcgatagtggctttgacagacacgacttttgtacacactagagtgctgggaactgctgacgcttcgaaaaatccaaacaggtgtaataattccatacgtgcaacatgctgatcgctaaaggctgctgatcccacggggacattcctgcttaccagcactacacaaacagatatttccggctcccgagaagcgtgccggcacgctcgtgatgatgccgtcttccgaggtacagctactggacgcgaggctatcactgacatttcctctgtaggcgagttatgatgagtagtagctcctggggtttggtggaaccttgcaaagtttctcataaaacaacatatctcgactctacaaaaatggccagccgtgatgagtctgtcgcctgaatgagctttgggatcgagcgcgagtctcagttgttctatattaagcaggacaatgtcatgctacgctattccacctcatgacaaatgcacgatgaatgcacgaaagaggtagggggagccagattcgctgttcttttcgttctggaaatcttgtatcaaatcaggaaggtctatagctagagaggattctcgagaacggcgctctgttcgtgaagaagttgactaataatcctgtacggggcagacagcgtgcattgccatctaacatacaactgacgatgttgaactcagaaaactattgtgaatccggtaaattttcgaactcgtgcaggctatccctttagctggtacttttggatgggcgtcctgtggtgaacgcttattcacagatcctagagaggcacctccagttcaggattgttttgtccctcccgtcaaacctcggtgcatttccctcaacacgtctagcgttgctgttcccattggaatcaaattgtaaccagaaagaactgaactacttgcgaaacaaacacggaagtgaacccgtccagtctctgcacctccgtgactctgacggtactcacgaacatctcctgaactagcgttgccgccacgagataaatgtttagattcttttaagcttgcttttaccgtgttatagtttgcctacttttctgggaagttgctcaggagaagagcttccttcgtttctcctcggcttatctttgtcgaatacggtgataggatgcagttttctctcttccacagtgcctcccatctgatgctgcccttcccagtctgcgggtggccgacatgtcaatgtgaaattcaagttggctctcgttctaagcagacgcgctgtatgcctgagattttatggtacggagtgaatgcgggacggtattcagtgtcgcgccagcagagggtcccatggctctctctatctcttgcctcaaaaagcctttccttctttgcttgtccttcgaagttgacgatatttcctataatggaatgcctggtcccggttattaaagaacaccactggaagagtccgatagttgctggccctcgaagtgcccgaggtgaaccgcagaactcagtcatgctggatgcatgctgacaacagagcgtggacattgctgcagagatgaggaaaagcctttcttttccgtccgcaaaatttatcgagaaacgcttctgttatagtgcttattcgatggattttgcgtagtcgctttcgacttgtcaacgactttcaacggtaagtttttctctctggattttttctctgcagagcagctcgactccgagagcttgtcattcgccgatgttcagctaacaatcgagcatgcaaagcaaggaaagcatctgtccactcttttccctgtcacgctactttccgttctgttcctccggtcctcaattatccacctagttcgattcaaaagggattgaggcgccaacagatgagggaaggagctgttccattattcgtggcactgccgtggagggtatgtccgtgtctgtcttacggagctctgggttaaaaatacggttcaatttttctccgtgtcggcagagcctgacgccttcttctagcaagagggagccgataaggacgccgatgaataggatcctcccagaagggaagaggattccagctgcggccaccatggatacaccggtgtacaacggctgagtcgtactgaaagccccgaaatacgtggcttattttaaacgtcacgaaactaattctaatttcgatcttccgttgtttggaccgtgggctggtgaccccagttttgaaatggttggtcctgcctttccccctggaagctcagtcgattgtgaagctgtctctcttcttaccatatccttaaaggaacaa

SEQ ID NO: 978 - DNA, 1626 bp, Toxoplasma gondii
  source 1..1626: mol_type = genomic DNA
cagagtggcttcagtcgaatcacgaggtaccaaaggtggtccatatttccggggaaccaagctcccgtacaacacagggggaacgcgcgacccggacacgcgtgagcaggtgagttaagcgctctgcgccttgtgcataaatacgctctagcgccttgcagtgccaacagtgacgaagtgactagaacttgattacgattcagtagattccgttgatctgggtctgcgttttttgttgcagggctgtagagcagtttgaagcgttcaagcagcgcatcgaggagttggacgttgccgatgatgggttaggttcactgtcgactcgggaagatttccggctgtttttcttgacacccgtgaaagaaacaagcagtcgcttgtcgcctggatcatggaagttttcgtgaaggagcaggcgtaatgtcttgtgcgttgttgaggctgaatgatgtgacaacttcatggcagaccgtttcgacattcgcgggcgattcttgtcaaggaagcaacggtatacaacagctctgctgtacagatccaacggcggttttcatcttcgcagttttcttaaacaaacggcaagcacgaacagtcttagaagcaacacagtttatgaggagaatgagccttgaaagcacaaaacactacaaataatgaactagtggaacagctgacgtggactgtttgccattcgacacaaaaaattccaattcgaataagcacaagaagtcagattcggggaccttgacatagctactgggtgaactcttgttcattgagaagaccattcattcacggaagtcataactgcggaaacattgtcagacagatcggtgaaattattgctttgcagctccttcactttgtcctcaccaaaagcctcgatcgcttcgtcaagcaacactctgaagatttcgcattccacgttttctcttatcttttcctccttataatggcgtttttctaggcggtcgtacaggactgcagtatcggcacgtaggacgtagactaagtcaaaccactcgtcgggcatgaagtcgcacgagtggaagtcgacaattttattgccatcactgacgatatcctcaagcttattcacaaccaagtcttcatcgaagatgctacagtttttttcgtcatcccattcagtgaacaagcgctcatctttaataagctgccccacattcacatgttccatacccgtctccagggcaagttggcgacagaatgttgttttgcccacgcctggggttcccgtcacgagaatattcggacggtttcgcatggtgctcaggacatgaacggacaggcggcgatacaacaagtacgcggttccatggaaaatcacaaatttgactaattgtttcacacgtgagatccgaagaggctctcacgaacttgtaagcaggaaagcgcgacagtttggtagattgcgactttgcggtggctgtgtctctacaccggtgatccgcatggatttcgcacggacgacgaaacccccactttttcttaatagcgcaacgattggctcgtctcgacggtttttattgaccataaaaatcatggcgctatgcttcatttcagcattgattataaccaccttgcttcaggcggaaggtctcaata

SEQ ID NO: 979 - DNA, 3612 bp, Toxoplasma gondii
  source 1..3612: mol_type = genomic DNA
tcgtttgagaaacgtgtctgcgcttttatgtggcgagtctgatgccgccgcgcgtcgcgttgttgattttcgctgcgtgaaaatgaggcgtgtatttgcgcgagatgtctcaagatacctctcccagcgcatcgaatcgtttggttttttctgtcgctttgtctcggtgcaaatccatagtcgtgtgtcgccttttctcccgcacctcgctgctctccccgacagtgcagaagcatgtgttcggtgcaacaagcaggaactccggagacgcagggagagacgagtcgagaaaaaactcgaaaaaccggtgtttcgacgtccgtgacagctgacagcagaaacaacaacgccctcacacgcgagaaagtgccctcggcttgtgacgcacagaagctttttctgatccgagcgaacgaaacaagcttttcggggccactgagcgccgtctaaaccagaacagtggttgtacgtttcctaactgggaactcgaggaatgcatatcggcattcgttccgtcgcagaaagatacccgaggggaagccccttcattgccgtatgaaatcgatttcaacacgattaccaatgtactgtcgttggagtgccacgcctcggtttcggacaaggactcctcactcagcgagtcttctctcgaggcgctacacaagtcttgagcgtcatctgtggtgagacgaacgtgtgaagcggttgcgttgtcagtcaaaacaaatttccgttgcttttgaaggtttctgttagtgacgtacccaacacacccgaagtgttgatccaattccctgcgaatccgtctcacgcttttagatcgtcttgggcttctacagaaaagcagttcccaccactggagtccttcaaggaacacgtgtgagttcagttccccatcggtgtttacaagaagaggctcgacggtactcctcaattacacggtggggagccccaacagcaccggctaaactggtggaactacagactgtcgtgtgttatccataccgggggtgaaaagatgtcagtcagatggatatcaagatccagcgacacaaacgttattcgatcatgttctaggtgtttctatctaggtatgaccgttttcacttgcttgagttgaagtttacaaatggctgaacagacccttcagtggagtatgccgacttgaatcccgagaacaactacaggccgtcctaaactaatgagtggctgctggataacaggagtcacacaaactggttgaggagcacaaacccagacccagtctggaaattatttagaaaccgaatgttctcgccaggcgttgaaactcaacgacttcgtctgtgaattccaaaggccagctggatcacgcgtaataatcaatttcgatctgcttctctttctcaaactagattctgcgcgccagatatagaagcaacagaacaccatgcattcatacatgacagagagagtcagggtgagcctcggattctgcttggcataaagttgatttcttttatccatcatattcactcatattgtatctgttcacaatgctataactgaacaagtgtcttcctcctcagaccttgaacgatacaatcgccgccaccctttttcatgagagctgcagcccattgtagcgtcagatctgagcctttggtagcattgagcttctataacttcttattaaaagacatgcattcatatatcttcgccatacaaatttcgtcccggaaaattgtctccaaacccccttctccgttctactcgttagcacccctccctagagagcgaaacatgcatctttctcgtccccttaggcgtcccgcgtttcaaccactctcgaacgagttgcttcatgaaaacgatgtttcatgcctgctgtttacgaatctttttcatcgcaattgcgtgccggctgcccactggcaacactgtcaacgtggaactcgacacagagcgctgttgcaccctcgccgcgagaaacaacagagagccaaaaagacgatctttcccgtttctctttttacatggcaagacccttgtttgtaggagcgaccgcttgtgagtaagggtgttggaaagaaaagtagaccgctagctgaggcgttcttgtaggcagctgagtgtgttgtagaaatcgaagtccagacctcggagtcccatgattccgacctggcacactgaatcgaagtttcacgatcaattgtcttttctgtggagtacggtgtgcactgagaatgtgcgctctgtgtgacgactcattctgggtatcattgcggaccgtctacgtgactggaaactcagaactgtagaaaaaacgacgggaggcactgctctctgcgaatcacagcgcgtccaccacggacagtatgtgttctgaagagggcgcgcatcccgtatccaaccagaaagactctgggaagttgctgccaacgaacagaaaaagaaacgagtctctgtggtttccgtctggggggcccccaggggaggcaacacggtccctcttccaccttaggcagatcgcggtgtttcttgtcggaaaactcacgtattttccgtcactgtgaacagaaagtgcagaaatcgtgcttgttctcggtcggccgtgctccggagactagaaaaacgacacaagaaggcgtgcgaaaatcgcgggattgcagacagcgccgcggtcactctcttcgcggaagcaaggggcgaaaggcaaatcttctcacggcgtgctggttgcttctgtcttctttgcgatttttggagagccgaagcagatagaggatttctttcccctttttgacgcatgacggggacactaaaatggaagggtcgtttcagttttccgctcccgttcttccacccccttgtgtaccaaatgtgtgcagaatcctccgtgtgccggcacgctctctctgctctggcacccgtgcacatttcacctctctgcctctccgttttccccagtttcctccctttcttgtctctgtttcccctttttggtctttgctaatctccacagcgtccctagcgcacaagatgggtccgttttttcgccggtttttcttcgggctttgagccacacgcgaaacgcgaggtttcccgatcctccacctactccgcatgacttgttttgaaatcctttttacgagtatctctcgccgttttcctgtttgacgcggcgcggtctttcctctggagtgcagagccagcctcgcgtcgaactccggcaagacactgcggaaaaacagagcctgatgtgcgtcgccacgcagaaactagcaaggcggacgctttggctttcccctcttctccgctcgtttccaaaccgtcgacctcggctgtttttcttcgcgaaaaacggaggttctgcgagcgccaggtcgccacacttctaggcgtcgttgtgcagctttccgctgtctttaccgcgagatttcatctccaaagcggttctctgctcaaaaagggattaagaaaactcgagggaaacgcaggagtatattctggagaaggcgcggcacggaagactcgtcaccgtcgccatgcgtcttcgctgacgcgaacactgttcatgtgtgttctgcgggccagtttggtcgctctgtttgtcagaaaagaaggcaacaa

SEQ ID NO: 980 - DNA, 2505 bp, Toxoplasma gondii
  source 1..2505: mol_type = genomic DNA
gaaaggaagcatcgcatctgtcacacgaggatcttgaacggtcgtcgcctggttgtccaagtaaacgggtcgcgatcccaccactgcttccccgccgctctcaaaggctccagatcccgaagaaggagaagaagaagaagaaggaggagaaggagaagaaggagaaggagaagaaggagaagaagaggatgacacggaagagaagggagcagctgcagacgcgaggaaaggggagaagaggtgcaagtcagaagcctgtgggtgttgccgtgaggcagagggcaggagcgcgggtgaagtagcgttccaggacctgcagaagggggagttttcttcggtgttgaacgtcgcgagcgtcgctgttcgacgttccctgtctgcgaggtcaggccgggacctcaaaggacctcggtgaagattaagaaagctccttgacgacgcgcgcaccgctgtcgtctggagagggacacaggacgcagtcgagaagagagacgagagaggagagaacgaagagcgagacgaaagagaagaagagcgcgaagagaacacagtgagaggcggaacggtggaaagagcatagcagcgacctctgcagggcggtgcggccgcgcaggcgactttcgcgagtcgactcatcttgcacgagagatccgcgggagctggaaaaatccaagaactcgggggaaaacggagaagttccgggaagtgagagggagggtgtgaacacacaaaaggcgcgaaggagtgacaaaaaaaagaaatgcagcgccaaaggagacacacgtctctgccttgttccgtcacttgtaggacaagaaagctactgaggtctctatagacacccgaagctgcgagcttctgctctctgcacaaaacaaacgaatccgtcgggaacgaagcgtcaaaggcgcgagaaaacgcgtttttcgtttctccggcaaaaaaacggggaaaagcggcgaatcgcagtaaagtcgacactgcgaaaaagtctgctggggtaaaacgagaagaccgtctgcgcgcgaggaagaggaaactttttgggtgcgagaaccgcgtcgcgatgcatgcaaaaacgtccacgagcggtgaaccccaagccgagaaggaaaacgatgttcgcagggtggagaagcgagcgcaaaattgcctttcttcagcgacatgcgcgacccgtgtcgcgctctccagacgtcccctccctcagctgcgcggagttccgcgttcgacgcgttttttacctctggactgtgtagaagaacgaaatggagggagacagaggtgaaacagaaaggaaaagaagagaaacgcaaggggatgacaagagaggcgaaggacacccttcaggttccgtcgtcgaatcaggccgaacactggggtacaactgatgcgtcagactcctgcggcttctcttgtgtaagaactggaaatgtcctgtggctcactgagacaccgtggctcgggcagagaccgcgacgacgcaaacttgggaaggtcgcatttctcgaccgcgaaatcctggaaaatatggcaaacagctctgcatgcacgatttacgctcgctgtttctcggacacaccgtctgcaaacaacgctcaaaaacacttgggtaggctgcggtaagttgcaggaaatgcgtttttgaagaagggagaacggcggtgattgaagcgggagaagaagaggtcaacatctgtgtatacgtaagaaagcgcggacagaaggaagctgctcgcggcagccgaaggcagagagaccgagtcgcgcacaccaggtttctgggcgaactcggctttacagacaccgcgccgagttgagaggaagacagaaaaaaaacggagagaacaaaagagatgcgcggcgaaaagctgactgtcggcagatcttccgcgagcgtcgtttttgccgcatctgcggagcgcgagaaagtgactgcggagacgacgcgagacagccgagtccgtgtcgctcgaattttttccaggtttgcatgcagcgaggggattgaggagcgctttccacgtccttttcgagaagaagcgcgaaaaggttggacaagtttccttgcaaagagccactgtgtgtctgagaaaacgcgtttttccgattcgtacttctggcgctccccctcccccactcgggtgcagatttgcagacccgcctctgccgttctcagctccattcgcggagagaattctgtctcggattcagtcgtcccagtggcattttcaatcttcagaagaagcgcactgtttctgcggaagaaggcgggcgtccgacgcacgcggagagctccgaaggagtgtctgctctggagagagagtgcatatttgccttcctttctctcgacgctgggtctctcgctcaggtcttcgctggtctcttcttttccgctgtctcttctgtcctaggcttctcccagaggcttcttccctctgtctcctccgctttgtcctctgcgcaaaattctctcgagctttgctcctctctccttttcaaaga

SEQ ID NO: 981 - DNA, 3076 bp, Toxoplasma gondii
  source 1..3076: mol_type = genomic DNA
acaaaaacagtcgaatcaagcaatcgtcactgtgtgaaaacaacagcgttaccgtcgtacccgtgatcctcgcgtttggtgggatgtacaaactgcctagctctcgaaaacgttgtgctgttaacaaaactcatccatgctgctttctcgaattgttcagcttctttcatctgtccgtacccccgctcaagataaagtgtatcgcgtggatgcatgcaagccactccacgagagaagttccctgttccacgaagacgcgacgcgagcccatcttacccgatcccgcaagtgctgctgaggcatccatgtaccgctcttcgatgcggtaacaaacgccacaagtagttaaaagattcatgattgtatggccatcgtcgtgggagcagtcgggaccaaggcagaagacactcactccgtgcccggactggcaagcgacattggggaggagacgtgcaatgcggcgatttccctcaactttctgtccatgtttttccttttcctctgtaacggtctccaccagttttgacagggaaacgccgatgctgattgaaatgatcaaatggtgagatccatcgattaccggtgcgaagctccgcacgaggtctagagcttccgttgcagttacagatatgaagatgatgtccatagggtctagctgaaaaggacgcccaggatattttaaaagcggcgagatatatacagaaaacacgaaattgtttccgagtcggtaccaccggcccagcttcacagagcctcttctgcatctcatgcacactgtagccagtgtttacacggcgtggagagtatgtacccgcggagctacagaacatgcacccaatttcgaggtggtggggctttcaacgtagttggcagaccaatggaagatcagacagacatagagagattagtattacctcttctagtgtgtgcaccgcgaggtatccattttcaatggcatggttcctcgcggcttcgttccgaacaagcatagtgatttccgacggtagcacacgcttggacgacgtgaaacctttggctagggcaaaagccattgtgcctgccccgataaaagctgaaaaataaagggagaagcactatcaagccataaagcgacccagtcaccgctcgcgacaaaatgagtcactcttgaagctcgatatcggatggtgctcttggcaagtcttggcgtggtattgcaattaacagcgacgggagaccgcagcttcaagtgtgagaacagtcaagcggccacgcgccggtgcatgaaaaactgcggcttaaccccccaatacctgtctttgcactcccggacctcgcggacgtttcctacccggaatgcatgtgcttaagaatgacatttgagccgggagtaacgaaccccctgcgtcgaatctttttctcaccaatttttttccgtatccgctccgtcatcctgttctcgtcctgctggcggtgcttgctcgccgctggagctagtgcgcaccacaaaaggcaaaaaaggtaaggcaaacactgtgacgagcgcgtcacgaccctcgaagcgtgcgaagagggttgaaatggcaacgtggtcgacgcctaccgcaacatttacgaggaggcgagggacagcctggttcttttttgtatacagcttttgaccctacgactgaacgatgactaggggaccggaatctcctctcaccacgcaaccgcttggcgttgccccaaagatgccgattgactgtcgttctcacatgagaaatacaccagcgaactagggtaagcatcagtgatagtgtttgagaaaggatggtgccgcaacacattttgctacttctcaaacaagtgactctcagccagcgcaatcgagacgcacaccaaccgccgcacacgagacgaaccaagtctcacagaaaccgctgcggcggtctacgaaagtggactacgagagagtgagttactaataaaacagcgatgagatgttgagggactcacaatacgccataaaggtactcttatacagtttcgtttgagtaatacacagcgggtgaccagctctttcgcggtagggacgtccttcatcggcgaggaatgacgacccaagcgcggcagtctcatgctactgtttcccgaggctattcacagacattcccgcaagtacacagcatagattcaatggacacaatcaaacgccgttttacttttcgtttaagaacctgaaatgtggtttcaaccttaatcgctagcgagaaaacgcactgtcggaaggcaccgccttcctaagtctgattggcggcgattgagaggtcgactcgacgctatgccagaggtcggaatggtctgcacgcgagaagctcatgcgcgttcgttacctctagcaatagtgagctttcttttcagacgagagaggattgccttcattgccaggtccttaactaaacactcgagcagtaggaatcaatggcttcgttgtaacttttccggaccgacccggcgggagtgggcaaacaaattcgtgcacgtcacactgttgggagacatatcagcaggcatgcagatgatcaagcgcgcgattccttaccctccggtttcatccaaagaaaaattccagcggtttatacggttgccctggcaacaatttttctctgggcactttctacagaatttcgacagactcgcttgcagccaacgtgacgggaagttccgtcgtcaaacgaatgtcgcatccgaaaaatcatagcttgtctcgatgtgtctgacctaccagacggtatcctttccaggaccaagtgtacattgtggaatgcccaacgtcatttttacgagttctcagagaaaccctttccttcaggtcaatgaaagcggctgtgttggcaaacaaacctatgcattgaacgcagagtttctctcaagccacgaggagggtgatacaggggttacccactacgacatccgttccgagaaaggagcgagattgccgacggttatacgggacaaacaactagattgggggaaactgcaaagggaatgatgtagacaggagccttgataataagctcaccgtcaaggctcacgcgtgcgctggtcctgtcaa

SEQ ID NO: 982 - DNA, 2403 bp, Toxoplasma gondii
  source 1..2403: mol_type = genomic DNA
caattgttgctgatgatgatgagcttcgctgcgaaaaacaaacagaagcgcggcaagcgttatgaagtctcgccaaaaagagagaactgcatgcagcctcgcctttcccgcagagtgtgccgctccggcgacggaaacaaagaggaagaaaagaaaaggtgcgacccgctcggagggggtggtgtctcctctcgctcgtttgacctctttcttccctcgcatttcttcttttctttccggcatgtctcgtctccttcaccctattctttcgtctctctcgaagacacaaacctaatagcttctccggtgcatgcctccacagcgagagaaagcaacctaactgggcattgccgcgtctcgagaaacagcggtagacaggatctccgagagaaggatccccttcgtcccttccctcgccctctgcacatgctccagagagagtctcccatctccgaagaccgctctctcttcctcgacccgctctgactaggagggaacagcagcacggagaagaagaactcaacagaaaagaaggaaaagagaacacaagaactgaggagagaatgggagagtctctcttccggagtgtgtgctccgcaggtcaacagcggacgcagataaaaagtcctggggtctccagagggaagagttctcgcgaataagcaaagcaggaagctgggaaagcgaaaagggagcgagagccttcttttcggggatagcgctgcttctctcgttggcgctccgcgcttgggagcgccccgtcagcggggccgaagaaaagactggccagatgggggaaacaagtgaactccacagagagaaaaagacgacattctctaaaattcctccctttcaaacgaaatttccctctcggcgcccgcctccggtctcgactcgggttcctcccccacacagggcgcggtgagagtacaggatcttgatgtttctcaattttctggagttctctgttcttcgccgacatcagagttctccgctctgctctctcgctctcacctttgccagtgcggagagcgtggatggccgtcttgcacccgaggttgactttgccgctcttcatgaccagctggaggcgggagttgatcccctcactgccggacttcttcgctttctttgccattttgaggaaaacgaaaacaggaaaacgcgcgaaactgacgggcctcgagtcccctgtccaacgcctcgcgagaaaccggaaagaaagtgaacaagagagcctgcgggcagcaaaccgggggaaggcgacttcgaatccgttgagaacagggtgtacatacaccgcgcgcgattctgtgtctcccgctcttcccctctctccgaaaaacgctcatgcggggcacactcttcgttctaaaagccgatagggaaaaagagtaataattgagagccgcccgccgcggtcctgtgtcggctaataaaacgctggccgcgcccgcctcgaagctaaaattgggggccctaatataagccgacaagcccagaactgcatgcacgggcacacggcacagtgagagcgatctcgagacacaccagtcagctggcctccacggcgcgtgcgcacggaagaagagtctcgagaaggagacttgcgaagagacggaaaaaaaggatacgtccatcgcagcattggaacgcagcttcatataggtctttgcgtatgaaacactgaagctggagttttcgcgcagagagacctgcgtgtagatacacctcaggatctcggtgtctcggcgagtcgcaaggttgcaagtgttttgccacgacgctgcattatggtttttagttggacgagggaacatcacacgtgagatgtgtcttgtctttctttttttctttgtggcttttctcgtgaaggaaaagcgacgctccagagaggcgaggaacctcgatctggcaagccccttgctattcgacccagtttacgtctactgttcgaaactttacgggaacatacacgaccgtcccccgccgctttcttcaaacgaataaggcgtctcacacagtttccagatcatccgggaggagacacgttttcgaaacgagcacgaagagcaaagcggcgaacatgcaagaagggaaaacggagtaacgcgcgaagcaacgcctcctctggcctctcaggcgtggacctcaggcgttctcatacacccggtccggaccggaaaagcgtcgcgcgaggctactcgtgtgcctgacctgtgaggctctttttttcgcgggagtttctttagggcgtcttcgagagagagcctcgcccttcgccattgaaacgcgaggccgcgggcgcggtacacaagatgacagagacaggaaaatgagatgcacaagtcgctgaccaaggccctctgcttcgttttgggcgcctcaaagcgcaaaccacca

SEQ ID NO: 983 - DNA, 2227 bp, Toxoplasma gondii
  source 1..2227: mol_type = genomic DNA
acaaatacatgaaacatcgcgtagacgtttgtcctttgattccacttggccctgaactcgtgttcttattgcccgcggaaagctttgcttttctacgctttgcatgccttccggagtcggcctgtgttccgaagggaggagagaagcgttcggcgtctaggagttgtgcggtctctcgcctgtgtgtattctcgaaggcaagcactctccctctgacctcttcttcgcccccctctctgtacgtcgttctttcttcttccgccgctcttctctctgtctctttcttcttcttcgtgtcatccccgttcttgtctttgcgcctcctctccctcgagtttcgttggctgcatgcacgcctaccgaagacgcgactccaccagatgaagaaggcgaaggcggcggcggaggtccaggcgttcccgaagaagaagaagcttcgattggcgaactgcgcctcccagaactgcttccacaccggctgtcggaggaagttggggggctcgaccacccagagaggctggagaatctccttcatcggcacattcctctccagcgtctttgcagcttccgccgccggcgccgccgcgttcagacgcggacgagagagacgcagaagcgacaggaaacgagaagaattcgcgaccggcgaggccaggcgacagccagcggtggccgcgaaggccggggagagccccatggtgcgagggacgcggagaagaagaaggcgaggacagagggggagattttacgaagagacagagagcgagggggagactacgaagaaggaacggagacagagagaagcctcgaggaggaggaagaacggcagaggtggacgaagcaacacacagaaggcgggagaagaaagagacggtcgaccggcggggcgagaggagagagaggcagcgcgcagggcgtcctctctcaggaagacggaggagaaaacaccgaagcgaggcaggaggaacgcgacctcgtccttctttccaccggactgccttccactccgaaagaagaaaagaaaatgtgaagaaagcgaggaaaacgggtcacctgaaacgatgcatgccctgtgctctcgcgtggattctctcaccggacgactttcgtctcgcgccgtggcgccaacgttcacacgcacactggaggaagaagttttttcaggcacccaggagacacccttcttccttctcgcttttctagcttcttctgcacctgcgacacaagtccttcgccttctgcttccttttggtctcgcgttttctacagtttttcgcgcccctgtctggcgagagtaacctcacatatagggcgtctggttttgtgcctctccgaaacggcctctctgtctccgtacctttgcgctcctccgctgatagaacgcatgcgctgttgccgctcggagctttttccgtcggtggctggtttggttgttgagacacaactcctcgcaactctctacagaagcggaagaaaaagccgaagaaaagacgaagaattgagatcctgaagcgttctggatctctgtctttctctgtttcctctttacacgtcgccacttgtccccaattcaacaagaaggccttcggattacctgtccggagcggtgtgcgagttacgctgtccacggtcactcctgcgtcgccgcaaatcttccctatttcttggttctttctctttaaaggtctctcctccgctcgaaaagctcgtcttcctggtgaccagcagagagcgaccgtctgcgtcgaacggacgcccgagacagcttctctcggagtcgcgccagacgcagaagattctggcagactcgacctcccgcctgttgaggcgcgcgttttccgcgggggggggggggggtcgcatttgcggctctttcgatcgacactagagtctggagacacacagacgcgaagtctagcgtttagcagcgcgtttttgaggctgaaacagagggaaaagcgcgcttgcgtcgagacaagctggcgccgtgaacctcacagtcgccgccttctcgtttgagcgaagaaaccgcgaacgcgagacgactgaaatcccgcgctttctgcacagacggaggcgcgcgcgcgcgagttgcgtctccgccaccggtgcactcaggagtcctccggagaaaattcacttggtgtcttcacccctttgcgttccgggtcgctctgactttttttgtctctttctcttcgcacacctttcaagttcccccacaaaa

SEQ ID NO: 984 - DNA, 4692 bp, Toxoplasma gondii
  source 1..4692: mol_type = genomic DNA
gactctgaacttgggttcgtctgtctcgttcctccttccgttatctcccgagcagctggtcgctgcggaggaagcggccaaggcggctggggaggcggaaggctcgggtgccaggcccagaaggaagtcctcgtcatcgtcgaaggagagaggcgcgagtcgggaggaggcgcgttcaggctcagaagcgtctgactgcgatccttcttctcccgaggaaggcgccttggcggcgatcccggtggtcttgtcggggacgcaccccgcgcgcgaggagacagaaacagacgagtgaggagactcagacggagaggaacgaagcggctgcggaccaaaggaggcgtcatcatctgaatcctcttcggctgtacaagaggtgggtcgacggaggcaccatttctccgctctgacaggcgaagaagtcgcagccgacgcgagcggctggggtccgaagtcctcatctgaatcctcgtcgctcggcgtctcggcggcgattcttcctcctttagttagagaggaaggaaatccagagtgacgggctcttcgaagagccgacggaccgaaggaagcgtcggcgtcgctctcgcggtcctctccagcttctccttcgtcgcccgctgagtcttcctcttccacaatgcgctgaacatgcgctgctcttgctcgcgctgcatcctcctcccgccgctccgcccgagttttgaactgacggcccacacggatggcgcgcatttcctcttcgtcactcgacatgttttcgaaaacgcggtggaaacagacgggaagacgggggtgcaggctagacggtgccctgcacgagggaaacgcagcacgtagacagcccacagaaactaggaacagaaagctggagcactttcttcgagaaacagacagaaaaccagcatagaccacgtgtaaagaaaacagaccgcaaccctggcggttcgaaaccgatgagacactaaaccgcgtcagccaaaacaatagctgcagactcgaccgcagacgggtttcaacgaagactttttcgcctccaggggcggacgaaaaacactccctatccgactgagttgtcacgttgcgggtccctcgaccctcgggagaaagagagatcacaccgcaaacggaaaacgcaggaacataaaaggggatgaagcaacgcgagaacgggtcctgactgtactgtctgcgaagaggaaagcgcacgtgacaacgaggaaattccttacagacacaagtgaaggctttaactttttgggctgtccagaacaggtcccgaaaatcgactgaacagcgctgtggcgggttgtttgcatgcacgcgtgagaagaggtctttggcacagcgcgtccagactatccgcgctcatcgattcttgggtctctcgcgacgcgaacaggtcctcttccagcagtcgcagccgctcacaggatgctgcaaacaccagcaggtcgtttcactagttcggtttacgcattagcgctacgtttctgcgcaggcgacctgacagtcgcccagaaaacgaaggagattgcacgggcgtccgttgttgatccttcgaacctttgcagacaacacgaaacgccgggagaaactgagacaacgcagcagatgaagacatcactcgcacagagacgatgctggagctgtcgccgttttaaccgatgcagaggcagcatgcatcatcaaacttaacgcagctgcggaactattccagtccttcggtgaacaagagaaatgttcatttgtggcaactcttgctctcttgagaaccggaggggggactcttgctattcctgttctgccaatgaatcacgcttgagagactgctagaggagaccttgcttcttgtccttctggcccacaatgtgctacacaaagtctcgagctgagacgaggtgccaatgtacaagtgccgtccaagtctttgaactggccgtaccggtgcaccgctgcaaacgttcgaggatggacagtcccttaccgtgtacctatataaaaggaaatggttttctcggacctagatgggcatgcgagtgaacttcaggcacgaaaattgtcatgatggtgacggccgctatccgttgactacatctgaaacagtggcgtcggcatgggttcattcatgtagttagcaaagaggggaaaaccagttctcgtgttgtcaataccaagtttcaacggattctgcggggcctcgtgacatcgccaactgtcgcaggtgatgcgaaccgtacccggggaaacacttacaacgttgtcgagcatagatgcttatatttggattttcctggaaaatgtcgtgggtgtgtattggtcagcacatatagagaagctggcgatctcgagcaagcttttttcttggtgttacagactcccgttcgtcattaccacgcccacgtttaaaatggaagctgcggaaacaaggcccccttcagaatattagaaagtcgatctctgtgtcctccgactcacgcagggttcagtggcttgcctgagcgcgaatggacaacgacacgcaaaaactgtacagctgaaatgctctgctcgttggtttttgtgaaaagcctgtagggtcttagctgttgttgcatgtggtaaccaaggctcgcgctgaagtgaacgtgctttccccacgtttgtctctttcaaactgagactttccaaaaaattcaaaaaccagcaccatgttcaagtgtgcaaacatccatgaacactacgttgacagcaggtcatcagcaccgaacttgccgtacaggcgtgctggtcgggttcatatttcctgcaaacgaccctttcttgggtgagaagaatcatgcgttcgtattatcgtaaactgcatcttttagagacacattcacagaagtctttagttgcttttcaggaacgttgagtgacctcccgttctctgtcgcagacaggggctcttgaatgcaacggtacaagctctaaggctgtaatcagaggacttcttggcgtaaactgaaaggagcccagaaagtacaaaacgtacaaggattaatgctgtccgtcggcgcatctgcgtggacactcagtctccagtcccatgcttggagtgttgagacgagcagcgcaacaagtgacgaatcctacgtacatgtacgccaaccagtgatgttcagtggtggcatctctactaggagctgctgcgatcctatgcggaacactcctcttgaattctcctttgacttcgagcaccttctttattctgcccgcagtttcccggtcccttgttttcgttaccacactaacttttgtcagctgcctgactgtgccaccactgctgccacagcatttttacgccaggaacatcctggtgggtttaagcggtaccgatgtttaagtacacaacagttgtgtgagcactgtttcctgctctggtttccattattaaatgttatttggccccggggttcccaacgctgtgtgttgcgccactttgtctctccgaacttgtgtaagaaaaatcttatccgggcaggcgtaaaacctttcattcgccacttccttcacaaatccttcccgtgtctcgcagacagaagcggcagcgaaggaagtgtcagattttgcccggcgaagcaacccgcgagagccgtttccctctgtgaaaaccacctcctgaaatctcgtgcgtgctctccgctgttgctttgcattgctttgcatcgggaccctttcgccttccactggggcgtccgggcctcttcttcgtccactttcttttccgcttggcactgttctgccggtctacactacgcttttttctgcgcgcctcgcacgcgcgttcctcggaaatcccggatcgacgaggagttgccccctgcgtgcacccgtgatccgttctgggtataccgggtctggaagtttatgcgggggcggtcttccgtctctccggtgggagacggcctgcgctgcgcccccatcgttgacctgtcgtgtctgtccgttttccgggcaggggcattctcagacttcttcgcctctccacagttcgttcctttttttctcggtttgcggattgcgaatggcccgtgtctgactcgcgggctgaagctgcgggatcttgatcgagagggcgacacgatcccgagcgtctccaacgcggccccgtcacacagagaagtcgaatgtggtatatggggtccgcgtggcggcacccagttcttcgctctcttgatctgtagcacaggcgcccaaagcgctctccaggtcgcaacctcagctccttttttctcgagagaaacaagtgcaagccggaagtcaggcgcctccggtggcactgctgatcgggctgcgccgccgaaaacagcgcctctccccccggccggagaaactcgacacgggaaggtcacggaatgacaaattcttgttcatgatgcaaaacgttgtttgaacggccttttctcttcagcgcattctttccagaagaggttgggtcgcctcgacggggcacagagggcccacccctgtgtttctgaaagatgatgaccgttttccgggtctgccgactgacagcgattcgccggtaaccgtctcctcgccctcctcccgccccgcgaagtcttgcaagaagaatgggagattgcctcatgggcgactgcctctctcttgtggacatcgctctcttcttccatttctgtctgtaggggcccatttctcgtttccccaaga

SEQ ID NO: 985 - DNA, 3300 bp, Toxoplasma gondii
  source 1..3300: mol_type = genomic DNA
tcgctctcctctttcttgccttgccctctcccatcgttcctttcctccctcttccctctctgttctcggtctcgtctttcgcctctccctgccttgtgccgcctacacgcggccgacgcctgcaaagacattcgcagagaatggcgcaagggcggccttctcttcgttcctgcaccttatctagagtaggcctgcgtctctttcgcgaggacgcctacctggtggagacgcgcaagatcctctgccgtaaagcctgcaccccagcagaatcggcagtccgtgaggagaagaaccaacgcccatgaatccccgtcctttcttgctccatcttctcccctctcgccttctctctcgccttctctctcgccttttctctcgccttctctctcgccttttggtgtgcttgtctcagaagcgaaactcagagatccaggtgtcacagaaggttcggctgacggctgagatgaagcgaaccgcgtttcgtcgacagccttttctactcggtccatgctcgcggccttctcacctgcagcgctcaggcgcgccttgagcaaccacggctgcgaggcgtctgcggcaagagaaaggccggacgaagcggagaggggaaagagagagagaaggaaagaagacaggaacgatggacgtcagcgcatgggcggaggaaggaggagggaagaatcgaacgaaatccgaatgagcgaacaaccagcgagaaggcgcaacggctcgcgcaggaagacacgcagacaccgtagcatagttagacagaaagcaggcattagaattggaaaagattcatcctgtaaggaaacgaaggagtgcatcatgccttctagagagaccccagtgtcgaggaaaacgtccaggagcgcgcgaagcgatctgggaacatgctccgggtgttctgtgcgaacgacaaaagcttctgcatgctcgttttttgctggttcgcatggagcctgcatcctgaaacgcaggttgtattttaagtatcgaaagaccccccaaatccctccaaaatggattgttcctgcgaagcaatcgagaaaaaatcacgagaactgggctccactcttgtccatagtgccgagttctggacctacctaggacccgccagggcatctgcgcgaaagagcgtccatcctgaaagacttcgtagagggcggctctgttgagaactctggcttgttctttcttttctctcacggacgtttcttgaccatttgtttcttgtctaaagggagacgctggagtcggttcttctggttcttctctccgactcgaaccttcttctctctctcgacaagcgcgacagcttcgcctgccttcttccttctgcctccctgctggcacctcttcttcgccttccacggacctcgtactgcctgtcagggagaccggggcgtcgccgagaacggcaaactgaggagaaacttcttccacgcgctgcgtaacgaagaaatcggcatcgccagcaagcgaacaagaaggcgaagacggtgacggtgacgatggtggaagcaaagaagagagagaacgagcaggacgggcagacgtcgacggagacgaggaagacgaaggacgagaagacgcagacgaagaaggaaccgaggacgaaccagcggaagagggagacaaggaagaggtcgaagaggaaggaaagcctgatacatccgagagcctgtcgtcctggaggaactgtcggggaaggcctcgccgtccacttccggcgccttcggcggtcatggtgaacggttcagggagaaaggaggagacgcgaaaaaggaaggaaaaggatgcagaacggagagcaacgcctcctcagtccgaggaaatcctccctccacgcatacgcgtgccgatctctacagatcgacatccgtacaaataaaaatatacatcgctatgtagagaaacaagcaaacgtacatgtatttgtggactttcgacgtatgaagatgcataaacgtacgtacttacacatgcaaaatgcatgaacaagtcgagacgacgcatgtatacaagcatggagagatgcgcgccacagtcggcttcagaaactttctccgagcgtcttttgttccgttttcgcgaaccgcgcctgcagcgactctcaagtgccgcgggagctgcagcgagcgagggccgtggagagtccttctccagtttttttttcgggggaatgtcgtttccgtcgcgtttttctgaaaggttttcctgagacgttcctccaagaagatgaagttgtgttacgtttatagcctgtgcaatcgcgggtgagtctccttctgcacagaaggcgcgactctgcgaggatggactccacgacagagagacgacgttttcgcggaaaaatcggaaaaactgaaatgttccaggaggagaagagttggagaagaagaagacaaggggagtcgaaacaggtttttagaaaaaaaactctttttccggccgcgtcgaggacggagagacgtcgattcatccagaaaaaagtcaaatccagagagagcatgaagtgacccccccccctcggggtatcgagacagctgagcacggtgaaagcctcgtcttcccctctcgcctttcttcctccttctcttcgtttctctgtctgttgaatggagtattgaatggagaacagatctcttttttctaggaaaaggcacaaaaggacatggctgcggctccctttctcgggaggtcagacaccctttgtcgcgggcagtgaaaatcgagcatgcaaccagcgaaggcaggtcttcttttttcagtgaggccgcgcgacaaaggatttttttcgaggaattcgtcttctctgccagaccattcttcgaaaagtcgtcttcttggccagcgaagaccgccttcctccccgcggtcgctgaaggcctttctggaaggttctctcggcccaatactttggccgctgtcgcggcttccatctcgccgcttctgaatttactttctagaaacagtcttctcgttgttcatgagcttgtctcaggagaccatctctcctgcgaattactcatgtagatattgtccgttgtgtttcctgtgtctcttcgtctccctctcggtatctctccgtcctcttctagtcgtctgtcaccaacttcttgcctcccctctccgtgtctcgcgttctttctccccgttctctccgacactgcccgccttttctgttcaccagcttccttcttcttgtccgctgtccttgagctccttctctcctctgttctcctgggcttttcttcctctcgcttctcttctgtttctctcttctcgctggaacga

SEQ ID NO: 986 - DNA, 2758 bp, Toxoplasma gondii
  source 1..2758: mol_type = genomic DNA
caaagaggacgcacagagcaggcatgatccgtcttcgctacacaattgacgaaatgaggacagaggcgaactcgattttccagacgaggcgtaatgtgtagtacagttccggcagtccggcgacggccattgggccagcctcttgtaggtttgtatgcgtaggccgtctggatcggcaaaatataaaaacgaccctatggttttcgctcttggtttgtatggtcgttgttggtctcctgtttcaatctggagctatgtgagtgaccattcggagccgaaggatttttccggagcatcgagcagtagtatcgcgccagcgaataggtttcccaacatgggagtgttgtcgtttctctttcatttgaaagaagcgtggtaacaaatgtgtaatctttacctgtttgaacccaaggagactcacaactatccacctggcggtggcaagcttcggcagaaatcaaccagcataggcaaacgggattgcatcgaatgatgcaaaaacacccgaaaacatagaacacttcacgcagcaaggactggcatgtgtgcccgttccgccggtcctgaagtttgtttcgtcttgttaaaaatgcgtagtcctctgtaggactgtgtgccgcaagagcggcctttctccccattggatccagagctttttgtttagaatcgttgtgactatctccctgacaaactggagcgaccaccggctgtagagcaggctccgaaagtcattcacgaggctgcgaatcccgtggagtgatgcaaaaacacgccgaatgtgtcggtcagagttttccacttcatggttcatccgcaagagaagtaacaaggtaggaaccgcgcctatcaaacccaacgatttgcaaggaaacgcgattgctttctctgttttagagtgtccggcttgtcacgcgggaatgcagtgtcagtgctacctgcgagaggtctgcatgacgaaacacgccctaaactccataacgaggaagaaccgcgaaccatcttgttatcgccatatccgtcttacgaagcgattcggggggcttgagatttgaatggggttctctctaacacagaaccaccggtacttcctagctgcagttccctctccggatccctcgtccttttcgtaggcaactttggcctttccactcttgtcactgtcaattcttcgcagtggctatcagactgcgaaacatgctgattgccctttgccagatatacagcagcgatctttttcagaaactcccacgaattctctcggtttcatctgcattttcccacgcgtcaggtcaacacctttcgtacgtaacagctcctgatacccagttgcaatcctgtggtgcctacattgaaaagggattctttacgtttttccctttctctgggttcctgcagtcgccttcgaacggaagcctgccgttacagtgaccatttgtttctgaccgaacaacgttcactgtgatgagggtacgatctggtgtgcttgtccacattgagtcggaaggctcgctcgcgtcttcgttgtgtctctcgcgtccaaacgtagagccttcgagtgtgagtagacatagggtctcttccagtaagggagtgtctcagatgaggccgtctaagccgttgctaaagcggtaacacaacacacaaaccccgagagatcgtcttcccccgacctcgctctgcgagcgctccccctctgagtaaacaagggaacaagatcaagcaacgggcatcgtttcccggttttttcttgcgtatctgcttggatttcccgtcaaacctggcatcctaacaccaacagagctccccgaggtgtcatgtcactcgaaatacgtttgcacagagtcgcgcgctgccttaattgttcagtcgtttctgcccgccctgtcgatgcccgcgccgacttcgctggctcctgtcaccgcgagttgctctgcaagtgccaccctctgttcattttcggctattcccttcccggttattcccgaggatcacgcggcggtaagagaaacgacatgaccgctcttgagagcgaaagctcgacttgctttttgtgtggctggcaggtgacggacgaacacaacacaggaatgtgacccggcactggctagctgtgcactgatcgcgcccgtctgtgtgaagggaggcaccacccgccggctcgcagcacggaagctgatggttgagggccggctgtggaacttgagcaacggtcggattcctctctgagacggctgtttcctttttcattcgcttttgcaccattcattccctttggcaactttgttgttcgcgttttgtgtggttcgtacccccgagagacacgttccggcttctgcagcgcgcacccccgttggcttgttcgttttcgcctgcatttctctgcaggcaaacttgaaggtaaactcttgtacgacttgtgcttttgcccgccagcagcattgtccgacacggtggtttccgggaaaattccgcgagcctctccactcggcaagtctttgagcaagcgcagtgtgtgtctgctgggctcacgtcgttcgcgtccgcacccccttcttccccttggacgtgcttcttttttcctttcctctaacgccttttctttcgtgtcttctctcgtcttctcgcgatacaccacggccgcatcgccccctttgctgtccgagtgtctaccgcagcaagaattcccgcgtgtctcccgttacgttcagcgttcttcctcaacgtttagaaacttcttcattccccgctctttccaaga

SEQ ID NO: 987 - DNA, 752 bp, Toxoplasma gondii
  source 1..752: mol_type = genomic DNA
cacttgaaagcgtgtagctccgcgtatttgttaaggaggcatctggagggctttacatttcagctgtgatgctttcgccgcagtgaaattccgacgtcacactttctctggcagctcgaacaacgctgctctcgagctgagtggatcttttctccagtggatgcgcggcatggtaacagtaatggctaggatagggacagtaagagaagcggtgatggaggcaggggagaaacaccagttggcatttgatgagcagtacataggtgataacacgaaatggagagcaggttcgggccaatgacggtctttaggtggtggcacgcagagccttccggaggggagtactgaatcttgtgcaaataccaacagagaccgaaagttatagcttcctcaagcgagatagtcgactcatggcaaaggaaggcggacacatcagggcactggagtgatactcttggattttccctcggcacgctcggtcctagaacatttctcagtgccaaagaaaaggtctggaaaactcatcttcgtgctgcgatagatgcggcccgtgccatcgttcgtccttagctactatgaggctgatgctgacaaaacaattggcgaattagggttatgtcgtacaccgtaaagaagaatgacagtacacaagtttggctgtcgcatcacaaacaggtagagctctctttctgacttgcgctttgtgtctcttgggtactgccgacactttgatgtgcttgctcagcccttga

SEQ ID NO: 988 - DNA, 1316 bp, Toxoplasma gondii
  source 1..1316: mol_type = genomic DNA
ctttgatgtcatggcgcagtcacgcagctgagaaggctcagaccgaggcatctcccctcgcgttcgacccgcgcatgtctctctgcatggagatcgacacatgtccacgtcgaagtctatgcagagagagacaagaacgcatgcatgcatatatatatatatatatatatgcatatatatgcgtgacaaatatatatatatatatatatatacatatatatatatatatgtggacacatgtgtgtgtagacagacttcgacataccttattgaggattggaatgggtcccttgaatccgaggttttggtagacatttttgtaaattcttccgttgacttcgttctccgcaaaggcgcgcctcgctagccagtctttttgacagcggcggttgaaggaaggaaacgcgatggggggtggattcaacacaggcccaggattacgagctgccatcgtttagcgcaaggagaggaaaaaagagaggcaaatggagtgaaaaaaagagaagggggacagagcagaagaggaagaggagagagaggaagccgagaggagagacagggagacgaggagagacgaagcgaggaaaacaaagacaagtggagagaactggaggaagagaaagaagctcggaggaaagcaggggatgaatcagaggggaaacgcgtcgagactctctgtggagaccgcaggcggagctgctgctactgctgacggggagtgacggccagtgggtgaatttgacggcagagcagagaaaaagaggtcgttgtcttcaaggaaacgagcgaccgttcactggacaagaagaaaagaacaccttgaatgggagacggaaggaatgaagcgaaaatgaacacaaggaagtacagaggtattgcccggagccggactccagcagcacacacggttgagtttcgcttcttttcaagaggagttgagcaccggcagtcaagggaattgtcgaaatgtctctctttccgtgagagatgaagaaaacctggaaggcatgcggggtaattctcaagtccccgcttcccagagagctaccatttccagcgtcctgttgacacttgaacatgcatgcccgaaagcgcacatgcaaaggctggttgcgtcgagagacaccgtctagtcgcgtttcttctgttctgaggctgcttgctgtgaagggactttgaatgaggaaggagagaactaaaaaccgaggcaccttctgctctctttctcgagcgcggctcctctcccgtcagagaactgttcgctcttttgtctgtccgagacgagggagagagagagacaagctcttgtcttaata

SEQ ID NO: 989 - DNA, 2206 bp, Toxoplasma gondii
  source 1..2206: mol_type = genomic DNA
tttcgactgaaagaaacgggatacctgttccctttaaacatacatagacacatatgtgtttatatatatatatatatatatacaggtcgaaacatatatatacgtatatataattatataaacaatcatatatatatatatatatataagaatgttaatacatatataaatacatggatgcttatgcatatatatatatataaacaggagaccatataaagtgcctgtagtaagtgaatgtcaacgtggtactctgttcttgtgcctcctgatgagagactttgcgcttctccgggcgttttaggcagttgggggaagcggcgttcgtgctttgagatgatttgtgtagaaatgttctttttacttttttagagagaagaccaccagcatcagccttctagatcacgcacactgccctgaaggatcagaaacggaagtggaaatccgcatcaggaaaacatttacccgatgcagtcttgttgaaaacacgagagatacactccgatgacgcaaacaaagttttaaactgaaacaaacacaaacactctcagcaagaagcacggggaagacggagtgacatgcctgcagtcacatgtcacatgagtatgtatacatatttttatatccccctctatatgcctcggcgacagaagacgactgaacaccaacagagagcctcttaacaggagacacaaagaaaaacactagcacacatccatatatatatgcgtatgcgtagaacattatgcagatatccagatgttcaaagaaaggagaactgtgcatcgtgagcgtgtgacttttcagcgtatttgtagtcctatgcagtttcacacatgagcatatgcctaaatttccagacgcacggcaacacacacatggctgcatggatgtatatatatagtcaaatatagactttaggaaggggtattgatcagttttgtacacagaaatgtagacaaaagatatatatgtatatatatagacgagcaactgtaaatgcaggtatatattatcgatggatgtttggcagtaaggacctgttggaatttggggagcttgttttacagtgagatggttcttgctggtgagagagtgagagctgaacacggcgatgacgactctataggggatgccttttcgcgatattgggcctctgctttatgctcgccaaagatagcaggcgaaaagcatgcatgcgaagcgctgagcaacctttgcgaactgtcgctattacgccgcaggttgttggtgtgtcgcgacaggaatggagagctttttttgtttttctcatccgtgttcaaagtcacttttttttgggtgtatgcgctagccgtttgcgatcttctcggagaagctgttttcctgcttggtttctcccaggaagttgcagacactcgctgtggagaggcgcctgtctccaacgcagacttgctcgctcccgttttttcgcgtttttaccggcaagggaggtcttgcttctcctttgtcgtcttcgttagagcaacaatttgtcttgttttctcttttctctcattctttggcctttttggcggatccaaggtgtggaggatctcatcttcccaggcgctactcgcgatcgaacgttgggtgtctgtcttatacacccgggaaggaggtgacctggggactcgcgaaggcgcttttttactcgcaaatggcatagctggaggacacaaagcacaccttcgtttttctcgttttctgctgtttccgtcccaaaattcggcttccttgacaggagccctttcgcgtctctccgttcctcctcctcctccgcgccgagtctgccgaaaccgccgctttccactcccgcggcgcgtttcccgctgtctggttggctgtttccagcctttcaatctctgcctcgttcgccactctctttcctccccctcagcatcgctttcctctgctgcttcgccgcgctcggttggcactgcaccttgcagagtcgagtttatcgatcttccgcggcgccctctgtctcacctggtgggaggagagaagaggacagtgaggggcagcaagagatgccgcgggaaggagcgacggaaagtgaactgaagcagaggaagggggagggggagaagccgcagaagcagaggcgagagagaaggagacagagagctggaggaaggaaagcgcggaagcacatttcacccatctttgaggaagtctgctgcta

SEQ ID NO: 990 - DNA, 3024 bp, Toxoplasma gondii
  source 1..3024: mol_type = genomic DNA
gtcttcaatgagaagggtggtacgaaggaggctgatgagatgatcgacttcccagccttgtcttccttccggcttaaatacggctgtgagtctgtccggcatctcgtctgcttcgttgccctgtcctccacttcgaggcagtcctcgttcctcgcttcttttttccttatcacccttttcatctggtttctctccctccttttcgtccctacgagcagtatcttcctcttcctccgcgcctccgccgccttctctcccatctgtgtcaaccactattcgttctccccccgagtgcgctctttctggggaacggagcgtccttctgcaagagaggcagtcgtattttctggtggacgtctgctggtgtgtaggcgcggggaagtattcagatgatgccttcgatgcggcgaccagagagacctctcccccgctgaattctttctcattctccccattttgcacaaacgttttcccctccacgtatctaccgagtcgcttctcgcgctcagacttttctggatcagcgaggaaaggcgcgcgccggtacaaggcggggctcttgggctctctgtggctgccgagcggaagactgccaggcagcggtgtcgcgacctcagggaaataaaacagttctgggagattccatcggtacgcaaagcgcagacagtacaaacccagcgtacatacagggactcctagagcatcttggagctgctcttggacgcggcgggtcctcgcagtcgggcgtaggagtttttcttggtcttgccagcaggatttgaccctgtccagtctggatgtttcatttctgttttccgcatcttggccttccacaccatgctcctgttcagcgtgttccctttcaacttgagagttgagtcttgcctctccgggacccgcttcactccctccgtttccgctgcctgctgttttttctcctgcctcgcggtcctggacaggtggtttctggcctgcatgcatagggctgtctgtttttggcgagcgggttgcaagctaaaggtggaagccgccgaagaaacgaccaaccagcagacagtgaggaagtcgcctttctcgcgcgcttcacggggcttctggccagacacttcatagctccggaggacagggcgttgagtggcagtgcgggtaaaacgcatgaaggacaaagaatttgcgaggcgcccacttgtctcatattcttcgtgaatttccctggtcgaactgtcgcattttgactcgagggatgggccggagtacagagctcggacaactcgagcatgcgcgctctgattcgaatcgcggagaaatcgcagaaaacgcaaactcaaattcccctgaggcgcttcgcttgttcgctgcttcttcaaaatgtggagaaaaaccgcggtgggcggcaacacactcgcacgtcgctggcgaaaaatctgctggcgtcgtccgttgccctggagctcagacgagcgctcttggcaccggtgaaaacgcagtgtccgtttgaagcgggaaccggagagaagaaacgaggaaaaatccagaaaacgaccgatggcaaatggaaaaaagagtccggtgaaacggacaggaaggaacggcggcctgttctggagggtgtgtcttgcggtaaccccattcatggcattacgcagctgccggagcgcgcggcccccccatctcatattctgcttcccgttggtaacctcgctctcctacggacgggtccacatctgaaagcttgccgtcgtgtgctcaatgtgttgcttcgacaagtgtgaagacagccgaagatgacggtaaaagaattcagtcctctcgcgagcttgaccgagaatggtccctctcgcgcccaccatgcccggaagtcgccgggcagccaggccagatgcaaggcgcagataccccgtggagtcaagcatttgaagaattccactccacgcgaaagcgcgcctccagaacgcctgaggcttctagacaccgtaatgcgagtcgaatttcgcttgtcaacttcgacgacgaggaacgggcaactctgtgtcacttggctttccctctgcagccctacacagagcacgtcacgcgatttgctacctcagccaaagtctgcccagattcctcggtgagaagcgaaggtgctaccgcatcgtcgccgcgtctttcccgtcgagattttcggtggttcgcgggcgtttccccccgtacagggcagttgcaggcgatctgtcaacgagcctcagtttgtgtcttgtgtagagcttcgtccacagcgaagcgaaaatgccagtggagaaggcggcaaacgaaatctgcatgcgcatgcagctttctgggcaaaaggaatcgaagacacagcgtagtacgcggcatcgaagacgaggctacaacgtgggacccgcctgctccttccgagagcctggcatatttttcaccaacaagaagctttcgtctaggcggatatgaagttcctctacatgggggacgcgcagctggtgccgcatcctatgtttcaccgtcgctggagtatcgactctcaaccgcggtcccgagacgcggtttcttctgtctcttggcagtgctgcggagcgccttcgttgcacattaactttttcggcagtcgcattcgcacttacgcatccatacataggcgaaaaggaatgcatgcggacgcaggctcggtacgcccacgcgttcggcctctttgacgtgtggagacgtcattgccatcctactcaacacaacagtttgccgcgcagcaaatctgtagttgttccttagtgtctcttttttctcgtcttctgttgtacttcttcgacggcatctgcgccactggaaggcctctcgtaatcccacgtctcacctgtttgactccgtccatttccgggtgacaagaagcggacgattctcatcaccttctgtttccgtctttgttttcctttctcctaaccgttttcttctcctttcttccacgcattcttttctgtcctcgcttccgtcggcccgtgtgtgtgatccttgcccccatccgaacga

SEQ ID NO: 991 - DNA, 1734 bp, Toxoplasma gondii
  source 1..1734: mol_type = genomic DNA
cattagagtgtattcggtatatttcatgttgttgccggctcgaatgttctacttgtgttgctgtttggtggatcctatgcggccgtttgactctgaagctcgttcgtgcttctggtttgcttcccctctcctcgaccatttcagatgggatggctggaggcttttcgtcgttgccagtttgccccagctgcgtcaactcgacggcaagctcattacaccgagtgaaaggattgaagctgcgagacgcctgtcgtctttgaaatctcaactaaaggaaaaaatcaaagagaaacaggccagaccacaaagtaagcttggcgctaactgaagaggacttatataaatatatatatatatgtttgtcgtgacgtaatggggtaggaagctacagcaaaggagagaaagataaaaatatacaaaggtccccagagacacgatagtgttactgacaacatacagaatcaggtcgagcaatggaagaaccaagcaccggcgccagagattgaactcgcttggattgccgtagcgttttatgagttgatagcttggctctaaaaaaacaaggctgaaaaatggaaaaaaatgtctccaatttttgcctggcacagctccacttgtgcactttgcgttcccgaacaggtgaaacatcttcgactgcgtacaccacagaaaacagaaagaaaatgtaccttgagatggcgagggtgagcttgacccccgcgtcaggtcggggttacgttttaacttcgaacggcgatcacgtacaccgcagacgcaactgtagagtcgaaatgaagtacatgacgatcgtctgaggcctagcggcttctgtcacgagcgaatcattgcatataacgaccggtgtagaagattcacagaaggcagtcgcaaaaagctacgcagggtctgcacgatattgagaaatccatgatggtactcagaccttcaggaaaattgacaagtagcgactggttccacttgtcagaatcgtgactcgaatggtagtcagtggttgggtcgttcttgggttagagtaggatcttctcaggtactcaaggagatgctgtgccgcaagcaatacacatctaccttaaatagaatctcgacggtcataagttgcgtcaaatgatctaccgaaggtgcttaacaatcttaattacacaaacctgaacccatttcatacgagctgttcgatcacacctcgcatacgtgtacgtagcctatataaaactgtacatacgtatatatacatatatagagagagttcgcagaaaaggaattgcgttgatttaccgcgagcaaacgcggcatcatacaagctgcatggaatcatgagctctacggatttgcctcacagaaaagcagaattctgcgaagagatcagggggctagagtggtgatgcgtctgactctgtgcatgacaggagcgagaagaaaaggagaggaaagcaaacgaaggcaagaagaaggcaggtgcttcccgcttcacatctacacttcctttgcccggacagtctgccgccctgctggagcctcgaagatgcacaagcgaagctcttaaagccatattacctcagttccccgctgttttctgttcgtttgtacatctggacgcgacagataaaagagtcctgtaacgagatacagttatgaagagaaggacgccagtccccgggaaagaaacaagtacaccgtcctaaccagtcacattttttcatctcagccagtagagca

SEQ ID NO: 992 - DNA, 3920 bp, Toxoplasma gondii
  source 1..3920: mol_type = genomic DNA
ggagcctacgtgaaggaaaacaaagcactagacgacttcctttctggtcgttgtgtattactgctatggcacaagtcctcctctgcaatgtgcatgttttcggcaatcaggtttgaacgagaatttagaaggccacgacaaattcgtactccaacatctgaacccttggtaggacgcctctataatacggcgttcaaaacatactacccgccagattcggccctcattttgtttctattccggctgtctcggacacccatatagggagcgcagctcggtggagcgcgcacgttcacggcctacagggccgtgtgtacttgtgtccagtgaatgcggccgtgggtattcctgagctttcgacacatagacaaaatcgttgtccaacggggaatgtcaacgcagggccccgttaacacaaaacaagtgggctccgcgtttgtaaataactgggttctggtttggccccccacaacaggtatccaggtgtttgtctgtcgcgccaggttgacggttcaggcctggcgtaggcgggctttcttgtcactagaaatcatttcaaagttatctggaaaactaaaagtgcgctggccgtaggttttttgatatccagaagcatcatatctggcgctttggagaagcgtacgcctctccatctcagccgttcgtagggatgcggctgggcaggaacgattctttagcagatctgaagctgctaaacagtgctggtgtgcatcctcttttcctctcatctctatgtcttgccatcccgcgtgggcatgttcgtaactcacttcgtatatcatgaatgccgcttttcgtcatttaccgacactttcaaggacagccatgcgtaccagtgggatcaggcgtgcagggggacgaaattcgggctccctggacgacatgaggggttcgcatcatatggctaccatataaacatactgcttgggtagatccaggctcttcttaatctggaatatatgcacgtatgactgcatgagcttccttccccttcctccagtccgtctgtggcggggtacgggtagttcgctgatggaagtggtgacacagccgttagtaacggccgaagcgttaccacacagagccgttcttttgaaatatgttccggcgaagcatctgtgccgcatgacagcggcaaaagacacgtttgtaatgcattaagaacttcgtaaagtgactgaaccttttaatcaagctgtcagatagagcgaccagcagagtacgcagtaactgcagtggccagagctgtttgcaattacagctattgtcccacggccctcaacgcagaaaccgtcactgcacaccgtattccattcaagggccctcgaggatgtgccaactgcgctgtcaagcagcactgctgtcgtgcatccgcttttgcgcctaaacaccatcttcgatgagcatttcggccagcagggcttacgtgcagtgtaagatcagtcttcaacttacagcacaatcttgaactcgcagtagagtagcccgtgtttcgaagcccatagagtgccctccctccttccgaatcttcattccggtccaccatgcgggccagctgagcgaacaagccggagtatttattatgtaaagatcatccacaattgttaatagttcattcggctgtcgcgtaacacgaagtagtttctcctcgctgcaggacggcccacaccacagccctggaatgcgtttgagtcggccaacgccagcatctgaacaatttaatcagggcagtttccatgtccaacaagcgtcatttgttggatgttgctacatggaacctctggcatccacgagccgtaacacatgccccttggtgaatcgtgttaatcactgtcgcatccgcggacggcaacgccttcaaccaggagggcaatcacggctagcccacggtttgtacgcgtaattcaacggttgtgaccttggagccgcggacggctgctgcgggacgcagaggcgtgtttcaacaaccggcgttgaggtcgccgcgacgcagcagagctgttgcggggtcgcttccggacgaggtagtgcctccattgtcacttgacttggtcgccttcattttgtcgaccaatagtctgtcgtgagggcgagaccataggaaagttggagacgctcctgcaatcgtctttgtagggaaaggacgtgtttctcagtataaaaccacagatcgaccaccggtattctccttacgggctccactgttgcaggcgcgaagtatccgacgcttccgttgcttggcattctttagccactttgatggtgcattgcgtggactgtgatgattgagttgcctcatctgcatagcaatcatttaaggtgtgtccataaatttgtacacattgggagaacgaggacgtctcgagggttggagataagtgagtggtcaacggcaaacggggcgcgtcgtggccaatggcgtgccactgctgtctggaagtggtttgtgtgtcgcattcgcatccagttccttgagtagtcgttttctatctccgtatttgtgaagcggtgtagggctctttccgattgctcgggatgtgttgttgcgctgagcttcaagtgtgctagtttccttcgctgatgatgtctgaggcagttgaagttcaacttcgcatgaccagtggccaaccggactggcggcagagcggaccagctagcatcaccgctgtgtaaccgggcgttgtggctagccggagacaactgtcccccaatggtatgaaggtgcaagtaagggacgagcagccagtttcattcaaggcccgtatgggttatccgcctctgtgtaaacctttcttcgtagggttaagggcacgcgatttgtggtttagggttaccatgttatcatcgtgtagtgccgtcggttcaggattgaggcagataagaggggctatccacgacccgggcagggcctcggggaaggcctctgtcaacgcaactatctacgtaatctgtgggtcgtcaaataatgcaggtgctgtgatagtgtgtctcttccctgcgctgaagagattcccattgatccttgaagattatgctgtagtagagcttaatttccccgttcgctctacaattcatgggtttttggttttgggtgaccgacatgatgtgtgacacagcagaatggtcaccggtttgttcgtgaccgttgcggtcgtcgtttgagacggatgtagctgtcacgagcggatgcctgctttagcgtttttgcatttcttccgttaacgtgtgtgtcgcgactttaaaacggattgtggacgactccccttttgtcatatgtgacgtggatctgtgacatctggatggagggagggtgtggatagcactggatgctagcagccagcctcctcttctgaacaccctgtggatacaatctgaaaaagatgctcagataggtaaacctgcagacttgtctgtgaaccattaccatatgcagcaacgagtccccacaggcgtacttgatgcgttgtggttctgttagtgggcgaaaagctgctgcttcgatgtgcctggtatcaccagtgcagttatgagagagttgaggttccaggtgccccgctaagcaaccgagcaactagctgtaccgactccagctcatgcatacctgtgaagtccggtgacataatggacgctagaagggagggactagacctgatttccatcataccagcttgaccgtagaaacatccataaggtcaatgagcagtgcccctttcacgctgatccctcgccgtgcttgtccgtccagggcgacgaataccgcgtaagctctgcgatgtttatccattgctccgaatacaagacggaacgtttgcttaagtcacgtgtatgggagacattgacgcagcagctgcacgtgggccaccgcctggtaaccttgtgagtgacttcttcaccagaga

SEQ ID NO: 993 - DNA, 4873 bp, Toxoplasma gondii
  source 1..4873: mol_type = genomic DNA
tacggaagaaacgtctccaaacttggatgcgcgactgtgtagataaacgagagaaaccgtttcctcccctcttgtctggttcgctgtaggtgtccatacacgctgcttgtgccatctgttcactgcgtttgccacggggtcggcgttagaagtaattccaaccagaaccggtcttgcctcacattgttgacgcaacgcttcaagtctttccctcttccggttttctctacgagactcaagctggcaaatcgaccgatttcttcaggacacaccagtctcccccttgctgcccctccttcttttcactctttctgtcgttttcacatctggttcctcgaagtcgaaagggtaacgtgagcatgcacgacaaacgctgcgaagtcgagacccaccattgtggaaaccggagtttcacgaacaagtgacagaagcggaggctggctcgtaacggcctttctgtgtcagtgtttcagagttatgttcgcgtctcgaagggaagactgcgcatgcgcaggtgcggcgactcaacagagaagaaaaacagctcccactcgggagagacacactcaggggtgtcgaaggtctcgcaaggaaaccgaagtgcaaaaatagcaaaagaaatctccggaaaaaggaagagacgaagaacgcgcgacacgacaaagatgacaagcctaggagcaggaggaggtgcctggaaaaaatcgtgactatgggccttcggagttcgtgaaccacttaggaaacacgacggcaaatgaagaactggtaccactgtgtggagaattgaaacgaaacacgcacctggatatgaaaagtcacgaaaacgtccacgtgtgcacgtattgtgtacaggaatgcgtaccgtacacgaggctttctgtgttggatacgccagacatgcacgagaagacaatggagagacgctgggggacacagaactcactgagaaggattcaaagctgtctctgcaaacaggtggagaatttcccgtctctaaaaaagaaaagatctacgcacagaagcaggagcactgcattcacacagccgcacataaaccaacacacgcagagacgtcgctccaagagaatcgaagaaacgggaactccgaacgggttcgaaaaacacgagagcctccagcaagtcgaggaaaaacgtacactcaagaagagagaaatgacgcagaagaaagggaagaaaattcagaaggaactgtctaccgtccaggcaagtggcaaagcgtgaaagaacgcacttttgcccgacacactccccccaggcacagccgtccgaaaaagattccgagagggtgggcgcatgcaggttcacaacggctgaatggggcagccacgcatgcaacgttttgaaaacaagagttcgggtgaaacgggaaaactggaaggcacaacctttgttgggggctgtgtacaggtccgaaaggctcgttctacaagagtcggaggctccttacgcaagcaacccgatcccctcgtcagaagccatccttcggtgctttgcttggtatcgatgcgtgcactgtgttgaaggcggatgtcacgggtcgcggcagtcccgaaagtgttcaaggacgcgatttacaacgaaaaatgttcttctagcgaatgcacctacgatggaaaaagaggcagcggagtgacaatgagagcagccgactggtggagagaactcattttttatgagacagacacacgagagaatcataaggctcgcacgacgcctggcacgaactgcgcgcctcaaagtcaaacgccagaagaaagaatggaaattgtttctgtccgagatgaagcgatcaccgctttttgacatgagaacacgaacggcaagagccagaaaatcgcgcaagagcacgaagaaagtatcccgagcgtgtgtgaaagctcgaaagacttgactggaactacggtgtctcgttaccatggaggtgcttttcgacctggataggcggcacgcatttccgttattacgcatcaggcgttgtcccttagtcacatgttctccggagtagccaggttttcccaactcaacagtgcgagtttgcgcaccaagttcgctggtgttaaccgatctcttgtgcttgatcgcgtggaggcgacacgctctcaggaaaggacttctctgtgtattgctgtgagggcaccgattggaaggcttcatttaaatagttgcaccagcgataagggacacgtccttgtttgcgctgtacatgtggacatcattaatccttgtactgtccctggaatggctaaagaactgtcagcgtctaccgcaaagccaggaggcatgcaccctctctgttgcctatgcgagcgcggaatcactgagatcttaatgcagcgcaatgggtcaccttagggaaaaaaccaagcgctgattcctcctgcctctcacccgttcatcaagtgcgtgttccactctattactgcatttggtaaggccaattcttgcccctgaggtcgacaccatgtcacgtcacctgcattttgagcttcctaaagcttgtagttggttccccggaatcactcatttgtagcatgcaggccgttacaaagaaccgacgtagtcatcagctataccgtgtctggtggtgtatttcacagagaattcaggcctgattctttccgcaccttggatagccttgcacagttggtggggtcagataaagtgcgatagcaggaacgttaaacgagatccacaaaagtggaggattcacgagcatcagactcctgcagagaaaacacgtaagagttaatgccacggctgcgaggcgaattttaatccttcgctagcaaggagagaggaatgaaaaagttttgttcttttacaaagacgtcggcaaagacagcgatgcgcagggacgcggtattgtgtcacacgccacgggtttttcttttccctggaccgttgctatggattcaggcgtagaagtgcttctttggtgctgtacttccgagtaggcaacaggtttgagaggatgaatgcaggcatggatgccgcgtgtattgactcacatacagatgcagaagtaccgatgcagccgttgtgggtgccaacaataataattgtctctgttgcaacttaaaggtaaatggatttcacatccagacgagtacttcttactcggtgtatctgtgcctgctgcgatcaagacataaagctccactaaaacaatgaatggtagtagacacccgcgttacatcaaaggcacaaggcgactaatgcactgtagtgatgcgaagaaaccagcagcctaaaaagcgcagcaaaacgaactgtagaaaactgattctggcctaaaagaagcaggtgacatttaaagaaaacactcatcctccgcgatgcttgtgcttatgttttgacgaccgtccaaccaactggactgtcaagccttctgctacgttctttgtgtctgtatattcttcctgtgtcacacagttctggatcgcggatcatttgtacagaaatttcagtcgcaggtaaagttgtgccctcatggatgtcatcgacatggaattgacatttgtaggcgaaaaaaccaagtaagccgaagaactagcaaaagaggccaaggtaagacgtcgttacgtgccgtccgggtgacccgcctctcgaaaactgacacgaatgacacctcgatatcacgctctggctgtgaacgttggcagcgtaccgttacaaaatacccactcacccagtgaaaccataatgtgttgtctgagatttaccgaacggcggaaatatcaaaccagctacgactggcagctcttttctccttctttgttgcggaatcccgaggatgagccttccaggagcgcagtgaaactgtagacactagatctcctctgtctccaacaccgacgggcgaaacatcgtgactgaacattccgtaacagcgaagcgcctgacattatgtaagatcatagagatttgactagaaatgaaaagaaagaccggttaaaacatggttctcgaacctgctatgggccgccgttagcgaatggtgatgtgcgacacagcccagtcgaattaaccgacaatcatgacgtttctttggacaagacgaagctcggcaacgccagtaaaggaaactggcattgtatactagtaggctggaaacatggctttttcgaatcctcaccgaaaagccttggttaatttcgtcgacaactggcaacgggcaaccatggaggctagccgtacatgcggtgacggtgtctgcgtcgttaactgtcttgctcgagtcaagtggccaagtcgccgtaaatcttttgtagggaaacaaaccatatgcatacgtatatgtgaatgaatttgttccaggttcacttttaaagaggaccaagtttttcaaccaaaggacgggagtgacgctggaaactccagttgaagttgccctcttcataaagctggtgtcccgttccaagacgttccgtcgcctccagtcgcacgtttactcttcgccttctggcaccgcgaacatccctgacttcctccacaagttccatgtagcgcgctctgccatctggaggatgtttcgtaactggcttcgtcgccattgcgtttctgcaacaggatgccgcggagttgcaacaatctagcaatacttgggggctctatcgacgtcacatgcggatcccacacaaactccttgcatccatcaggttgaaaagagaaacaatttcagttgagttttttgcaagccactctcgtgtacctctgcttcaaagggtctggactcgaccatccgttacgaagatgatgcacagcagatgcggactgttgtctgacggccggtgaccctggtggcttactgttcacgtcgtgcatggtctggaaaatgtttcaaagaaaa

SEQ ID NO: 994 - DNA, 2037 bp, Toxoplasma gondii
  source 1..2037: mol_type = genomic DNA
gaatcacgacagtcaccgaagctgagacaatagaaagaccctttctcttttgtgcccccaaatgggcggtctctacagacagctaccacgcagcggagcatcgcgaggaccggaatccccaataagagaagaaagccttttcctctagacggctatcactgttgcatccgccggcgactataaccgtcactgtgcaaggcaacggagattccctctgtgcacactcctcaaagcactcgaagaaaaatcaagcctttctgggtatgtttcactgaggtgacttgcgggcactctcccagctaagtaacgtggtcaactcatctctaggaaacggaaaccgtgctctctgagactattttgcagcacacggggctgcgcgagacacagttccgtagtcgcgaatcccactgatgcaagggagacggaaatctccatgcatcgtctgttttatgttttgtctcaacgtcctgaaagttgacactgaaatagattaacttatattcgtgtccgaattttccccttcgcggcgagcggaacagcggcccctgcggcacatggaatgaatccattgttgccctctcacaattttcggactttcttcaactaataaattgtgacagaaatgacagagcacttaccgtcatagagacaagaagaggcaacgaaaccggcggagccaagaaggaccccagcgcggccgatggtcgtgaggagtctctctgccattttcgacgctgaaagaattcacgtgttgactcgaagagcgtgttagactgttgtccagtaaaagattcagaacgcgaacttcgtacagggacgaatcacacgacgacgcaaccgcacagttggattctcgcggcgacccagagttgagataggtgcgaaaattgagctccaaaagacagtagaaagtgccaaaccgagtgcaaggcaaaaactgcgagcgcggttcgttgtctactttcagaaaaaaaattcttcctaaaaagctccctccgcggacggatgcgtggcgtggagagacggaagtcttagcactggtacagacgcaaaatgcacgtaaagttggtgtctcaaaaaacgacaggtgaatggccgggggtgaagaaagaaacggactttctaagcaaaaagctgagaaagagggtgtgagatttactgttttcttgaaccgaggaggggaacagagggcggagcatgtgatgacgtctcgtcccgcacgcacggggaattgtcggggcgaccgcaatttcactgtttgtgtcacctaggaaatcttccagtctcctctccgttctaccgggtttgcgtgaatttaaagcccgttaaaccgaaacgtgtcttcttttttgcggcctgtcccacatgcgcagcagactaagccggctttgcctaaggcgcgttttcagcaaaatcgaaaagccgccgcggaagtgtgcgccttctgggttgaaggccgagttttacacctcagcaagtgccttctgtcttaaaataatcggtcgcatccaggcagaagtcccgatccgctctaaatccggctcgcctgcagctttgcccagtgtgtgtgtcgagagaacagggaaagtgtctaaaacaactaaatacaactgcgggctgtgaagacggcagagtctcgcagccggtgcccttgaatttctagactcgtctctgcgcgcaggccaccaacacgttggtgaccggaactccagcatctcgccccgttaatgcgccgccaccccggcacatcgcgtggaggcaactgcggaacagacccaaaatgttcctacgggtgctgcgggcgccgcacgggacgcgaacccaagacgccggctagtttagacgcgggtcagccctgaaccccggacccacggtgcgcggaaataccgacaacagtccacaaatctgcctgatcgcgcaacagccaccgtcattattcgtttaaccctgtttcagcggatttttttggtgtacgtacacgttgccctcgggcagagattcgcacctcctttccagctgcactctacactatcaaaa

SEQ ID NO: 995 - DNA, 2340 bp, Toxoplasma gondii
  source 1..2340: mol_type = genomic DNA
agagtccatattcaatttccctgtgtccaccagtaagcaactgcttatcgtagttcctgcaggtgaaaccggaggtacacatctgctctgatgaggggaaaaacctatcaacttcgtgacggaaacctgaaatttgggccatgaatgaacagaagaaaacccaacaaggaattgcggtatacagtcgatgcccacttacctggcgaggtatgagtgaatacgtgccaatgagaggcgggaaaagtcgagctcctaacaaaaacgcagcgaacccaatcccagcaagcgtgagttcacaatctcattcggtacaacatccttgccagactaacactgaagacgttattcacgagcaagttgggcttgaaagaacgcattacaatcctcggttcactgtctcatttcacagggaagtccgtttgcatgagtccatgtgcaaaatttgtctcgagccgctagcgagcccacgtcaagcggttttacctcctaaaagtgaagtctaaccaaacgcaccgtttccaccctgtcgcgtgtgcctccgtccgccacggtcacaacgttaccgacttctgtgtgctgagctcacctgggacggagaatccaagagagggtggttgatgtggctgatcccaagacgagaatagagcacgcgctgttgaagcggccaacttccgtatggccacgcaactgtaacaacgagtttcacgttgaattttaggagaaggttctcgtcgagtgcgtgcttcagggaccccacaaaaaggctacctttcgtcagagtgggtaccaaacccggaggatagatgtctgtgggacacttcggcatgagactgctagcgggtgctgaccctgctcggattcgctccgcggactgaagagtcactggccttccaacaaccatattgcgtactgtttcccacgtctcatccgcggatgtgttcaccgacgaagatactcctggtagtgaacctccaacggcagaagaagcactctgcattgacgccacggaggggcgcagagagccgcgggatgccaactgcgaattattcgaggtgccgaagccgttgcgcgataatgcagaaatgtacggtagccagatccacagtttcttatcctcagacccgcttgctccaccgtggtagaccgagacagggcggagggaagaaggtcccgaggaagaaacggccacctccatttaccgttacacaactgactggcttgaagcaggctgggacacaaaaacagaatgcagatacggctgtacagacgtgggaacgcttttgcatgaattgaaagagaggcacaataagaagaggtcactcaatcaagctggatcaccgcgtcactttgtgtcagcgcaagagggaggatgaaacgccggtcactttacacggttttcgttcttattaccatagcagcgaccttagctctttgtcaaaaaaaggctgtaatcacgacttcataatccccttgtaaaaaaatgacaccgggtcggcctcaaaaagagacgcgcagctctagtctcgtctctctattttgaaacagttctgcggccgcgggggattgagaacattcggccgaggcaagcatagtgtattaacgaacgggaggagagacacaaccagttagaaggcatgcaccgaattcgtcgcgaatatgttgccgtcttcctttcagttgatgcctcgacgggagtgcgttatcttcaacggtcgaacgctcactggaggtggaaaccgccgtcgagcgtccccaaagtatcaggctaccaacatgcgcaacgctgtgaatttctccttccttcgtttacgtacgtcggatcgcagaagtgatttgctttgaggcagtaggccaacagcgacatctcaccggatgcgacgcggtagagtcgccgtgtttgtgactgatgttgtcacaccctcttttattagccatttacaggaatctcacacgagacaacctgtcgatatcacgaattctcataaacaaggtagtcagaatttgtcacattgagacagctatgtcactttgatgaagtacggaagaacaggtccacactacggctcgcattgtgcctgtgcagaaccagagacgattgactctcttcccacttccccgcctttcgctgaaccttgcgaacagcctcgaccacgcagcactatttatcgcatcccgtggaccgcatcactcattacgggagttgtagggaagtctctgtggtggcgtatgctacaggtcttgtgtagataacgtgtgcaaccggaatcttttgctggaccccgtttccgtaagccaagccgtgcgacactttcgttcaaacatactggaacaggacattca

SEQ ID NO: 996 - DNA, 1831 bp, Toxoplasma gondii
  source 1..1831: mol_type = genomic DNA
ctttgcaaagcgtgcgacatcttcgggctaccacatgggcatctccacacctcctggtcccgatgcgtttccttcccacatgtatatatgtatatatatatatatatttatttatatatacatatttaactgtttatatatatatatatatatatttaactatttatacatatgcctatgtacgcgtgcgttgacttattcactatcttctggtgcacccttatatttctacacacaaatacacatataagtatatattcatatatatgtgaatatatatatatatatatatatatatatagttgtatgtttttttttgtttgtctacgtttttggtggcaggtgatggagaaggaggcgaacgcggatggcggtaagaatatttttttgctttcgttttcagtgagaaatcgggtattggtcaggaactggacgagaagtgccgaagaagccagcggagaagtgacccgggcgagcgatggggtgagagggcacagttttgagcagtagagtttttgtggaagtttgccgccccaggaagggcaggcgtttccacacttggacgccacttcgaaagttaaagttttgctgcaggagaaagaaacgctcgagaaaagtgagaaaagcggaagaagttggagaaagtcggcggccatgccagcagagctcgaggtcgcgggcgggacggtggcaagacaccgcccggcgaagaagaggcgttcctcgtttgcgagaaccccacagtttctttctggaaaaaacaacgcccgcgagagaagagcgatcccttcgttctaaccatgtgaaattcgagggaggccaacgcggagagacgttttcttcaaagcctgtcgattgagcaaagaagccgagaggtgggtggaccgctggacgcgactcgcgcaccctccccccttgtttcgcttcctcccaccggcgtttctctgtcttgacaaagaagaagcctctggcgcggaaggtctcgcgaattttgccttgccttcgacgaatttccttttttttacctgtggaagaagaggaaggaaccaacgccttctctgcgtctcgacctccaacccagtccaccctccacatatatctgtgggagcctccctatagaggtagctatatgcctcaccctctgtctccctggatgtccttctccgtctgcctctctcttttcaccctctctcactctgttcctctgtgaaggctctttctgcggttctcctcagctctcgacgccttcctctctctctgcaacttctcgctgccgtcctctgttgcaccgctttccgtgtgtcttgcctcctcctcctcctctcgcgtgacggagcgcgctctgccggttttgactctgtgaaggaagcttctctttcctggcgacatttgctgtttcctgtcctgcggtttctttgcctgcgcgaccccacggcccagaccaacagactcgctctccctccccgcctgctcgccctctctgcgtttctttcctgtctcctcctccgtctccctcccttcctccaccctcgagccgcttccttcttctctccctcttcttctctccctgctctcctcttctctgtctcttcctctctctccgtcccttcctcgccgacgctgcttcaccgatcgtcagctactggcgtctggtgcaaaggccgtcaagaggtcgcgccgacctgccctggacagagttccaccgttccgagcgcagcttttgcctggaaggagaagcgttcggactcgcgcgaatggaagagaccgtcttcttctccgtcgtgaaatcgcttgcacaagtctcggcccatcttcgtggacggcgcaacca

SEQ ID NO: 997 - DNA, 2929 bp, Toxoplasma gondii
  source 1..2929: mol_type = genomic DNA
acttcagtagtgggtaattttactatgcatatgtgtgtaatgtgctgtacagacgttccccaagcatacagcggcccgaacgtcggacaagcgaagagcggagagcaatgatcgcgaagtggaatgaggagcgcgaagaagcgaatggatgacgttagcattgtcccgaagtttccttttgagtaactgcatatttctgccttgtgctcttttctgaaaaacacctccttagccagaaacaattcactgatcgaggatgttgggcctttcagagtccatttgccaatcaccggctgtccgaaacttcagatagcggcgcgttatgttacacgcagcgcaggcgcaggggttgttgacatgttcagcctatttcgaagtcagcacatcgggctgattcattgatgatgcccatctcaccctcttgggcagacggaggagctctgagtgccacaaactgcgatgacacgcagtctaacaaatgccgcggcgatgttatatgactaaggaagcactgacgtttcaatacgattctcacgcgggacggtcatgtcaggggtggttaccttccactgcacttgaagcccaaagttaaagtaattacctcaacccttacgcgagaaagtgttggcaaggtgaagtagaattagagattagcttgcaggctcagggagggtattcagaagcacgtttgttctcacagagtccggacagtgagtagtaccagtgtgccggcagctagaaggtagagccgccctctctgatcgtagcattcatcctaccgcaacaaaaggacatcacattgcacggcctgcgctctagtgtagctgtcggttgccgcgaagtcgatcaccgcaggtagctggagctcagtttgcatccgtacggagtcgcacttttcataggggtccggtgtacggacagggcagacgcaagtccttcgctttgcgcatgggcgtgcaagggtcccagtcgttgacgttgtcgcatcggaaggattagtaagactggcgagaccatttttacgtcatgcgagatttcttgcaattaatcagcggcaggggcgtcggccctgccccgccgtcaaagacacaatccactagcgtcgaggagagcagctactcgaacgaagcacttcgcactggagtcgaaaaagtcgttttctttacgttttgtgcatcatctatgctggcactggctgcgcttggactggtaggcacgccgcagccgatgattttccccgtcggttgcacgagtttgactgcaggggataggacagttttctaccgtttgcgacgtctccatggccatatggaacctttgcaacgctggtaaaaggcgcagatgtggtactatatgaggcgttttatttcgaccttttgttcgtcagggatcctgtccatactcagtgtagcctccgtggcagcaatgtattatgacccacctgtgtttactagtaggcagttcaacaagaactgcacttgagggtctgcttcatctgcgtactgtcagttatttccagacttgtcacgaacgccgacttcgccgaagttgcccaacacggatccccagccctagtgatctttttcagtcttcttctgttgtgagcacttcaaaaagaactaaaaacggccgcccacaacatttgccccgcgcaggccactcctactattgatctggtgtatgcaaggtatatttccggattctcttcgggtcctcgtgtcctgttgacaccatcgtgttgccttcaggttacgtgggtattctcttttccttaacatgcaagagcactgcaccgcttctgttcgcgggtacagttgggaatatctgcctgtaagttcttcctgcaaaattagccgcttgagtcaagactaataccaagtattacagaacgatagcggctgttgctgtgggaggaatcttgatgactcactttattgggttgtcgagtggaaaaagtgtgtatgaagtcgttgtcacgaactttgcttgcgatcccttgtaacctttgtaaaccgggtacccttgtagtctaccaacgcggctgcatctccaaataacactttgaccccccgtgaagaggctgctccaaacctgactcgaagagcgttcaatgttgctggctacctaccagtgattgacgccgaaaacagcacagcagcgttcccccgtgagtgtcgcttagttcggtttaacgtggcccgcattcgtaagtgtggcgatattcccgcttacgccggcattgattgttctgtgtgactgctggaaccgacaacagaacgtggacacgtgaacacgacattcctgagcgctcgcattgtctcgtgccagccataggagcagtcggccggccacacatttcacaagaaatgtatgggaaacaaaaataggcggctctccccaagcgcaactcactttggttttgtcagctatggcgcgcttctacagagtaatgcagcacgtcagttcacccactcgaaccgaaagctgatatccacgatgacgaacgttcgagtggtttcgtgatacttttgtgacacgtgcgaagtccggcagcctgctggtccttggcagtggtgggtctggtgcccgctgttttcgacacgggaatcaaagaacaatgtactaaataaaacaacaaaaaactcacaaaagcaataactgaggggctcggacgcggaaagcgacaatgtatcgcatcgccggaatgttttgtttttgcttgttctttatgaaggcacacgcttctcacggcgtgctgcttttttcgccaactgaatcaaaaattgcgacgtgagattgacaaacgcttctttccgttgaatcgggtgtaattaattgcccgaacgtaggatagcaacgtcgcgcccgccaagaacttactcaagctttctttggatactggcaccataactacggcgcacaatcaaga

SEQ ID NO: 998 - DNA, 1580 bp, Toxoplasma gondii
  source 1..1580: mol_type = genomic DNA
gaagcgggtgaatgatgaaatgatgaagccgaagagggcgtggaacgcgggagacaagatatgcggggacatgcacagggcacggagcgcggagagcgactgtgaagcgcgcggggaagagaggagagagaggtgagagaggacaaagaagagagagaggagagagaggagagagaggagagaaaggagagagaggagagagaggagagaaaggagagagaggagagaaaggagacacacagcagagagcaagggagaaaggaggagggagaagacgaaccgcccgggtcgagtgcgtaggaagcgaagacgcagggggaggcgaggcgaggaacaaaggtttctggagggggagacggaaaggcaagagcggagagatagacggggaaagagggagacagaggaacaagaaagagagagaaaggcagcctgacacacccactcaagcgcatttgacaacgggaagcaggactcgctggaaagaggaagcacaaggagaggcgaagcaacggagaaacagtgaaaaggttcttactggagctccccatcgcgttcgtctcggcttcttcgagttttcatcagctcctgcctgctcctctctgagcttcgctgcccccacttggtcctgatgtccctccatgtcctttgtgttcgtttcgagagaaaagccgatgcgacgcctgtctcttcttctgcgcctcgctccttggtcctgaagggagacgacgcccgcgccgatctgcgcctcagctgccagacggcggagaggacgcaagggaagttttcttgcctctggatctcaaggcgacgcagtgaacacagagaaaagcagacacgaggcgaccgagagagagaaggagagggagacgacgactccaaggaagcgagaggagaaggaacgccggatgagagaactcgacgacagggagggccgcagaagaaactcttcagctttcctggaaacaaagagaccttctgcggcgaagaagaggccgaagcgcagcccaagagaaaaagctcccaagcgcgcagaagatgcaaacacagaacagaagaaagaggaaaggagcaagtggggagagcgaagacaaagcaaagacggggaggaggagacggaagagcccaaaggcgaggtcctcctcgagattcaggagagagaagaacaagtaacgacaaagacggcgagagaggaaggcaaagagaagcggcgatagaagcaagcggggagaagcagagagacggaagagaacagggaaggagaggtgaagcagagaaaggggaaggagaaggagacagaaagaaacaaggaggcaacgaagcagaggggaaaagagaggcaaagaagcagttgcgcttcttccgcgattcctcgtccaagagaaactttttagttggaaacaaagacgcagtgcaccccagagaggaagggggcgaaagtgcagactcgcagatcttctgcgggagactctgctggaaaatatgttgaaaaagaggacagagaattcgccttcgctgggaaacagatacggacccctcgccttcgtcgtctcttgcttttttctttagcggatgcgcttgca

SEQ ID NO: 999 - DNA, 2026 bp, Toxoplasma gondii
  source 1..2026: mol_type = genomic DNA
cgatcgctggaaaaatgcaacgttgcattaaggtttggtgcatcacacagagacaccgcgtcagcatgtgcagcaacaatgaggcatgaaacggcttcgattttcggatgccatggcaaggagacgcatcaacagccgagctacgacactgttcgactgaattgccctttccttaccgagtctgcggatatccctgacggtttcgtcgaacatctccttctctcttttcttttcctgttcttcgcgtttccttctgtctgcatcggccgaaacgacagcgctattcgtgccttgccctgccggtgaccgcccagactttgcgccaccaggaggagttccagtccgagagttgccgcttgaatggaaaccgctgtccttcttccctgagccgcgagcggcaaaccctccatgtgcatggctggagctgccacggggggtcgcagaagtgcggtcgcaggaaggaatttcctgaatttcctctccgaggaactcgaagccccacggcacggaacaggaaggtcgggtggagtcaggggaagaagccccagcagttgacgaggaatctcgaaagccgttttttcctcccctcgagcgcttctttggttgcaggtcacagtttgagggtgagacagagggcgaggcgcctacagatgagacagcactctcaactgaagtcgacgatcccttcttcttccttgtgctgcactcctgagtgtttcctgtcggtccgctgtcttggtgatcgacagccctcagtcctccttgagatgaaactcccgccctttctgaggcggactcggcactccggcggcgcttttttgtctcgctttcttctgaggcaacaacggcctgcgaagaagagcatgctgggacactctcctcttcgtcatctccccaaaatgccgcgcagatcgcccgcagcttcgcctccgcttgcgcctgtttctgctcctgcgcatctgcatctgcctccgcgactgaagcgacctcgccgctcttcgccttcttcaacttgacaggcacttcctttccggcaagttggccaccatttctcctccgtcttttctctatgttccgtgaatcggatgaaagcgccatcgacattcaagtagtaccggaactcactcgcggacggagggcgacacgctacaggctccctacccgagaagaggagacttcgacggttcagagagtgcctgctgcagtaacattcaaaaatcttacccatggagttctgctaaatgctacatgctttcaccacttggtttgtgcgtgtggcaactgccgtgttttctaagcaacatgcatgcagcgtgcatgcagccccagtcgaccgtcgaggtcgactcaacaaaaatctgcttcgattttcgccgggtgtggccaaaaccactgtcattgactgtgtcattgtccgtcttgtctgaatttcccatcctgatccattttcagacaagctgcacggacaggaaaactccgggcaggtcacgctcgcggaaatgtcagacagcgcatcgaacatctgacgcattgtgaccttttgttttgacgtttcaaccagctttctcttcctcctttctcttatcccggtcttgcatcttctttcattgcgtacaacccttctcaggacgctcatttcgtgcgtttttttcaaacgtcagctggaaataaccatgtgcatggtcgcctacgcggcagctcatcggtatcggcgcgcccttcttcctgtgttctgcacgccacgaaccattcatgtcctcgttgaaacgctaataactgcggcaagaacaaatattttggacaacctcgctggcagcactggatgcaagtggaagtctgcgtgtacatacacccgaaagttttcggcttccgtgaggtccgctcgtgccgacttctggagccaaccacttactttctccagttccgacgcatttttgcgcacaataggatgaatcctgcagacttaatcgttctgcctgcggactggcgctttttactcccggggttggcgattctgttccagcga

SEQ ID NO: 1000 - DNA, 4251 bp, Toxoplasma gondii
  source 1..4251: mol_type = genomic DNA
acttttaatttcagtgaacagcaacagggaatgcctggaacggtggtactgccttttcttgagagtttcctcgtgcttgtggcactaggcgaatctgcacgaaacgatcgggagagagcagtgtctttttggtgagtgaatgatgcggcttccttcagagagagacatcacatatgttcagaccatgaatgaggggtacctcatctgtagtacctgcttatgttcatacacatatagatgtagatatcatcagtccgtatctctacgtgcacctatcaaccctcgtacatacaaatatatactggtatgtacataaatgggcactactgattgggccaaacggagcatgtcactgtctgttctgtatggactgttcctactgttcaggatgacaaccccaaaggttcggggaacaagatgaggaacaaaggctaaaaaacagcggaaacgactgcttgttcccaaaaaatcggccttcgatatgcgcgaaagaaaggtgcactcgtagcggctcgaaactgtcgggacaaatcccggtgcagtggtcaccttcaggcaatgcgccactgtaatgctggaaaaccattttgcattttgctgtcagtgttccggtctggtatgtctgcccatacacatgcagctgttttggaatccgtctctatctgcctgtccacaaagttatgcatttaaatgcatactgcaactcgtggatcaacaggagttgtgctttttgtgaagcacccgttctgtcacatctgatgccttcatggagaggcagtggcccctgtcaaaacacggaccgtcagcgaaaccggtgatttggtgcggtgttgcggggcaatgcgtctatcggattaagcacgggcaaatccgttggcgccattacgtttccttacgcttggcaagcggcctagagcggcaacacacatctgaaacactttctccgtgactcaattctctgcgatgcttcccgtctctacacaactgccggctgcttttgtgtcgtctacactccagcgagatgttccccatcaagttcagctgtgtcactgaaggccctccagaaacgcaaacgtcctgcccccaaaaccggcactccccccacggatggaaacttaattttcgaatgtcaacacatgggagaacatctacactggccacatctggaatagctccgtggaagtacttgtgcgtcgcctccttttgtgtagcaagcgtgccacaaagcgtatcgttcagaactgcggcagccgacggggtgaaaaagacatgaatcacccctgtcgagttttcatgaagcacgcacctccggagcacgggtgtttgttcacagatgaaaacatgaagagaaaaactggataaaatgtatgcgggcgcgcgagatgtcgcgggagggctcagcttgtggtactgagggctgtctcctttaaagtaactgtcaacggaaggaaatgttttgctgtgacggtgcggttgtctcgcgtttgtcgcgctgttcgcttcctacgacggcgtgccggaggcatgggttccaaggtgtatgtgaaaaggtagatttccgcatatgtatacacatacatatatttacatttggttccgtattttaagccaaaaagtaagcgggcacttcgactgacatctcagttaaaaggaacgatctactacgagttcaccgagagccgctggacggaaaaggaattgtgcaagaagccacaggccaaagcctgaatcgccaaggactcctgggattcgtctcactgcaagctgtacacacacactgacggctatctgaatgtccacagatacgtcccttatgtcccattttacacggtctaaaatacagcaagtcacactcgatttcccgatcttgtacttttctgcgttaagaactatccatcccacggtttagagcataaatccccccacgctcgccaacgggaggccacagcgccgcctccctgcgataacctttgatcagtttataagccattcaactcggtttgcttcggctggtggttatgacagcaccgcccagggcacgttttctcacgtcaagaaattaagacctctcgcctcggattcgcctcgccagctgaatgtccttgggcatgatagtaacgcgcttcgcgtgaatcgcgcacagattggtgtcttcgaataatccaaccaagtacgcttccgccgcttcctgcagagcaaggattgcttgggactgaaatcgaagatccgtcttgaaatcctgggcaatctctcggaccaagcgctggaagggcaacttgcggatgaggagatccgtgctcttctgaaatttcctgatttcacgcagggccacggtaccgggtctgtatctgtgcggcttcttgataccgcctgacatcggagcgctcttccgcgctgccttcgatgccagctgcttcctaggagccttcccgcctgtcgatttacgtgcagtctgcttagttcgcgccatttctggtttgttttcgaaggcagaagtatcagggacgcccttgtgggttcgcaagattcggatcaacagcacggcggcaaaaagaaactacaagcgaaaacgtagggatcgctcaccaggaaatgccaaaaaaacagttcttctcagtaacgaaacagcgcagcgctcctcgacaatacggaagaaaacagggaaaacgtgcgatggcaaaaaactggcaggatgaccgttgttagcaactatgcaccgggactcgggaaacatcaacgaacgccgtagtcgacgagacaaagtcagagtgcgacagcggtggcgtaatcgagtttgcgttttaaaaatggacagaaagcaagtctacacaggaatgcacgtatgcaaggagactctacttgtccgcttcacccgccctctttcggttctttggtgagtgtttcggaaaagctacagaggagcgagcgcggctacgggttagggaagaggccttgcagaaggtggcgtctcagggtgtccaagctcgtcgactgggggacgcggacaccgaacaagcacccgccactggccttgttcgcttcgcgctggcattccgcatataaggtcggctctgtagctctttcctcggaaaagcgagacgggaactatgccgccattttccgaatgatgtagcccggggccaatcagcattttatttccttgagggagactttaagaaaggtggcttgggtgtcaagagttctaacgaacgcaagagagttgtgcttcaataatgctagatacagtcagagtgtgccctgcctcgtcgatggcggtagactttccatctgttgcagaaagagcactccaccgtgcttgttctcaggtagcaactgcttttgttggaggggggctgagtaagacgtgtgtgtctctcacaattcgctcctggctgccagctgatactcagagtgatgaggaaaaaacgacaaggatccgtgcgtcggggaaactctaagcactcgccacagttgccaccgctgacaggacacaagtgtctaaaatgcctctctccccgattgccctcgtgtttcacgtctaacggtaaactacatcggtgtttagggaccacggctaacaaacgcagcaataaatatgtatccatatatttgcgaggatacatgtaggaataggatgtgagtgcgacccacggtacctgacagacagacgtgaatttcagcgttgctgcaagaggggcgggggtcgttgcctagctgctttgccacctcgcatccgctatggcttgtcaggatcgaaacttaccacggcagtaatggattgcgttaaaaagtcgttatgaaacagctaactgaacagtcgtcaaaagtgaatgcctgaggctgaaaatttttccccggaactctttggactgcgggccgttcgagacaccgcgactgcggcgtcttgacaaggatagtgattggcgatcgctagccgggcacaggcatcgatctctgcagcattaaaagtgttttttactttagctgagttcttctgtgctggataccgaagatacactcatgaactctcgaccgatatgaagaaaaacagtaccggctacgttgtggcttgtacatcatgctgcactgtcagagcgtggtcttggaaacagaggcatgacttaagactaccactgtaatttggcaaaacagctgtctgtgctgcagattattgattgcgaaattttgctccaacacttagcctaagtctgcgaaaggccccccatgtagttgactatgcttttgccaaaa

SEQ ID NO: 1001 - DNA, 1517 bp, Toxoplasma gondii
  source 1..1517: mol_type = genomic DNA
catgggtgacagaacatatggaatgtgggttgaccacgaaagatgtcgatctcccgccgacactagataccgctaaacacggcctgtcgtgccggtgatatacagcgaaatatcagttcttcagtcccgcttctgcagacagaggatgtgcttcttgtgacatacagctcatgaaacttggtgaggtcaggcatacaaccagcagcatcactcgccaaaacctttctagacgaacgctgacatgctatttaccgtgcgtgttgcatcaccataattctctgcgttccgcaaccccgtatcatacagaacgcggcgcgattacctttgcacttctgctatcgcattccctgacatactatgacaagaaagccatccccgtatggccgtttatgtgtagtcaacgcatggtggggcgctagcacagcagcatccccgacgatcgtcctctcgcccctctatgggtcgctagctggcgcgtagaactgcgagtctccttcatttaccttcttcacacttcatatacggtttttcgccaccttccccactctcccaagccagctcaatcccgattcgattcttcgcctttcgaagtagagcttcttcgttaacgacgttcaggatgtttcttcttgaaagagaggccatccagtccctggggaatccacttccagcttcggatacgctcatcccgtaacagctccacattggcatgtttatcccaacggcattaaaacccatcttcttgccgcgcttcactcccccatcgcggatcctagagacaataacacgctcacaagctttcccttttcctatgggcttcagaaggagctcttggtcctcaccttctaccactgtaggacgcactgcatccccatcatctgaaacagctgccttttcaacgtatccacgtctgtcaggaggctcctcttcgtcgtggcgcttgccgtcagaagcctcctgttcgtagtatcgcccaccaacagaggcctgcgattcgctgccttcagcttcatcagaacgtggctgctctactatttgcccggccccgtcacccggttgctcatccaaatattcgctgccgtcactggaccgcacatgtacagatccgtccggcggctcgttgcaagtcccagcacattctctagcgttctctccagctgcttttttcgcttcgtcggcaggtcctgctgcctccagttcttcatctctactagaggaagctgccgttgtgtcgcctctgtcacgttgggcgtcgtcagcagcggacacgacgacacaccttggccagctaagtggagcttgactactgaagtgattcaactctgcatctgagatgatcgtccaggccacgagcaaaatgcgaagcgatgagggcttcatactgacagcgacccagaccaacaacgtttccttcttgccagcaaaaggcgatgatactcaacggtcagagagtcgaaaaaaccaagtatgtatcgagctcatcaaaactgtttgtactttcctcttccaacacagaa

SEQ ID NO: 1002 - DNA, 2118 bp, Toxoplasma gondii
  source 1..2118: mol_type = genomic DNA
gaaagacacccgctgcaggtgtgtcgctttctttcattcgccaggtgccgaaaacgcggcggtcactcaccagctgtacgtacaccgcaggtcgctctcctgcgtaggagtcgggttctgtggatctgtgtttccacgaggcaagaggaagtctcgttcttgttcgaggagaggcactctatcttctctcgtatgggcgggacgttgaaatctcgcatccatggggtatgtaaatcacgtttaaagtgtgaaagtgaaggggaagaaaacgtagagcaacacagagatctacgctccgagatgggatgcagctctgcgtgctctttctctctctgcggtagaacgctggaggcgtctatacacctgagccgggtcgcgggagaggcgctgaaggcgcgagtctcaaacgtctgtctgtgttggagtcgaaagtcaaacgaagcagcatactggaatgagtcttgcaaacaacttcaagtgtgaatgattttctttcacaaacgataacaactagtgtcggcgatcggctcttctgtcggaagacgcgtgctaacttccacattgctgctgtgatgtacgaacaccagcccacgcggtgtacagacgcctcattcacacgctacttaggagtacaagagtggctatgtgaatatgcacccataaccgtctctttctccagatatatatatatatatatatatatatgtttatatacgcacataagcatttcggaacggcaccgtatggccaattttgtcgctacgagggttttatcgaatgcagcgaattatggcatctttcaaaggcgagaagtgtcaggtatctcctatacatcttcgctgtcgagcgcttgcatctgagtttcagcctgacgaaagtccgatctggcacctacgcgaacggggaacgcaaatgctgaccgcgctggctgccaccacggctattttaggtgaacatacacctcagacctcgtgacaaagccatgcctctatgctgtctatgtccagaagacgcactttcacggacgactgcttgtcgtagctctgcggcagtctagtctcgagatccgcgagacaagcgccgccccgtctccgctctgtatgtgcacccgggcgacgataagtggaattcgagcgagaagacagagaaacgcgtagacgcagtgtgttgacactgcaagtggtcgatgtgacgacaagaagaattaagttgaactggatttttttttcaaaaagtctttgagtctgcccgtcagtaccagaacccctctccttcgatttcgcccgaatcggccgctggctgcatgcgtatgctggaacgctcgccgcagctttctcttttgctctccaactgatttacgccgcgtgctacatctgcccagttctctttctgtttaagtcctccaagtgtaattttagacgttggccctgcgatcatgtcaacggaacttcgcctgcagtctcttctttccgcgagcttagggccccacatgaagagggtcttgagaaattttacaatttagcttggcgctggagcggccgcaacaccgtggtttgtaaataaagtttccttttctggttttctttcattgaaaaacgaacttcttgctttttcgtttccccgcgcgaactccgcatttgcggtcaactctgcagagaagcgttcatccaagctgacgacttgaaaatagttgctcgctcctgctttcttctgcctccaatcacattccacgaagaacgtgtcaaatctctcccacaaacggccttgtttcgggctacgggagagcttcgaactcctctgctgtcttcggcggaacgtcgtcgatcgtgagtggctcgggcggttcccggtgactgttgcaagggcgtgaggagacaccacttcgtggacgtttttacctggaataagtcgagctgtatccggagcttgattgcctcttttacgcgtctccgagcttgcctctttccgaccgcacgaggagcagggaagactgcagagtgcagactctcagtcgtcacgaacttggagctcgcctctctgtgtctactccctctcaaaaccgctctgccgaaccgcagagggaaacggcaactgtcggggttgtgcactgagtgagaa

SEQ ID NO: 1003 - DNA, 1692 bp, Toxoplasma gondii
  source 1..1692: mol_type = genomic DNA
gcaaaaatgctcttacgcgccttcgagaacgacaatgactctttgccctgtgaggcgccgctcgcgcgtggacgcaatggcctctacagggcgcatgtaccctctcccctcggcgtccatttggaggcacgcgaggagtgaagacgggagaagaccgagcgggggctgaaggggagacgcggccgccgaaaagcagagagagaagagactgaaaagagattcgaagacgaaactctcttcagggtgtgaaaaatgttccgtgaagagggagaagcgagttcagattcctctttttcaagtggacagcgcgaagcgaggtcttccagggaggaaggaagaacaatgcgtggtggagaaaaggggagaaagagaggagatgagaaggcagaagaggaacggcttaaacacaagacaggaagaatccggaaactgtgcgaattcaagtccaggcgagacacgttgaaaagaatgcaatcgaatgaagctgcggaagtcaacggtgagggcaggacggctacgggaggcagacagagaacggattggctacggcgtcaagagaaagagaaaaaagagaagaactctcgagcctccgtagagtttgtgaaaaagagaaacgttttctgcaggggggaaaaacgactcaatgtacaacgcgaaaggaaaagtcgcctcgggtgtacatacgcctgtgagatcagcagcatgcgctgctcctgaagactctggagcatctgctggcaactggttgttgagatgaagcgcaagactaagaatgacgcttccccttttcagacgactttctgaggaagagatagaccgtgtcgtttggaaggaagagattttttcactgttttcacatcgtcgcatgcagcgactcgttgcatgcagatgaccgcaaaaaggcttaaaagccacatgcggatcgcggcgcgatcgttgtggggctggcagactcttcattgttttttctttttctcttgttcaagctgcaatgccatggcgaggctctgttgactttcgctcttctccttttacaaggagagttgaagaggaattttctcgcgcttctttcttccctctcgcctgcgcctctcgctcaagcgcggcgacaaatcaccagagcgcgcgactgttctccctgcagcgaaggaagatgcggctcttgaactgttaaaaaagagttaggtacttattttcctttttcttcttttctcccatcgcttccctgctgctcttctctcccgtttgtccgtggcgttccctttttttcgtccaattatttttcttccttcttttgtctccgtttttatcatccttttctcgttttctccgtcccgtttccgccagcgtcggtggctctcttcgacgttccgcgagaccttctcgctctgaacagagaagacgaaggaagacctgcaatgcagagggcgacgaactcgataaccgcgtcgacagaggagggatgagctccctttccgtcgaaagcagagagttggcgtttctccaactctgaaacgtcgcggcactacctcactctcacctcccagagtctctcgatcttcgagaatctttccatctttttttaaagtctctgcatcttttagactctctcaggaccttatcgttcgttcgaatcctcctcgcctttccagcagcttcctctcgtccaggttctccaactgtcagacaaga

SEQ ID NO: 1004 - DNA, 2227 bp, Toxoplasma gondii
  source 1..2227: mol_type = genomic DNA
aaggaacggattttcaccggcgaagaaatcggagtgaaaaagagcactccaccaccctcctccgattccccagtgccatgcgactcgtcgctgacgccactgtcgctcctgcgccgcgccgaattcgctggaagtgaaagcacccaaccctgtggcatgcacgcgcctgcagaaacgggggcttcttcttgagaccgttccagtttccaattttctgcgtcttcatcctgcacggcagtctccctgaagcgcctcgaacggagagcttcggtcacgggtggaggattcaaagtcggagtgccatttggaggcgggttggagtacacatctcgctgggatccagcaggcccggaactcggtgacgaggcatagccattgagagatggagcatctggcggagattctgcgcacttcacagcgtgggcggcaccaagtggagacgagcgcacaagcaccgaaggctgggcatacacccgcggcacgggcgcccgtctgagagcctcctggatggggtgcgaagacgcaagaagcgacgcagcctgagaggcagcctgcagctgcccatttgcgttcgtgttggaagactgaccgcggctgctgatcgtgctgtatggggcggaagaaaccacaaaggacgccggcgaaagggtgtctacccagctggctcccgcccccgtgtcgttgctgctgcagggcattagaaacgcgagaaaaaacggcgggtgcggggttccccttggagcggagacagcagcttcgaatattgagagctagtgacttgtttcgaagtggcggtcaagtcgtgagttgttagaggtgtcgacggttcaggggttcgcgagtggcagtggcgccttggaagacagggcttcgacgcggcctccgtagggacgaacgcaacgattgaggtggagaagaacagacgtaatagaaagagacgtctgagtacagttttcttgaaaagggcatgaagaaacgctgaacgaaacgcgagagtgaaccgcgtggcggatgacctagaattcgacgcgcggtgctgggaactccggaacagccatatcgtggcaggtcggaatacttccacaggaggaagacatttgatttgtgtcaagcgaaaaacatataagaggattgaagtgaagcgaacgaaatggcaagtgactggagcgcttgactcaaacgccacatcttactcggcggaaatcgcaacagtcgctgccacggcaccccaggtgacggactctgttcttttgcagtccgccgagcggactgaggatatctttcgagaaaacgatgaacggagctggtcgcaacaggaaggcaacctggcaaatgcattggaataatagtcacgagcttgacttccgcgaagatcccaggactttgccgacgaatggcaaaaaacgaacacttctggtatggcacatgcagcaccgtggacacgctcgctggccggaaaacgactcaaaaaccaacgcaaactgaacgcacagatctcggaaacagaaaaacagggcactccgtgccagaattcaacacacaatagaaaacagtgatatctgttcctgcacggtttcccttcagacgagagactgtgaagcgggaaaagataagaaaagattcaatttattgtactcaacgttatattcgctcccgaatataagccgcggcattggtactgaccaagaaaacccaactgagaacaacgccgagaattgactcatgcaaattcgcggtttacattgactctcacccttctattccaccgattcctcggctggcctagcgtgttcactctgacgtctagatggtgtgatggccagatttgcgtggacagaacttcaagggagagtgcactcttagatcgctggcgttcatgcgtgaaacatcttctgcagcagacatgaccgttttcatgtcacatgacagggccgtaaatccacatcaaatgaaagcgcgtacaataattgatcttcgttgtgagcttcgtgagtggaatcgacgcgaacagctgcgccatcactagtgcaactcgagaaactctcgtccctgctctgccacaaactgcactcgaatgagttctttttctctctgcatcacatgcatctacacatgtagcaacgcccactcgctaaacatcagtcgcttcgagcccagatagtcgagctttaagtcatgctccggcacctttggtacggagtacgtacatcatttggataacaacaaa

SEQ ID NO: 1005 - DNA, 1884 bp, Toxoplasma gondii
  source 1..1884: mol_type = genomic DNA
aacagaaatccatacgtactcggccgacaacacacggatgcaaaacaatctcctctgccgtcaacaagtatcttacatatacacacatacatgtgtgtattcgtacacgggcatatatatacgtgtaatttgtatttaaaggtacagttatttatatggagtcaacccccaaggcaagcgcgctgggtcgtttttcctcgggattggagtcttgtatcgtttttcgatacatctctgttcctgccttttgtgtggcgttctgtggtcgccctctaaatgtataacggggtgtcagctcagatacagagacgtatgtttcttttaaagctcgttgatttgctatgctttcagttcctgtcttcctgaactcagctcatcagtgatgaagtccgaagctggaactggggttttcgaccagagaagtaagacttgtttccgccgggataccctgcctttgagagaaaccaggtgtgaccatctccggtgttgctgacactgctagtaaaggcgaagaaccgtttattctatcagtagttacgcgagaagctgactccgtttgccgtgacccgaaaacgcgtgttttactgcgttccctccgcggatctgtgctctgtttgtggaacatatcatcacttctcttgtttttcccacagaaacacaagtcctgaaaaccaaggtctctttccactgaaacagaagctctggtgactgctcggtggcaccccggaaagcaccgcaggtgtatgcacagctgggcggcatcgatctagggcaacaacttcgctgtgtttctgcatcgctttttgggagaaactcctacggaaagaacgcgtggacgcgggagtgaaagaaggaggaagaaagcacgattgagaaagaactggttctccatggctttgctccattggtgtcattttaaaagtgtcacaagccgcgttttccgtcgccatcggcgcttctggcggccgacacaggcggtgcatagaagagtggaatgccctttctgtatcttcgaggtttcggaaagttttcaagctgctgtgaatgcgaagacatgcagcaaataccgatcatcatcaactttgatgcacagatggacgtaatccgtccagccgcacggtgcagtgctagcctgaatccacgtgggttttcaggcacttgactcttgactttttaacactaagggcgttgtccgtaaaaaaccgtttcaagtcgccaaacgaggagtaatttatcctcgggaaaggctccctgatttcgactttcgctgcgtgtttgaactgcatgcaaaaatggccgcgaatctgaggccgagacacgccgtcgctttcgcattctgcttctgccttcgttgcctttttttcgcttcctttgcatttcttgagcgcacactgccgatgttcgacgacagctgtttttctccgcgaagttttccaagaatctctttgctcgccaggaggagctcgacggacgtggtgggtcactcgtttccgcaaagttccctgaattcgttttgaagcttcaaacctcagtgtagaattatacttgtttattcgcgttttcaccagcatacctaagggggatgtgtgattgttggactcgcatgtgcgtccctgcgtgtatctccagattcctggtcaatcggcttttgtgtatctgtgtctacgctgtaggtacgggagtcacatgtcgtcgtgtgtgacgcaaactggatttctttttcccctcagtcttctcgattttcagtgcggctgcagggtctccttgcgctccgagtcggtgagctgtcgctgcactacgaggccctctccgtcttcgagtcagctacgccccgtcccatccgtcgccttcttcctcttctttcctttcagcagggcagcgcca

SEQ ID NO: 1006 - DNA, 4928 bp, Toxoplasma gondii
  source 1..4928: mol_type = genomic DNA
gtctgcctgtgcaggtctcgacgaagtcgaagaagtagctggacctggggactcagcatttcctgttgaaggcggaagagagcagacgagaaacggagaggcaggtgggctcctctcttcgtcagaatcggacaaagaagagaaaccacgcgacctgtgcatgcaggagccggactgccctcgctgttctctccaccttgccgcatttccattgaaaaggcaggaagcaaagggcaacgctccaaaagaaggaggggcagagtctgcagcggtcgacgagcgagggaaaggagagaagagagaggaggaagcggcagggtcacacggcgagagacaccaggctgcctcgctgggaacagttttggaggcggctgcatgctctgttttctggagagttccagagtaaagtgaagttgtccgcctattctctccgagactctgtctccctcgaggaagactgtcggtgaaaatgtgcgattcaggaggcaactctactctcttcgtgtcgccatctgccttttcagggatgtccttctctttccatttcttctttgagacgttctctgcttcatcgtggctgatatcttctgcaccttttctcctttccccggcagtgctgtggtaccctgcagcagtttcaccgcagcatagagaccccaagccttgcggggacggcggaggcagggcgagcggcgcgtctgagcctagaggactctgcctcccctcggtttccctactgatgaaagcaggccgagcttcggtgtccatgctggcttctaagagagaagtcgtttccctcgatttcctggaaaaacgaaaaggaaaacctacatgataagcagtccactgattcggaaaaaaaagacatgcgtggcaagtgactagtgcttctgcagaaacgacttcgattcggagctgggtagctcaaagcgagttgggaaaagccactagcctagtgaaggatatcgagttttctctaatttctttacttctcaatcaagcgagcagccgttgccagctcgcacgctcggccgtgccgactttcagagccccaggatttaccctggtacaaagaagtaactccatttgtgcagaagctgagcaggtatgtattcactctgatactctcttttctggagaccatctgtagggaagacacggatgcttgtcggggtagacaacaagtgactttctgtcgccgcatgcctctcgacattctttcgtcatctgcatgcaccgcagagacgatctgacacgctgaagagaaagtcgacgcgaccgctggatacttcgctagaaagccgctggtgtttcaatgtgaagagcgtggaagttccgctttccttgggagcgccagacgtattccttttcgggggaggcgaaacatgcctcgcgaggctgagaaaaaactacatgcgtcgcttgctcgagaccctgactggtcaccgatgattccgcagagtttctaccgctaaaacataggacgcaccctcttccctgaagttctgggaacgaggccgtctccagtataagcaaacggaaaggagatttccggcagagagaaatcggaaaagaaggaacgggaagaaaaaacagagtcacaacctcaggaaggtgtgaccctcagaacccggtgacgggactgtctccgttgacttttacccctcaaagactgggacaggaggccacctgaagtacagcgaactacatgtttcgcgttttttaccagccttttcaagctttcgaatattcctttcgatggaaagtaggtgcgggaaatcggattctcttttgaagcttcttttgtgtcaacaaccacgtgcatcttcgtcgccgtccgccgggtccccagtgagtccccccgaacgggctgtacgcacgcaagacacgggtctctgtgcagagcgtcgagagggaaagaagagggcacgatctgcaggtcgacaaggagtactttgatgggggaaaacacggataaaaagttggaaaaaacgatcagttcgaacctcgtgaaaaaaagctgagattggactgcacgggtgtcactgtgcgggagggctgggaccgtgaacacccgtgtgtagtcttgctggattttgagagtttgttccctagggaattctttcttctcagacagcgaaagcagaacagctcctcctttcgggtcaactgatatgttgatcgcgagaggcgcgcgccccgtctctgcgccgcttgtgcattccctattagccttctagatctttcagcagttggatttcaatatcctaagacattaaggttacttcacatcagttatgctctaggcgtaacacatggattattgctgtcactctttcagggttgaactgtgtaaatatcagtgtgttctggtcctaccgcccactccgacttcgctgaatccgccgcttcgactccgaccgcgagtcccgaatccatccgctcccgaacaactctgtccacttttgtcagcaaaaacgaagttaacgtgaagtttttaaacttccaccgcaaagagggtcttctcacaaggccgccagaacctgcgggtgtctctccagcagccctgagaggccccgacggctcccttggtcagtccggcgacgtcgcccgctgaagtctcgtagctgcattactggttgttcgcgcagggatgtccgccaagtgcatgcaagagatagaagaggcgataagtgaggcaaggcggttggaagcgttggcatttttctgggaacaacagcaggcgtctccccgcaagcagcgagttgggagagaaagaccagaggggatacgaaacgaaggcaaaaactctcgccccgcgttcactaggtctgtgcacttttggagctgtttcgactggaaaaacgcccactcaaggccaagcgaatagaggaaaggggtcagttgaccaacagcacaggtgcttttccgaaacacacggcgcatgtcacgtacctggagcagctggggagtgaggcatgccaagagttgcctccactggaacaccaggcgcgcgagagtagaaagcaaagaaaccggcaacgcagcggcgaagaaggagataaagagacccgcgaacgtgagaaccaagaccggcagaagaacgagaagttggaaaagccgtggctctagagcgtccagcggtcattaatcgacctcgcttggagggtggcagggcccaactgacggttctcagccgaaacgaaaacagacgtggtgacaccaggtggccaacgataacaagaagtctgccctcaaaggagtcgactggacactccagcgcaaggcgctcggctagcggcgagtgaaaggctcctggcgcaggcattacgttgaccgtcatgtaacgcagagccagattaaaggctccgacgttggagaagaagcgaaagttgtagacttcgtcggcgctgtagacacacttttgcatcttttgcaagaaggggaaccgaagttgcacgtccgctgagagcagctcacagccgggttccagtgacgactaatgtgttcttaagaaggcaaagaaacgtacaagaggctgaaagcgatcagacgcgagagacggccgttaccatgactacgaaggatgtgacctaaattgttagttgacgaccatggctgtgattagcggcggttcttttctgtgtttcctggccacagaagcaccattcgtagtgcatctaccatgactgtataatcccacttcaacgcatcaccgactttccttggttcttcagaatcgcgtcttttggaggctttctggaccgcagtgttcatcaggttatttcgttgtttctgctgatgtgcgagtgtcctcatcccggatgtcagatggagatgcatgccgtccacatgtaaaaaatatactaggaagcatctaggattcaaagcgagcgagcaaagaaccacagttctgttttttccttcccacagagaataaacggtccgcgtcgtgtcttcgagtgcacgcattgaaggctcccagttctcgaagaaccccccagccgtcgccgtcactatattcttttatgccaccatttgcttccccgtagacatccctgttccagttttccttccttttagcgctgcactgagagaccgttcctccgcgacggcctcccgttgcagttcgagtctcccgtctctcttgaccgcctttcggctacgcacaacgcggggtcagccaacacctcaatgtctcgtttggggggacgatgagacgaaccccgttggttctccagaacgtgaatgccactagtcctgcttttcgacgctacaggttcgctgcttagaaagaaaaaacgcagcggcaaaaaaatcgagcttttccctcgacgtgtgatgttttcgcgtgttggccgtctttcggtgtcgcggtccgctttttcccgtttatccctgctgtcttcaatgtggagaggtgacatgcctcacgatctagctcctctgtgctttttcctgtgttcattggctttgccgactgaggcacagaaaagagagacggcacgtcctgtacgaactgcgggttttggcgctctatttagggagcctcgacttgaaaaaatgtccatttcgaaaagcgtccccggtcaaaagacacttcccgtcgaaggcgcctcccttagaaacaccagcgtgtgaacccggctgtcttctacgttctcctttctcgcctttccccgaaaccgacaacgacgcgagtccccgaacacagcttgagatttttttgagccaggggaagaagccaaacgggaagactgcccaaaacccttccctgctctagacagagaggccaagtgacctggcgggaagccggagaagcgcgaggaaagtggtgaaggggggaagggggttagaaaggaggtgtgcgaggtccccgacaacacagtttcgttgagtccgactcggcttccgttcatgtcacgcga

SEQ ID NO: 1007 - DNA, 1684 bp, Toxoplasma gondii
  source 1..1684: mol_type = genomic DNA
gagggaagagcaggcgaaagagaagatgacggaagagaacagaggggagaagaggcaagaggttgacgcggagaaacgagagaacgaagaggacccagaagagaggtcctaccgcagaagccgcgaacatgaatgggatggaagaaaggacgggaaggagacagggagaaggaagaggagcagaagaaaggacgcgagaaacgcgaagacagaggcacagtcgactgggcagagacgcgcggcacagcagtggagaagaagaaacgcaaagacgcgaaagaagcagaagaggatggagacaccgaagacgaaaagaaagaaaccgagaggcgacaagcagaaggctgcggcaggagtcgagaagaatgaggtctggagacggagcaagggaagacagaaagagaagagagacgtggattctgagcagggtgagggtcctggcgagaggaagaccgagcgtctttcacctgagaaaaaaatggcagtttctgtcgagagaaagacagcttcctgcgccgacccagttgcccgagcgacggcaacgcagccagctgcaccgccatcacgccgccgcaaggagactgcatgcgcgccctggcagaggaggcgaagaagaaaagcagatgcacagagacagagacaacagcaaggcgagaaagaaggagaaaccgagagagaaagatataaaaaagaaatcgacagcggagtaagagtagcactctttccccgacgaaaccgtaaacctggacggtttcgggagcgggtttttttcactgacccgcacagcgaatcgttgtccaagacgcttcgtacaaacactcagaattctctgcgcgtgaggctgagagagagaagaagaaatccacgaattctcaccacgaaaaaagcctttcactcgtccaaaatgccccttgcctccgctgtctccatcgtgcggcctctctgcaagagagttcggtcgacttgtcgaccttgtccataagattccggcgcggagaaaaagcaaggaatccaacacaaatgagagaagcatttgaagacagactcagacagaaacggggagttgcagaaggcagaactgtctcgagctgcgctctccttgccaactttttttcttcactgcatgcgcgtgcgtccagcggtgactcagagaccctcagcgtctgagactcggcctttcgccgaaggcaggtcgttccttgaacggaaacttttttttccgagaacagatccacatctgtcttctttctgctcccgagaaacaatcgtccgccactctcgcaccctgccctccctgcgcatgcatgaaaaagagacgcctaggctccgcagaagagccgggaactcacacaaacagcaacagtacacctctccccttctacgtatgcgtctgtttacatagttcaaacatgtcaagatgcatgcatacgccggtgtcgacacagagactgttggcgtcttgtacatatacatgttgtatgcaggtggataatatcggtgaacatgggggcgccttcatttgtgcttccagacgttcgacttgaaggcccagaaaacggagagaaaaacaacacttgaaatcttcttctgttgacgagcggaactttgccgcatgcgtcgttgatcgtgagggagtctctgcgtttgttcgcttctctgcgcgcggctctgttttcgcccagaa

SEQ ID NO: 1008 - DNA, 3526 bp, Toxoplasma gondii
  source 1..3526: mol_type = genomic DNA
tttccgatgcattttgagaaaagtgaagcagctacccgaacagacattcgacacgcgggtttgtcgccgcgagaacagcgataagttttgtgcgcagaccagtgtggatactttgtagacccacagacggccgagacggcgtatcccagaggaaaatatatctacgtatgtgcgtgtgtgactaccgtcgtcccgatgtattcgcgactctttcgcgtggacgtgtgtcttcgcgtgaacggcgcgcaccgtgggatcaggtagagtagaaaagagatgcgctggtgtcagattcttttcagtgttctcttctctctgaggaagagggcgtctttgtcagatttcggtctctcttctctacttatttgtcccgtatacacacctctcggatcgcctcagggagtgcggtgctgctctcttcagagaggagacataaaccctgcagctagcgacagcaaaggccgtcctgtgtctgccgttgaggggggcctcgtctggtggggacctttgcattgtttttcttgtgttacctctttatgttttttcaaaagaaaaaacgagggatcggctcctttttctcttcgacaaaccgcccctaaacccccatgtgtcgtgcgctttgcacgggaatcgccatcccggttgtctttttccccgctgtgttttttcacaactctcgactcgtgtgttaacgaatccaaacaccccgagccgagttcgcgcggctcttcgcgaaaggaggagcatgcacctcgctacagagagacagaaaaaacaaaacatgcgcgtgaggcagcaaatgtcggaagaaatctgctcagcaaaagcgccgtacacgcggatgcacactcagctctcctcaaactgattcctcgataacagagactttgagcaaaacacgagaaacaggccacacagacagacgcggatcctcggtacacctttcctttcgcgctttcgccaggagtgagcctgccggaaagaaagaacctacagaccagcgggcccagcaccgaacaagaagcgacgcactgcacgcacggggaaacggggaaaaccaggaagaaccgcctcgcttttgttcgcgccagtgaacaatcacagcaggaacctaggtcagctttcccagtttcacggttcaatgagtcaggggaagaaacctccatggacgatactgatatacacatacacacacaagcatgcgtggatactagcacgcggagacctttcgttctgtactcgttttcgagtcgatacagggagaagatggaaagacgagagaacggtgaaagcggttctgaagttctgaagtcccttgcggcgacaggtgtgtcacattcctttgtgttccatcggccttcccacagtgtgtatgtgcttcatcccacgtaactgggtttccttcttagttccgctgttgtcagtttctctggcttttcttccgcagccaaaaacttttggcagagctcctgtcgactccgtcgtggaaatccacaggctcaaaatcgcaaggcaagagtagcggcttttgttcgcaccccgagagaaacgaaaggtctgtctcactttttccaaggtagttaaacactcgagaattgtggcggtgtgttgggtttttcgcttatgttcctttctaaatccctttggtcagtacaggtagatgtcggatgctcggcaggtgtgtcagtgactctctgtggcttgtgttctctcgttcgacggtgcgtaaggacgcaaacatacgctctcctttgcaagcttttgcgagattaggtcctcgtggaatctcgctgtgtgggcgtgtacaccactgctgtttcgaaggcgacaggctgctttttcacgcttgtttgtccattctctcctcgctgaagacgcctccttctctggctcttaactgcgcacgccgcaggaattcttctgccaagcagacagaggacgaaaacgcaagagcgacggcagcagttttcccgttctgaaggaacaactagagacttcttcactcgcatctttctcttcgaaacagcgaaaccaaatacacgtgcatacatgcatgtttccatatacatcgatgtatgcaagagatatgcgtgcacacatttatgtttaagcgaagcgtagagagaggcagagaatacgtgacactggcaacacaatggcgtgtcgaactttctgtggcgtttctttccaactttccctcttcctctttgtgtgcttactgaaatcacctggcggcttgcgtggcggcagaatcagcgacaccattttgttcgcgagcgccgagaaaaacgcagaaaacacaaatttctcaacgctaaaaagaccgacagagaatggtgagttgatcgagcgccaagaggcaagagagaccgctgggctcggtacacaaagaaattcgccaaaatggcgctagcaaagtgttttcttgattccgacgtgttctactacatggtgcctttgcgtctactcaaagttttacactatactggaaaacgtgtacaccgagcgccctgtgatgtactactagacctaaggaacttgacaagagttcgtagttttgcgtaaacacggctgtcacttctttgggtcggctgctacagaaaagccactctaacactaaaacaagcagtacacggtaaacaaaaagaaagaagagaaacgacacgaaaccaacgcttgccgagatgtctgcgacctttgttccgtttccacggaatggctactctcgtattttcacacaactaaatcgatgaaacagaaagagaggtttcagcagctcttaacgggggtctctgtttctcgttttctgtgccgctcttcgcagcgttgacgctgctctctgagacaaccgacgaactccctcgcgttcttgtggaaaaggtaatttctttcagcagaaatcgttcataaactgtctcagagagtgtcagtcaaccagaatataagatgactgcagatttgtgatcaaaatggtcgtactctgtacataaagtaagccgtgtcgcgggtgggaaaactcgctttcttctgcctagttccttcaagatcctaaaagtagaaaacacctctttcccttggctgcttcccctctgacttctacgactgatgcgtgaactgcgaattgggtgaaagtgtctgtttttcgctacaagccatctcttttcagcttttccgtgttcctacgtcttgtgaaataactccttggctgcttttctgtgattagggacaactgttgtctttgcttcaccgatgtatatcccactctttactgttctttgcgtctccccaattcctttttctgtgccaacagcaaatcatgaagatccacgttccagaacaacgaacaaactctctgtactcttatcgcacgatgtgcgtttcacaaacgtgcatctctctttgttgtggaagaaccgttacaaaatggtaaaggccgccttctcgtcaccgactatccccacatatcattgttgaattgtggtttcaatagagtcttcgcttttcataaagagtacgcgttactcta

SEQ ID NO: 1009 - DNA, 4651 bp, Toxoplasma gondii
  source 1..4651: mol_type = genomic DNA
gtgctgatacagtccgatgattagaaccctcatctaagtttatactcggttaaacatgttagatgctagcttcccggctaaacatcccttttatttgaaacacacttcccttcttgccgtttctatgatctcaaagtaccagaagacgtgtggttccgagaatactcagtatatctataagtctattccgggcacaccctgtcttttatcggtgtgctctaaatctaaattcatcttacaattttggttgcttagttgcaatggcctttgtactaacgtttggatacttcagaagcgtcttatgcgtgagctcatacggtctgctcctaagtacgcagtaaattacgctcccccacaacgtgccctagaatttaatcgaactgcccaaacatctgcagatagtatctacacgacatgatatgcagtggcttttccgaagccatgtttccgtctaaatgtcctaaacggtgtgctgtctctatgtttttagacgcggcggcttccttaaacccatcacaatgggccacctactagcagggaggggttctatgggacccgatggggtctacagagatgcggtgtcgatctgcgcaaaactgtcgtttttcctgacggagcccggaatcgtagcagtactctttctcatcggatctaccgcaaccatttgtagcctgccttatcttttgggtctcggattctgggatttgctgacacacacgctgcctgccttatttgccgggcatctgcctgaatctgtgctaatttcatgtccccatgcttcgcaaattgcagctgggatattcattcttatttccatttacctatggcaacaaactgcaagggtcattgcaaaaggatacacactgccacggcgtttcaccgatccgtcccgtcctccaacatggatgaagggtaaagtggcggtagtgacaggagggaatgctggtattggcatggagacaacccgtcaattggcactgtggggagttcacgttcttgtcgggtgtcggcgagttgacgatgtccagaagattgctgaccaggtatctcaagaacatgccagaaacaaggagactgcaaagagtaagaaactgccggctccggttacccccggagaaatccgtggcttctatctcgacctctgcgattttgagactgtgagacggttcgctgtttgggctcatgcggaaagccggggaaagatcgacatcttggtgaacaacgctggcctgatgtcaaccgacaagttgtccatggacaagaatacaggtttcgaacgacactttgtgacaaatcatcttggaccattcttgctcactgacttgctccttcctgcggtgaaggcagcacacgggcgagtcattacaatcagttctgcagcgcacatcacgcgcaacccgaagttccgatcactcgatgcagccctatctccggaggcagctgagagagtggcgtccgcgctaggaaaaccgctgcatgagctgcaaggagagccaatcactgaaaagaattacgactcaaaagtaatgtatggcacaacaaagatggcgaacctttggtttacgaaagagctacagcgccggctggcccaagatccgaagtgccgtgtcactgcgtatgctgctcaccccgggctggtcggcacagggttgatgctccgctacgctgaaggcagcgtacattggtacacgccgatatttgaggcgatctactcacttattgcacccttggtgctgaaactgccacaacaaggggctgccacccagctcctgctttgcgtgagcgacaaagaagagctcgagccgggcgcctactacaaggacggaacaacgaattgggtagactaccttgcccatgacgtcgagcgccagaaggaactctgggcagtgagcgagattgtctgcggtatgcgataacgtagatatcatcagtgtttcttagatcatggagaaggccgaaaatgcaaataagagatcatacaagatgacaggccccaccgcccggaaattttgaactcccaggctggtggggttacgcatgacgcgttgttggtaaccctgccgcccggaaaaaaaaacatgtgaaactcgccgagcgcatgtcgactcgatgtatcagtgggaatgcagtttgagcgtgtggtcttacagtggtgaggcaaatgccggtcgcacctattccgcgtctcacgcaacctatcgcagtcaactgacgctgaccatatgcgatattccacgttcagaattcaaaagataggactcaagaacttccgtggagtctgaatttagttggaagctttagtcatgctagccgttgaatcatcagaacgccctcttacaacggcgtctgcaaacgcagtgagacgacgtcagcgtgaacggccttagattctgtcatgttgctttctgtaggaatactacgctatagctttcaacgtgtcaacagccacgaatcgtggcttttcacgagactcagattttgaatgcatcagttgagattcccttccagtgggcatatcataacagacttcatgaaaattgttttcacctgagcacctccaatgtcgcacctgtttcacctgaaggcggcttgtatagtattgttagattcaattagtcctggtagggttttcggaggcacctcgctgtgcgttgctcgctccgttagtatagcaatgggagtctggcagtagtgtcgtgaccctgcaactgacgacactcatacgaacccgtactacgcaagtcctccttcaccgttggccaggaacatgctttttccaaaagggggatgaagcgaactccgccacattgtgaggtgaactgatgtgtcggttggaagaccccaggtgctcctcgcacttgggtcatcactcgaaaagtctggagccgaagacactcagtggtatacttgaaatccttgaatcccacataatgcaaggttgacgcagtcccgaatgttccaggacgttggcttcattcccatcaatttagatgcacagatgggcataattatcccttgtacggtttgtttgcatttgctagcgttcatcatctagttagtgaagtagcagcaggatggaaatttaggatgttgcatgctacagcagcttctttcgaattcttgtgtactttaattcacacatgcgacaagggtcggaaacgggagcgctgtctggtgaccgaagtaacaggccatctctaacttgaccaccccggtgacttcttaacgattgccgatatcccacgataacgcatactactcaaaaatgttcactccatgtgaatgaattctattcacactggccagatgccgctaaactggagcgattcgaagactgcttctggcattgtgccgagagcagttgaggccaactacacaacgtaaagaaatcgttcacgaaaaaggaagtcctttcttcttaagcatatgcacatttttgtgcttcaacatacttaaatgtaccttcgagacaccccgacagctagcgatatattccctaaaatcgatttccgttctgcccgaaaacatggagcctcttcaacatgatcgttccatagctgccagcttccggataatatctcctcctacattaaactgatctgaatgaaatgaatagcacgtaatcgctaaaaacaacgcgcctcattttccctcgtggaatccagctttcaggactccggccgacccacgtcttgcgatgttaagatctgtatcgtatgaacacgtacacgaacggtaaaccagctcttgccaccaaagttgaggaaaagaaatttgctttttcgtcacaaagtttttttgacggccataaaagacgagaaagcaaaataatcttcctccattgtgtgccgacttggcactcttctggtcgatgtcgtggctcggcggtctgcgtgtgcatgcatgaaacaaggtaatttcccgggagggcagtcttggaatcgagccgtacccaaggttcctctaacagttttcacctgcgcggtgatgcgtctctggtatttctgtgtttcttctcttgaaaagaccccctggatattgtgtttcttaccagtgtgtccaactttattggcatattctctcaacagtgggctgctcggtcatctttctggagcaggtcttctcttaaaggtttcttagccagctcaaaggcgggcagagtagaattgtcttttcttaagtgcctaacctatcctttgttatcgttctcaagtcctagcatgtgcctcagaatttacctcctcgactaataaccgacttcctcccgtcgtccattctctacaggatgtttttttctatttccctgtgcaaatctgtcgctgcgccattaccacacttggacgcgccatcgacgaagcgagatttggagtgaggtgccactgtgtcactttgcccaattctgttccggaacattttaatgaggatcgtgctgcgtttgttgatccaactgagagtgtaacacctcagccattatcggcaaatgtggcaggttgcccggttgcctagcccccagtgggtggtggccgaggcagaaccaatcaagggcaacgtgttcgttgcatgtggcttcaattttttaaggtctcggcggggcaggagacatactaaacgccgctcctcgactggatagggagccctgggttgttcacga

SEQ ID NO: 1010 - DNA, 4833 bp, Toxoplasma gondii
  source 1..4833: mol_type = genomic DNA
tgcctctcagaagcggctccaggtcttcgttgtacagcttgaggagcgacttccacgcccctgcatgcagtgcagcccatgggtcctcagggacagtcatccaccactcacgcaaataggtctcgaacttggtctccaacttcttccacgccgaggggttcactttggcagtgccatacaggaagtgcctcagttcccacataatcacgagagtggccttgtgtgcggcgcggtgtcggatcatactgccgaactgcagaaaaggcgacgcgcagaaacaaaacccaggatgatacaacggcgaaaataccacgcacgcgcgcgaaaacggaacactccccggaacaaacgaatggttcgtccctggattggtatcaaacgcctgcagaaatgtaagcaaaatgtcagcagaggttcataaaaggcatgagaacccctgcgtctgaaggcgcgtcctttgagatttacacgcaatgttggctgtgcgaccgtatgccccaacacgatacgactagatgagttgcgtttccttgaacgtatacagtgtctgctccccgacgacagcttcccaacggtttcttctctgctgcatcccagatgcgtatcacctaaactgtttttcagcgtcgcgccacgcactcggtcactcctaccgagtctcggtcaagcacttactttgaacaacatgttttcccacacgggcttgccagatttatggaacagctgttgccagacgtccttcacgaagagctcaatgggagtgctgatcatatttgtcaacgcttccaccttggcgacttccgcatagtttttgccgccatcgccgtcagcggcgacgctgaggaggaagggggtgctcgccacctcggggacgggcaacacggaggagttgggcagttctccgctgagaagtcccaagaaaactgcagcccccataacgggaaggccgacaacggaacgaatcgctcgcatcgtgggtgaaaaggacagaacgcgagatgcgggatacaacgcgccacagggagcagctggttcgggctggcgttcgatttccggccactgaagtggacgagctcgccaggctatttcaagagggtgagaaagagtgggcgaaaacgtgaaagggcaactgcccgatttcataaaaaccgattgagcctctggtaagagtcgacaaccgtagcacagccgcactcgccgtgcacgcgagttgtacacaaacagtgacacaaataccaaggttgtacgtgcggtcagacggcagtccgtctatacaaatgatgccgcctcggttttctgaaaaaaacgcagattcttcgacacgaaagctttttgcgcagatgcttgtgctcccggcagtcggcggcgacgacgcgcgtggggcaagtcgattacggccacgggaggagaggggggtgttccgccgcagcgatttccccggttgaaccctacgtggtcgttgcgggcgaggaacgcgtgccggaaacaactgccagaaactctctgcagagctgggccgcctgtccgtcgcgcggcgcctcgaaaaactaggcgaggaagggcctttgtgtgccgatcctcacggcaatgcaactctgctctgccgatgacggctttgcggagtcgcgagttgtgggatctcagaagggcagaacacagacgaacaactgaaacgtcagttaaagcttgaaacaagtacgggaaagcaaggcggaagaactctggaaagctgagggaaaaactcggttttctgcgtccaccgggttcgacgggagaccgagacagtcccaacacgacggagcaaggcccacctgaccggtggtgcttccgtcacttttttggcaacggtcgtccgccctctctttccgtgcacgcaaaaccttcgaccccaacacttgccggctattgacatccacgcttcgcttctgtgcccggcttccacacggaatccagccttcccttggcgcccatggatgccagtccagcggtgtcggcacaccgtgcaccagcctttttagagactctccaccataaccataaaagcaaccgttttaaaacagccgcttgaacatactcctccacccggtctcccgcgtcgctggggagggcgctgttcgaaaccagacaccaggagaacaggtgatcttgctgcttttgtccactggagaatgactctcgaccactttcccgcggtgggacagaaaagacggcgaacagatcgtcaaccccggtgcgagcgaacagagacgggcatcgctgacggatatgtctggaaaaacggaatccgtttcttccctttgctgtcagtacacaatgagtgatcggtacacgacaccgcccgccttctgtatattatattgttgcatcttcaactcaaagttaaacggtttgagagcccctgcaggtatacacactgagactatagttgcctttaaaaaccacggcacgtaaacggagagcgcgagcatagaacactgagaaaaaggatgtgtgaagacacgtgtctgcccgatctctcgtaggtaattcactcactttttcacccatatgttcccgcctcaacctagcccacgtttgcccctgaatctgaaagatcgagtaacgcgcaatgagaggatttccaaacacatttcgatcgttttatacgtcctctcacggacgcgaaggcgacgacacaaggaaaagctcaattcggagagttgggcggacagactctcgaaggaggtatgcgagctgccctcgttcgggactgcgtcgcatcttgaataccgccgcataagcattctcgtgtttccgaaaagatttctccccttaaaacctactgctctatatacacttgtcgaaagagaacgacaggcattagcaaaagggcggaacgtcccatgcctctcggtggccgcattttcgagcttgccgctctcgctgcgcggaacccagacaaaacggggttgatggcattttagagaagacaacgctctctgcatgctctcggctgagtcgttctctacagggtgcaaaggggagttcactcctgtttaaaaactgctcgggctctcttcacccgctcggtaaatctccaatgtcacgtgctgccggggaatccgtttcacgatggacgggagccgtcctgtagtgttcatgctgcgattcatcagttaagtcgctcacgccgattccttggccagatcaacagccataaaagcgtagacaacgtagagcagacctctccatatgtcctggcagccacttgggttgtctaccaataacatagatgactgagctgtatgacggttcagctttacacttgatacgtttcgatgttaacttactacgggtcagcgggcgtgccttgttcccggtaccgcaggcattgattcagtcgatattgataccgtacgcagatacgtaccccaacgagcgagcacacagcaccgacaaaaacgacgacggcccagaaattgacaaacacctacgagttgattttaaatgatgggcaatgccctcgtaggcgctggagcccgatccttccccctcagggtttgagcttgagctgcagaaacttagcatggccggccttgaacactgacctgctatcgtgctattttccgtgagcatttcgtccacgtcgttcggtggaatttccaggtacgcgatgttacccggtgtgtcctgtggacatccaaaagtatacattgtagttgcacctgacgtcggtgtagtctctcaagatctaggtatccatgcagagcgactttcgattgtcgcctccttttctccttcttgaccatcgtgacctgtgtatgagcggcatctaggcttttgaggacgtctttgctgaatcatcgaatgagaaaggtcccaagacaaacaccgatgaacagtgcagcgttgcttctgtttccaattatcgacatatggaaagacaaagcctgcacaagcgacccaggaaatgaagaagagaaagacagttccccaaagagccattatcgttcatatttctgtggagtttgcgttttccgctgggaaaacaaagcatagtgtgtgaatcgtccagcagaatctggcgaaggaactcgaaatggacggccagaataattcatcgttctcaacagctgtgttatagacaattttcacgcatataacccacaaaaattcccgcctcccagggaaaacctgctgtccagggtagacatataggcaaccacgtttctttacctcgacatccaaaaatgcaaacagttcgtttccccctttccgtggaatttatatacattcgttcccccctttccgtgggtaattctgttcagcgtgaatgagcgaaacgaggacaaccacgaagaaatctgaagtcgatctgcattttactgacacatcacgctgtctgtcacgctgttcacttctgtcggcccctgttgcggaaacaatcgcaggacctcgttttttgtctcaatcaaaaagccctgaaattgccacggacacagagaaacgcgcatgctgttccggtttcggtgtctgaatcccttcggtggctttttacttttgagagtttctcttgcacacgccgagcggagcaggctgtcggctgttgtgtgtcaagtgtgtcaagcgtccgttttgaccccgtcgttccttttcgcatttcttcctttgacagacatcggcgaagcgacttggtgcgcaaatcaaacgctagcgagttcatctttttcgtcatttccgcctcccttctcttcgttttcgcggtccctgctgctcaaggaccagcttggtactgcttccgctgccgcagcaccctcttcagaactgaaattcactcctttttccggaacacaa

SEQ ID NO: 1011 - DNA, 2919 bp, Toxoplasma gondii
  source 1..2919: mol_type = genomic DNA
gttttatctcgcatcggttgtgtcgacggtcttagggccggagggtgtctcctgcactctcttttttgacaatttcctgtcgcatgttccgagtcaattcgttaggctaagatggatggcgacagatgctggaaacgcttccatcgccgtggtaatactgcacgccgatgctggaaaatttgtttcttttcagaatcctttagcgcggggcactcgtcctcggacaagagccgtttgtttgttgttcttgacccgccaagaaaaggatgcgattccgagttcttgctcagcttgctcaagtaagtgagcgggcgcgcagctcgacaggtttggaggccagtttctccggaaatttgaattgcctttgcacaagttctttttctgggtcctagtcacggaatgggttttcatcgaagaacgcgtgtgaatttcacttacacttccaggctgaaaccggaacgaattgtgtacatatcatgccacccggcaacgcaggtaggcagcaagctttctagctcgtgcagcagatagaacccccgatctctagattgtggcatgcatgcttttccatcctcgacttgcattcagcttgattctggtttgcagtggtttcttgtcgaccatactctgcattttcaggcgagagatttgaaagctgttttgcccctgtacacggtgaagaacattcagcctttcgacatgtttcctcacacgcgacatatcgaatgcgttatcaccttggagcgatccactaaacagtacactccagagcaacctcacggctgtccgattccagctactcataaaatcgccaaggcgagaaaaacagaaggaatccctagcgagacacatggctggtacacgcgcacttgactgagacaaacgaaaccctctccgcgacagttgctgaaatcctgtcaggcttctggttgtcggggtcaccatgtgtacggaggacccagcaaaaaggtagccgattctttcatcagatggagattctattctttctgcattgtgcattgccttcattacaattatcaaaccacacaacattcacgtgcagtggaagacgaatttcgtttataaccgtcttttgacttgtcgctgagtgcggaacggtgccgtcgatgtgccatgacgagaacatttcgtatgaaacccaactcgaattcttgctgaagcaacgatgctgcgttttaatttatggaggtgtgacagcaacgatgctatgctttgagtttagtacgcattctgcggactgtttccagtttcccctcgccatatcttagggatgttgtctgagcagaatctgtagaagtgtcggcgcccaggcctacctggagggactccctcccttctttctttgcctcttcatgtggaagttacagggaaaacagcatcgaagtttatcccaactttagtgatctttgcggtgtctggcatttaaggtgtggcaggagccaggtgtagaccagttgaatttttgtgtcgtattcaggactaacaatgcctgcgtactcagtatgattatgtgatgcttctcaagcaacaaagatcgccgttgtcgatcccagtttcggtctccagaatgcgatcgttcgcgcagaatggaaatacttcgtcattcaagaaccgatgtaggctcgcctccgttttctagtacagtacctagggtttatccttgttgggtttcttttggcatctgaaaaataattgagagcttatcccctttactctttgcatcgttggattcgattgacactcgcgacgatagactggctctgtcagacggagtcatgacagggctctgtgtcaagcaaagttgacagactcaggtctctatcgatgaagaagggcgtttcgtgtgcatgacagtaataacctcaagacgctgagaggtcgccgcgtccaactggtgtatgaaagccgtccactgttgctttctcctggagtgtgtgtttaataataaaggctttcggcgaactttactttagaagggccttcggcccgagtggacttgactatccggattaaaaactcgcaaaagtgtggtttctcagtccacatctaggggatactctcaaaccgtgagaactcgcgagcagaaagtctgccttaccgctgaatgctgtgcaaaaactagcactgcacacgcattcgtcccctctttactacaggagaaaaagccgattggaaatgcactgactgtaggaagtccatttgtggtacgaactgctttagatgcatttctttttgctgcaatcatccggtgtcttcaccgctgcgcatgcagacggatccggttcctgagacaggaggacgaggcgcatgtgcacttcgcacaagagacgggacttttttcaaggcaatgaattcgtactctctccttttcgatcgtcgcggttcactttcggtatgtgtgtgactcagtggaatggtctatgaatgtcgctggtgtcaaatggcagccaccatgcctcctcccaagctcttcttggaatgagtggcgggtgaccaggtctgtgagtctctcgctgctaaattgggttgagtaaaactcgttatgtccgagcatgtgagttggacggacggttttcttcttctctgtgaggctccggaaaccgacgcgggtgcgtcttcggcatttccctccgcagtctcccgtggcacgagcctgttttctcctgcaggatgccatgtttctctctcgtttgagcactctgtttgactctccactttaagttaaggagtctgtttcctacagtctgaagcgctccatgcaggtgcctactgctgcattgcgttgcaacattcgttcgatgggaacaagtccagtcgaacagagacacaatcggatctaacagattccttctgcttttcctccatcttcggcatcccttcaaccttcttcgtgcgaga

SEQ ID NO: 1012 - DNA, 2364 bp, Toxoplasma gondii
  source 1..2364: mol_type = genomic DNA
cgccaaagatagcgtcagttccactgacacagttgttgaaacacgataaattggcagggtctagttggtggattagtctaggaattttcggtagggaaccccaacgtgaagttgctccaaggacagaaagtgacaggcgcacagagggcagctttgtcgttgtgcattcttgattctcgacagaattcacagaactccgacagggtgagatggttgccatgctgctgaacctgtttgctgttgatgcaaatgctggtaacagtattcagttacatattggaatgggactgtgtgtcagacgaacagcaggtggagccagcacctctccgtagggtgcatcgttcacggtaggtgcggatggtccccccccttgtctgtaaagaaattacccatggccgcgatagctgctgaggcaagagtgcctgaatgggttcctgtcatcaatcaccagtactcgttggtttggtagaactctcgagtgctgtcaaaacgactgtactcgtggtttcattgcttgcgactgcctcatgccgcggacagcactggtgcaaaagcagcaggcgttcgctaatctggacctcacacagtgggcacagccgtgtattctttccgttctgcaaacagctcagtatcccgcagcatgtatctctgacgcaatcagcatcattcttggatccttcacatactttccgcgtactcactcccacgaagccgcagcaagtacaggccgtggaagactgtctcgaaaggtaataacacattttcaccagggctcactcacttgcattgccagcaggtgaccatacgcgcacgaagacccgtctccaatgaacactagagctagctgaaagcaacagcggcggatggacgacggactgtgccgtttctgcgcgtttttcgtctgacgatgcagaaagacacaacttctcaccgagaaggccaacactaaagaggggcagcttttgtcaaaaatgactcgtaacagaggtacaacagggagcgacgcaaggacgattgtttatcttgagttgcatttatcaactctgtcttcttcagttgctggtaacaacaatggtggcttgcttctgaatcggcgcatatcgtgtggggcctttctggtggaactatataacggggctgagatattactctagcttttgctgttacatgcaagagataaacgagatcaaacacaatatagaacaagacccgctagatgctacttgcggagtcggttggtagaaaaaacgttggtgttaagagtgttttttcggctgcaccctcaccttctcgttctcgtgcaagtgtgcctgggccctgcgcacctttctctcctacatttcacgatgaattcgcaaaaaagaacttcggggcacgaggtgcccattgatcactcagccgtgccgaaactaccgggatttgaaccgttcacgttcaaggacgtaaggcgtagaggattggcgacagagccagcccgatacgatgcaagtgccaatagctcacgtctcgtctccagtcagttgacaagtggtaaaagggttcgaatttttttcgttcttgggaacaaaacggaagggcttaagaaaagctcatgggcatgactacggccagtagccgcctcgcccttttccaatgctgtttcaccgacagaaagcccatcttacgtgtgttcctggctgtgacaacgcagaactatcgcaagtcccagagatggggattatcaaacaaacagtgtgtagaaaacctggaagacaagcgtcaaaagctcgtaacagtgccacggtacgtctgtgtatgtttcagtgcagagatgtacttaatgcggtatattgacttgaaggccgataccagctacaggcggacgccttcttgcttttgccccaatttacacaatttttctctttgtttcaaaaaagtgccttctgcatagggtatgccaaataatggcactcaccttccccaagcctcttacagtgcactgaaatgctctcgcgtatctgacttctgaaacgagaatggagagttcaatttgaatcgtttaccctagatatccacctatggcgtactgcatgtaagaggcatttttcggcaagcatccgtaggaagggaaccccagtcgtccagcagccttcgacccctgtccctcacgtctcttcccacacggagtttacagaaactactgtccagtttttgtccactgtggatagttcatttcaaagggacttcaatgttaaatatgggaatccttgccagtctacacattcaaagacatcgttgtgctcttcactttgactggtatcaaagcacttcagtcggacactcgctcgtcagaaggagagcttaattgtaggaaaaaagaacgga

SEQ ID NO: 1013 - DNA, 2392 bp, Toxoplasma gondii
  source 1..2392: mol_type = genomic DNA
caacgtcttattgcctcttctccgctttaatcataccaaagtcacaagggcgtcccgcagacatcgagacgccagcgagtctcgctcgtgtccaggaggcatcccgattctggcagatcgattgagggtcctcgggagagagaatcaccgaggggacacaaacgaaatacaaactgaggctgtccagggggtcgaccgagcaagagaaaagcggagaatgattgcgagcaaaaaggcgcaatacggcaccagtagtaaggtaatgcgtgtatggactgggcacatttttttgactgtcctcttttttggctgtgtcactctgcctgttcctgagttgtctgttttatgtggttcgccttcaaagtaataacactttcagagcaccaaagtgaaaacccttggtgcgacgaacaggaggaccaacttcgcggccacttaaactgcctcccgtctttctcgcgacctgggtacctgttcggtgctccgaaacctagctgatttctctgagcggtctctgtgattgatccgaccagcgcaaactttgtgcatgtcgctcacccttgctccgccctaccctccagtgtcaagaacgcacacgcttgcagtgttcctttgagatcaagcatatttcaataaagaacgtgcgtcaaagaaggggagtgcttagtccaggcggaagttggtttacaaaacttccattggcgagacgagttccgcaagcatcctctgacgcttcctctgcctcggagagtaatatcaatgtatttccgattatgttctccatttgaagatcccctagtgcaacgatttgcgttgtggatggtccaatttcactctggccgtgttcaaccacgcgtgagagagcaggggttctgtcgttggtcccaggcgaagaccggcgctcgccgacatgtgcttgttcctgcgggaattttcaaagcagtacatttaaatcagagctggcacgtttggtttcgttttcaggactgcttcaagacacagtgacacactcctctgcgatagtcttaggtttttctggggttcaaaactcgacgtagaagcgaagctctggagaacgaatcgtcacgcagtttagtcaaaattcgatgccaacagttcgcttaacgttgctttgcaaatgcactgcttcatcaggaagcgtcatgttgtacagggtatagggagcttgtcctcatggcgaatctgatttatctttcatgttgtctatatcggccaatctagtcttgaagtattgcacgccgtaaaggaaccgccgtccttgtgtcaggatgatgaggatctttgaaactgatctgcgtgcatcgtacagaaacattcgagctgcatgcataggaaagtttcttatgctctgaggtagtacgttttactatgtcttgctgtcgaaatgcagttccatggccagcagcgtttttctgatgtaatcaagtccctcgctatatctgtgggtcgaaagacagtggtttccttccctgttgtggcagctctttactcaaactgaaaagaacatcttttctcggttctgcaaaccaaacggcattatgagcttccctttcatcaatattcacgcggccacaatcgaggagccaccagtactcaatacggcgcacgtctgtagcacagggcggcgttgtaatcgttaaaaccgcttgtcgtgtcttcagtgatgaagaggtttccaaggcctgcagcgtacagtttctcttccctcatggtttcattttaagagacttttccgtggcgaatgtggcagtgaaggcgccgctggcgacccctttccagatgtgcacgcgcatgcgcctggagaagctgtaggctgaggtaaggcagggtcgcgtcggtctcgacgcacgaagcacaagtacgcgtttcacaggtcgagaaaaaaatttcgaagagcgtgagctcgtctggaatcagaggtaacaagactgcgaaaaggattcggcagcctcttgtcttcttgccatccctgaggtctttctcttagggcacagttcgccacgctttcctactctctcccaatgcaggcgcgatgaagcggcgctaggaaagagtttacactggacgcagactcaacacaccgactctttttccgcattttcgtgttttttcaagcagcatcatcatcacaccttcccttttctggtcaggtctgctctgtttgcaactctgaggcagtttttcttgacatcccgggggcgtatgccatcggggcacccgcgtaccttgcatctaaataagaacggctgtgacctgaagtctgtcgtggtgtaacgagagtgtttcgcttgaagagagtgtcttcctcgagacctgcacaccggttttcgtaccggtttctctttcctttaactcatcgtcgcgacagcga

SEQ ID NO: 1014 - DNA, 2202 bp, Toxoplasma gondii
  source 1..2202: mol_type = genomic DNA
tcagtttctgcatatacagaggtgttgagacagtgaggctttaggtctacaggggtgtacaatcctgtacaagtctacaaatgatatgacgcgcacgtaaatatatatatacatatatataaataagtatatatatatgtataaatgtgtataaaaatgcatataaatatgtataaaaatatatgtaaatatgtataaaaatgtatataaatgcttttaaaatatgcataaaaatatatataaaaatatatgtaaatatatgtacgtagggtggcattcatagatgtcgatctgtgtgtgcggcttctgctgaggaagcgcatgtgcctgttctaggtgacagtgtctacgcatgtttgtgtgtctgtagaagtggaaacgattccgtacaaaaggagaatattagaaaagctggatttcctgggaaaggatcagaatgcctcaacacttgagactgaaactcttttctgtttttctgctcgcacgctggggggtcgaccgactcttgattggccgagttgcagggctcagacaaggcagattcgaacaggaaaacgcagaatgcgccgcttagtcagagaaagtttaaataaaagactgccgcctacggtagagacaagacgcagactgaggacagcgagagtctgttgaaactcgacgccaggtaaaccgagtggcgcctgaagctcgagtcatagcggtaagaaggaaacagattcttaagtattttccaccagttcaggtatccagcgcttccagtgcgtatgtgtgttttattttctatcctttcgagaagcaacgtacaacatcatcgaagcgaatggggtctggagagcgctgaaaatgctccacgcttcgacagaggctctcctcctctctggcgcttcggacttccccgtctcgtcagtagggcgtgtgaacaacctacgctttcactctactttatttggggcagagaacgcgtttgcggaaagaagcgagtgcggcggagaaagaaagaaccgcggcggcctcgcaggcagacgtctcgacgtctcgagatcgggagccaggaggcgcttcgggtgtcactgcgcctcggcaaatgcgaggaagagccattttgctcgctttcttctatagtggctcaggtccttcgggcacagcgtccagtcttcggcgaaacctctggggaaacgcgccgaagagcctctgctccctgcatttttcgcagccgagaccggcgcggtgttccccaagaaaaaagagcgatgcaacttggcagagagaaggagggagggggttgaagacaacagcgctcgctgtgtcgtttgtcttctttccggcctcttcgcctccttttcccctcctggagctcacgaaaaggcacaaagatacgcgcttcttcattctggaaaacactggaagagagaagcgtctccttcctccacattttccggttctttttggcgcggccatacaagttccctcccgcgtgtctcctctctctaagccaacaaaccgcccgcctcagtgcctcgacgcacaccgcctttcaagttcgtttgcgtcttcggttttcggctttttctttaaactcgagttccctgctcttccggccttgtctcctttcctttcgccgttcttttttcctctcgcttttcgttttcgtcctttttttcctcggcgacatcgcgcgtgcaggccactctcgcagcttttgcccccccccccctcatgcgaggttgcggacctggtcgtcggtttcctcaactcttgtgcgagaggaattcttttttagccgcccagattctctgtccttgccagtttctctccgccgaaacagttttggcgtttcttcttgccaccctgaaaagtcgcctgtcttcaacgatccgccgcgcccgcccagcccccggagcgcatgtagcgctgtatgtacaccgcaaaactgcgttttcactcggcgacgaggaaacgccgtttcggtttctcgacgtttgtctattctctcgtttcgttctaagtctcctttgtcactgccgccctcctctgaggcgagctggatgagaggaagaggatggcaaggaagcagaggcgaacgacaagcacaaagggcaacccagaggctccgagtagaggcgagcatcccaagaaggtcggtttccatggaggagaggacgccgaactgaaaaaacgtaccttttttcgagagagcgacca

SEQ ID NO: 1015 - DNA, 2297 bp, Toxoplasma gondii
  source 1..2297: mol_type = genomic DNA
ccgaacctgcctctgtgttactactcaaggtacttgattccttgtttccgcttgctccacgcgaccttttcagctgcatttccagagacaaaagggtggttttgcggcaaaagtacagagaatctcgtacacgaacctttcctttacaacctgtggagtcaacatggtggtggtaccggttggtagcgctgatggcaacaaatgccttttccctgtggcggtctatttttgcagtttgtctagaaaagactctccgctcttcgccgtcgtgtagcaaagctttcacaatgacgaggcagcactggttacctacggcgatttttctgtacagcattctaacagatttctctgctgcctgccgcacgccagcccttttgtgaacacgcaggaactaccgtcatgcgcgtctgcctccaacaggtggactttttcgagtgcaacgtagctctttccgcgatttctacattaaacgtcaacctttccccccaatcttgaagtaaagtgcgctttcccagtttgcctctcctcgctaatatggataacttcaccgaaaccagcgtaaagagcacaggatgcactccaaggctctcacgaacagcagggtgaaaagtaccttcgcttccactttcacgtttggcttcgctcgcggtttgtttcgctcgtgcagatctccggggcccatatgggcacgctgcactgttctgtcagtgacatgcacatcttcttcgtcttctggattcagaagcttacacaaagcgatcacgctatcggcccctagaggatcaaacggcccgcgaaagtgcgcggactgcgccatctctgtttcgggtctcttttcgggatttttgtcaggctttgttcaggcaggagtggtgtaatgcgtgcaacctagatcgactcataaagtcgccagtggcagagcgttcgtgctgaggacagagacagttaggttgcaccctgtgcctctcaagacttcacaaacgctttctgacagacctcgcgcgcgttttcgtgtgtagtcttcaccacgcaactcactaaaaacagtttttttcgggtgaggcaccgtgcgagtaaacgacgaggtcagcggcagtctttcaagcaggatcagatacagaacgatgcgtttaacagcttttcacgagcgagagaagcgagcgttctgctcaacacaaacatgcgaccacacagaagccggccggcattcagggtcactgactgcttcgtcgaaaggcacatcagatgccagtaagctttttcacccgccgtgcgcttttagttcctgacgagttaaagaaatcacacaaacgcttcgtcaaagaagcaacgaattccacttccgaagaatgcactttccaggcgcactgcggccgcagcatctaggagcaggaggaaacagcacacatgcaccggcggcagagagttctttttttcccgcatgtggcagcgcaacttttttcatagtttatgcatttcgatgattgacctgcagggcaggcctgtgttctgtcttggcttttttcttccttccttgcggactctgtactcttcgctgatttctgcctcacgacttggagagacttcatccttcccttcacggacgttcggccccgttaaaacagtgtgtcgctgcacaggtcataaatttcgtgacgactgcatgctccgcgtgcttgcgttcccttcttctccacacacgcttctctttcccctgttgaagaaaacgatatgaatttcttcagggagcccggcaaaaccatcccgtaacttcggcggtctgtctgtcccccggtggagaagcctcgaaaccggttccagtgcttcgagggttcttttcttggtctcttgttcccgcgcgacgagaattgcctgtcttttcccctctactgctgcatgctcgaactcgccgttctagaagggaactttcctccaacgatgtccctctccttctccaccgcagttctctcgcgacgcaggcacctccagagagccgtgaagcactgcaacctccacagccgcttgccgctgcttgcccgcccatctcccgcgtcctgcacaacctgcagacgttcctttcttccttttacgacgcgtttaacattttctgtctgggcagctcttttggaaaactttctccctcgcgcattcctcttctacttcaacgcgtcgcgtctgggcagttgctctgtggccgtcctccttcttttctcggtccgtctcggccggcttctgcgtctctgtgtctcgaccgttcccttgctcgaagaagaactccctagatccaactcgcgcca

SEQ ID NO: 1016 - DNA, 942 bp, Toxoplasma gondii
  source 1..942: mol_type = genomic DNA
ctacactcttttgtccggcacttctcatctcgaatatcctggtagaagtcgaaagaaagaatgattttgtcgaatggctcgacactcggagtgcggcctgctccttcgacaacacggaggcgctgcaagtaatttgcattatgcagcaccttccccgatttgctgtgggcataccgcgtttggcgatcaaaaggttgtggcctgtggtgaaaagtcttttttaaagatctttcagagcccggtgccggacacccaagttcgccgtctgtcgcagcagccgttgtgttgccgtcgacactgcttacagccgaaattgtttcgatacccatctttgacaaaatcaggtgtacgtacagctgagacgagactctcgaactaggcaagtaggcggctgaaaagtctcggcgctacatgatatgagacacctccgctacaaggcgccctttcatgcacgtaagatagtatctgactagtctccacatactaaagctgccagaataagcgggtgactggcgacatctttcttgacagttcagccaaggtgtcacgtcaattaatttcgcgtcacaggccttgtaacggacaggggagagtagacgaccaaagaagcaaacgaacaaggtaagtacgacggcagaaataaaggcagtcactgcggggttgttatgtcttttggcggaagacccctaactggaggagcacagttgacagagggtatctggaacggcgactagagacgcaaagtcgattgacaagcaaagcaagtggggtctacgatagactccctccaggaaacgccgctcgagagtatgctaagcactgttgcgtttctttctattcaaaccaatatctcagtcgaagtcgagttgcagaacatgtgacgaagcagcgccagatgaggaaaccggggtcacggtctgctgcgtcgtttctctcacgaaa

SEQ ID NO: 1017 - DNA, 1897 bp, Toxoplasma gondii
  source 1..1897: mol_type = genomic DNA
ttgttcctatacagttatgggctcagaacaacttgggtgcagatgatatacttgtgtgtcaagacagttgcgctaatggtcctgtggatgacttgatatagtggcttgaagagaaagttcttttgtcgctgttctacggtaaccgagatcctgatagatcaaaactgtcgtgtgatgactataaggtgcgaggcatttagtccgagattaaacaaccagggcggatgcgctgtatccttttacacaggtgaaagctctctgggaagaaatagtgtaacttcagttccgcacgtgtattcactgaggatgttcccttgtatccggtaggtagactggcttgtaaaccggtgtaaagacggcatactccacttcacgaactcccttgtgagtttagtactttagtacacgttccgtatttagttaggcaagagcaacatcattggaatctaggatgttgcaagctgcaacagcctctttcttaaagctgtcctcaacacgggatcccccgtaccttgcacttcctcttgcagaaagcggcgtggtgtgcagctgctcggcgccttgtcaagcagcagcaaccgcttgcgacatgattctatcgtggtagccaatgtgcctgatgaatggtacaggtgcaaatgacaaagaacgtgagactaccgctgttcaggaactgtcagccctgccactgtggtgccatgagcagagagacgtccatgattcccaattcgcggacagtttttgagtcccgtgcgtataatgctgtttgtcagggtgggggcgacactatcggagcgcggatcgtccgctgcttcggcgttattgctgataagcaagaatccccgcctcagacgtcaggcaagattttcccacaccttcacgtggtcattgcagctacagtagaaacgaaatgacgagaatctcactagtcgttgaacagctcgccatccattctgcgtcgagacacacggtagttgccaaatgctgtgactatatgatactggaattcatcggtgcaagtttgccggaacgaagagagggcggccaataacagagcccggatagttgttcagacacaacagcagaaaacggatcaaccacgaactacccaagagaatcaaagccagagtttttatagaatgcttgcgttgcagcgcccaagtgagatatgggtactagcaagcagctcgcagttattctttggagttcataaagcaagttcctgtctgtttcatcacgtcgttaccattccaaagtttgctcctcccttttgtaccccggggcgacaggagaggcggcacacgtgtgacatcttcgaaaattgcggggcgacggagtgcccgcagcaaacatataattactcagcaatacttgtgcacctactgtgcacgtttctttaagtcacgaatgaacacgcggctaactggtaaaatctctttttttgtttcccgggcacaaaacaccttctgaatgtgagcatgcgattgctattaaaagaacgaaacaacgtttccagcggcgctctccctcagcgacggggcaccccaacttctaacgttggccgcggggtcgaacaactagccgccttattacgtctcactacctaaacggcttttgatgataactgttttctttgttgccgacttttgaaacacctttgtcgtgcgaaactgcagaatagttgccacctttttgtgtcagttcattgcactgaaaagtttagcttgtgcttgttcaggatcgctcaacggagacgcgtcacgagctgttcgaactacattgaaaagctgctgcccgtggattggttcggaggcatttttaggtcccatttgtctctttcagcttgaagaagtggatgtgtgaacccattataaaggctgttgtaagaaagcgaaaa

SEQ ID NO: 1018 - DNA, 2366 bp, Toxoplasma gondii
  source 1..2366: mol_type = genomic DNA
gtgtagagacagacggagcgcgaggaaacggtaacgaaggcgaagacgggaggaaaacagaggaggaaacggaagatacgagggaagagctgcacagaggcactgcccgagcagaggttgcagaggctggtcgcatccgcgacaaccgccgcactgcgtacgccatatttgtttgtcagagaaaggcaaaacgccgagaagagtgactcgaggggaagccgctcgggggtatgtacacctggcgcaagcggaaaggattcttctttgtggagcgtcgacggaggagagtgagtggaacggattctcgcggccgccggaactctatgggtgagatcaagagaatcaaacgacacgacacagagaaagacgaaagggaaaatccggatcccctgacaagagcctcgcgctgaaatgtagaaactctgctttgtggcgtcctcgaagaccggtgcgttctacatggagctgttaccaccgttttctccagtgcaaggtccataagcgtgcgttcctggaaaagtcacgcattcgtgatggcgcagttcttcagacgacgcacaggaatccttgcggggaggaagagagcacttgtgaggccgcgccgcgaacagaggcagagcgtacgttctgcaaacttttcggtagagagcggggaggaaaagcataatttcttcgcgatgccctcaggacggatccaggcatttgaagtctgatgaaaaccacaggaaagaagacgttgtttgacccgcctctctgggccttgtgtcgccggagccgtccgttgaaagactccttccaggaggccgttccgtccggcggcgctggggtcttcagaagacgcgagaggagagagaggagcctgtggagcgaagcgacgaagagagatgtgaggagagagagctgcggcgagtggggaccgagagactgagaggctgtgaaaacagcgcgaggcaagacttcgcgttcgcaggagacctgcgacggagaggcgagaggctcgcagcgggaaacttcgcagtggagacacccgacccttcgagtgagcagagagagagaaaaaaaacagttcgccggacaaaagaagagaaaggagctggttccctctgcgtttctttctcgcagtcgacactgcaacttctcttttcgctgcatgcacgtcgtgcttctctctgctacctttctcgctgcggaaacgtggagcaagtgagagagccagacgagacgtcaaagaacggagtggagcgcggcagcgagaagagtggagggaacggtcgccgttgcagaggtctttatttttcggcggaaatcgacagttcccgatcgtctcgccgttgggtgggggcgtcgtctcgcctgcacgcaacgaccccaaaaaggattcgcgccacagggggctcccagaggagagaacggactgcttctttctctctcgctgctctcttctgcttcgccttccgcgcggcaacgtctctcgcttcttccgcagttgctgacaggaaagtccctgcatgtttcctgcccctgctcggacgaccggcacaggactttgtctcctctctctcacgcgagacaagactcacaccctttcaagcacaagaggggatctcgtcttttgctcgctgttggtctcacgaattcacatgcttcgccaactcacgttcctcttcgtggtctcttcctcctcttctcgttctcccttctctcgttccttctttctcttgtcctctcgttctcttgtcctccctgtctctccctgtctctccctgtctctccctgtctctctgaggaacctgtggtttgtgctgcatgcagtggaagtcgacgggaagggcagcactgatccgagagcaggtccctgggcaccctgctcgtgagtcctcgccttctgtttcttccctcgcgcttcgactttcttcttgcgtacctctcttgctgtctccgaaccgcgttcttccttcctctcttccgtggatgcctcgttcgtctccgtcagtttcagtctcgttcttcgacttccgactggaaaaagagaaacgctttgtagccgacgttctgcatctcaaactccgtctggctgggaaaggattccgaacacccgagtctccgtctttcgcttcttctcttctctgcatccgggggctccgctttagcgcgtcctctgtctcgtcttcttcttctcctcctctgcgtactctcttgtctgctcccctcaacagtgtgtccttctctacatcgtcgtgaaccagctgccctcgaaccttcgtcctggttctctcttcttctccacattctccttctatctctttccactctgttcacccccacccccagagcgcgccgcctatcgactctcgttctggagacaa

SEQ ID NO: 1019 - DNA, 2881 bp, Toxoplasma gondii
  source 1..2881: mol_type = genomic DNA
ctttagagatggtgtgagtgctgtcaccatagcgacacaaaaaggaagtatggtggcctatcagtacatttgcagcaccccgcttttcccccggaggtgtaccgaaatttcgtcgaaacgtggttcagtacattaccagattgtttggtagaagcatctatgtgcacactgtttcgaaaggctcagctcaacgccttccactagcttatattaagggacacacggagtagagtaacctatccaatcgtagtgagcatgcggaacgatgctaccactcgaagacgatctctttcactccttgatgactgagcattgattgctattatcattacccagcattttggcctaggggataattgctgtcaatatccagtcacaatggcatcaagggtgaaaattgctcatgcaacaacggtgccctcaaccaaggaggtttagtaagacagtgatatagagggaggtggtacctttctgtctggaggggctgctttgaattagggagcactagtctaccatcacgacgttggatatagggtgcgggtgttttgatttcctgatagtggaaggaagagtgtgcatgcacataatttcggttgaaccactctcagcaaaccggttcccaacctgcagagctcgcacagtgtactggacgatgcctctgcagagaaaatgacactgtgagccttcggtcagggattcgcaagcgcacgctttttcccgcgtaattaaatttatggtagttgattgagagattcatatactaccacctctccacgataaaacagtaaggagaaacgcgagtggtgtcgtgggtgcgctagcgagaattgctgcacacatattctcccagacactcgaccacagcggaacttacagcagggcaagaacctcggtggaccgttcgttattgctccccgtttcctgttgatgcttccttccgccttgagtcacttcatatgttccactgatcgtacgttccgagaacggaacttctgtagttcggctgaagactcggattttcgaccacccgacaaacgcctctagtcccagcggcgcaccaagactttgaaacggcgattgtactgtaggaggtggtagtcgaatttgttcacgtgcaattgcatatccatgaaaaatgtacacttgtactactacaggtggccggttccattggtacaccgtggcatgttactccggccagtcgaatgaatccgacaaacaatgggagacactttgaacgggagaaagggcacctgagtctgttaacatcttgtagtacaacattaccagaagggaactgaacagaaagatattgcacgtggactagcgggcacaatatttggctccaggcctggttagcggcttgtagctgccaggatcaaccaacagctccgcatttttcgttctgatgtgatgtccagacgcgttgtttcattacgagggagtcttgacgaacccctgctcttccttcttcagaagtttgcgaggcattattgtcgtggttcgttttgcgactaacgtgactgccgtaaagctcgagccggtgagtcgacccgtgctgcagcagtgatggggtaaatgctgcaaacacagacttctagtgagtgcctagacgaagtcgtgtaactggagaaactgcgaggactcaattgcgagcatgccaacgaagagcaactggggtgtgagcggggtgtttggaactaggatgagaaatacggaaagtggactcaagcaccgttaaaggcgtcacatgcactcaagtcgctgcacacgcaccagcaaaaaggacgaaaaattaagtgtgaactatagtttttcagccaactgacgtgagttgggggagaccaggaacaactttagcggatttttccgtcaacgcatgcaacaagcgttcgctaccaggcgtttttttacagcagctgaaagcgactgtggtcgccacccgttaaatgttaggaaacccccacctgcgttttcttaaaaccctactgccaacaccagtcggcaaaaagcattcccaaccttgactgtggaaagaaggcaccactcaggcaggatttttttccacgatttccactcagaagccgtttcgtggcggtgtcttcccggtctgttgacggcgtagaacatcggatagttggttgcaggggattcactacttccacacggttttgccaccgaattcagaactcgatggcttttcttcgtgattctttccgctcctaagacggaataatgcgattttcaaacataaagaaagcacttcttctatccttttgtgcaacgactcaaatgagcatttccgcccgcgttgttgcggatgccgctcgtaaagcgctgaccggaaaatagtcttttttttcgccgttgtaccctggttcccatagctcatttacctttcagatctgtctgaactccagcgcgggtttctttgttgtctgtgattctgcgtcgtggacgacgtgttactgtggagcttttgagccctcttgaactgtttgcattgggtgtagtccgctcgacattgaggcaactacgctattttttagtcggtggatcgcctgggaccaattgcgacatgtcatgtgaactcagaagagagatatgccccgtgtgtttagacctttcccccccaaaagctgtttaaggtgactgaggattgcaggagccagaaacgactgcgtttcgtgtgaattcgacacaggagcaacacaccgacctgcacgcagggggatcgcttttggaatattatcaccgttttctgtaggacgtcgtcgtatgccaactgcggctgcgatccggtgcagctgatcatcttcccgagaggccactgatcgagtcacttcaagaagacttccggttactgtcacattttccacaa

SEQ ID NO: 1020 - DNA, 3329 bp, Toxoplasma gondii
  source 1..3329: mol_type = genomic DNA
cagagaaggcgtaccacgagcagttgtctgtcgctgagatcaccaactcggctttcgagcccgcgagcatgatggccaagtgtgatcctcgtcacggaaagtacatggcctgctgcttgatgtaccgtggtgatgtcgtccccaaggatgtgaacgcagccgttgcgaccatcaagaccaagagaaccatccagttcgtcgactggtgtcccaccgggttcaagtgcggtatcaactaccagccacccactgtggttcctggtggtgacttggccaaggtcatgcgcgccgtctgcatgatcagcaacagcactgccatcgcagaagttttcagtcgcatggaccacaaattcgatctcatgtacgccaagagggccttcgtccactggtatgtcggtgagggtatggaagaaggtgaattctctgaggcgcgtgaggatttggctgctctcgagaaggactacgaagaggttggcatcgagaccgccgaaggtgaaggtgaagaggagggctatggtgacgagtactaaaccgcaagcccgagtacagaaattctggcgatagcgggaaaggcatagcgaacgagaccgaataattccagccaggattttttggtgtcttttacttgaaaaggtgaaggtataaacgaccaagcgtggcagatatggaaaatccgttttcagctggtctatgtacaccagggagtatgaacgttgttttagcagtttcgttgccttcgcggttttttgatatgttctaaacggggagtgtgagcaccgaaaaacttttttctaggctcttggctgctgaaatgtcccgcgaagaatcgcttcttccttgaatttcagtcgacgcccaaccaaaccaccggcactgaacgaacttaggttaagttggccttagcgttctcatttagtgaaggcaccgcaccctaccccgctctcgagagccatcggcgcattctgtcacccctcgggagttcgacacaatcccgattgacgggtttcagatttgcaaaagtcccacaggcgcccatcgctccgtcagtcttggtttgtagggtatctttccacgagaaagggtggttaactagtgtcacactgccgctgcgctccgtcttaagggaaaccgtcgcacgttgttctggcagtctgctgtgcgtggaaccgtttggcggtcacacatgtgctttcgtgacgcacggggagcgtgaagacgtctgaaacgttcggtgttttttgtcgaggagtgaccaggaacgaggttcactgctgcactgtacatgcttgacgattttacatgatattgactgcaaagcagtcccccagactggcctcgtgattcgacacatgaggaatgacttgaagttttccgaggtcatgccactgtcattgtccgccgcgttgtggaacggaccccaacgagtgctgatttggcaaccatcaatcgacttcctttaccgtagacggcaggtattaatccttttgctgtccgaatgaaaagccgtcaaaggacagaacgtctatcaagtctgtgcgtgatcgagagctttcactacaaatatttgtgacagccggaagaggcacggggggtagagtattttggttcttgcctttcttacattattagaggcggaatagacccctatcaagaaatctccacacgcactctgccggcgaacttcaaggatgtcacctgttctgccatgtcactgctcccggaccaagagcaacggaactgctgtacacctgaaggttgtgcatgtgtctagcgagttcgtagtaatacgcacgtcaaagcatatccattgcacgtacaacacacgggtgtacagtgtaattcttgctcgtggtgcagtggacaaacgccacaaaaatatccattcgatgcaaggatttagcgactagcatggaacagcttgattgcgagcctgcagctcggccgcccacaactggtcacgattcgacttatgtaaataggggtatcatacctgcttgtgacaggtgcgcatcgccaccactgaaccatcgagaagtgtctcttggactggagtgtctgttgtaatggaggtatcgttgtggtgtgtcttctctaaggcatacgtggagctcggcaaaacaagcgttgcagattcggatgatatttccattcttccatgttcaggcatgtatgcagggcggggttgctgtcttccctgttacaagattcgctttatggtagaaagcaacaggcgccaaatgctctgactggggaattctaaagaaaagcttacgacggcgcttcttgcgttgcaattagagtttcgatggtcacgactgtgggggatttctgcttagtgtctagcatcggagacggtcgcgtgtgtgttcttccgcgaaaccaccaacagactcaatgctctagactatgatttgacatgtttctttgcacaaccgggcgccccacaacgactctttgtccttttagatgtgccaatagaaagtgtcgattgctcgatgcagaggcacgacagagcacgctgtggttctcgatgtcgccgacaaccctacactcaagaaaacgtcagcatggcctgaggcatccctcgaaatatgccgtttacgtgattttgaagggccgtcaaatgttgtcttctgtttggcctgccggtgttgaaacctgaaaactggaacaccgtcttcacagagtcgacttgtgatccactgaaaatgactcttagattgttctaagtgtattagttcttttcgtgcggcgcgaaagtgtggctgacctacagactacattaatccttgtgtgggatgagaagagggaacgcttgcagtcgatgacctcattttttgatcacagtcaactgcaaaggcaagagaccgcgaatgctcagtgatgtccatggacatggtaagatcccgttatattccggcccgagagaaaagagggaggaatagatctctgtaatatccaccgcggtgacgaggtcacgccgccccccgaacctgcactgtgggaaacctgcacaaacgtttgtcgcacgagattcagcggacgcacatgtttttcttggcagggcattttgtttgaagactcacacgagatactacaatggaaaaaccaacacacgctctgactgaaggcttacatctgcgctgttgggaaacgttttttcagcacaacacggtcttctttaaggtattgtttcggttgccctagcaaaatatatcaaacaccctttccccatgtatgcaaatggcgtccaagtttggtgaaacagccatctgtactcgttgcttgttatttctgtgctttcagttcggttggcgctgtaacggaaa

SEQ ID NO: 1021 - DNA, 2058 bp, Toxoplasma gondii
  source 1..2058: mol_type = genomic DNA
cacaaatgcaagccactctttggaagcctatccacaaagacatccatgtacttattcctgtacatacaacatgtatatatatatatatatatatatacagacaagcatctgtaagacgtacagacatatgcacacatacatatgcatatatggacaaatatatgtacaagcattcatagggatagatagatagataagtacagagagagacagataaatagatagatgaacagagagagatagagagacggagatagagattcagagatagagagattcagagatagagagattgattgagataatgtcgtggagtatgcggtcgacacagacgcttcaggcgaaccgaatggtcacagcagaggttgagatcttgcgaacagagacgcgagaggaagggagtgagtagaaagaaaagaacgggagaaaaacgagcgtggcgagtctttttcgagtttgaggatgtgaagaagagcacacctccgaagggcaggctgcgaaaacgtctcctgcctgaggaagaaatgggtccgagaagaatcagattcatggaacaaagcatttttagacgaagagaaatatttgcgttactgtgtggagtcgctctggaggtccgtagggcgtggtttttgcagactctgccgcccttgacacttgtctgaaggggccttgcacaacgggagaaaagcgcatcttttcgcctgccaaagaaacaagtctgagggagaatcaagagctgcgagacgcatggggaaaaatgaacacaaatgcgtccttcgaacctccaaacgtcgtgaggacacaacagcaaggctcagctcgaagagcctctgccggatcctcggagaaggcctcgccgggcggctcagtccgagaaaagagggtgaagaaaacgctggacgcacaaagacgcgtgaaagaaactggaagaaggaggtcctgaaaagacggagagaggaatccgcgagaaactccagagttcagcgagccggtgaatgcgccttctctgcgtgcaggcgcggaagacaacgatggagacacggacggccaaaaaagcatcgcgggcgaaaaaatttggacgccacgatcttcacagaaaaaacgaatcagagtggaggggaagatgaacggtaaaacgagcgtcggagaaaatgcaacgagggaaaaagtctcgagatctgacgcaaatgaaacctgcgaaaagaaggcggcactcccatcgacagctagtcctcgctctgtctcctcgtgaccacggccttggagatatcttgaaaacgggattgtcctcgctatttctcataaagagtatggtgccagtgtggaaggaggtgggagacaagaaaatatggcgaaatagagttcaggaacgtatgtgttgagccatgtgcaggcgaaactctcctgtgaaaagccgcgcgactctgaacgaaaaaatctcgtgacacctttgtgagatgatggggacttttacatggggagtttgagtaacatgaagggacacagacgcttactctttccgctcttcgtcactcttctctgaagcctgaagaagtcgcctgctgtttttctgaacggcaaacgacagaaccctcggacggcagctgggtgggtgtctgactttcggagctcccgagacggtggaacggtgtggttccaaaatgtccatatacggagcgaatcttgcggggaacgctgtgttttgacaacttccctgataaacgcctctcttcttattcgcgtaacacacatcacgtctcgtcggtactgacagttggaggaaccagagtggcatggctgttctgtgctccaagtccgtttgacaccgaaatgtttcgcattctgaaggtggaacggatcgcagaaaaacgcgtgcaagctgttgttcctcaaactgttgatttcgtgtgaatccggtagcaagaacagcaaggaagctccgacccagcaagtcgaagtcctggtctctgtcgaatcgttggacagaaaagagctgtctgtgttaacgacaatggaattcacggtctcttgatcctcggattgatctatttctaacaa

SEQ ID NO: 1022 - DNA, 3346 bp, Toxoplasma gondii
  source 1..3346: mol_type = genomic DNA
gtaggtggatatgatgacgttcacgttctcgatcgttcgggagaaggtctggtagatttcttcaccgtccatctgcaactcgaggagagcgcggtcgaccttgttcacgtggagaacagggcgaatacgctcagccagagcttgacgcaacacagtctcggtctggacgcacacaccttcgatggtgtcgacgaccacgagcgcaccgtcagtgacacggagggcagctgtgacctcagaggagaagtcgacatgtcccggagagtcgataaggttgataaggtacggctgcgcacccttgccgtcttccatgtcgtgctcgaagtacatggaaataccagtcgacttgatggtaatgcagcgttcctgctcgtccgcacgggtgtctgtgaaacgtgcgtcaccggccgccttagcggaaataataccggccttcgagaccaaggagtctgtcagcgtcgactttccgtggtcgacgtgggcaatgacggacatgttccgaatgttcttcggattgcccataatctcacgcatctgctccactgaaaagttcacctgaaaaaacacaaaacgcgagcacactcaatacatgatgccgaaatccaacctcgcaccgaactgtgtgcacacgcacacgacaatcgagacacgcacgaggaaacccgcggcagaaaaatggtgcggatcacactgcaaataaagtgactcgtctgtgaaaagttccatcctcttcactggaacggaacgaccgacaagatttcttccctggagcaaactgctgccactcgaaacgtcgttcacgcatactccgctcacgtatcagccacatcaacatgggagacaaccgacatttaaaagcaattgaacgcacagacaactcactcacatacaaggtagtctacgcgtttagcgtcggtctcggataccgaatcctctaacgcaccctcgaattctatttcttatcctactcaaagccgcgtcatcgcctcgactgcggacccagtgtggcaccagacacgaaccagaatacaaaccgtgaaaatacattaaccgaatgaaacaaatatgcactggggaaaattcttttgactgtcctcgatacaaggaattaccgccgaacttgtaactaccaacagagaagacatggccaccacaacaaatctaaaccagttgtgtgcctgtgaattcgccgtgctcttcggcagcgtcccgcaaagcaactagcgttctggtagtctaatggaacagatgctcgagacaactatcctgagtatgctgggtgactttccttctggaaaaactaggacgtaaatcaacaccactacggggtggacgggagagctgtgggaagaacccgcgcatcacgtggccattgcagtcctatgaatgatgaaaaatcattaatatttcgtggaaacaaagaacatttcgctcttcctgaacagaatcttcccatcttctggaaaactgctgagaagtcacgggagacaagaggattcgctgcgttccttcgccggactgtgggcccgaaaaactagtgaagacgtaccattttgacgacggggcgggggtgaagggaaccggtaaacggacgaaggggagacaaagaaacaaaatacagattccaaagaaggaaaacaacctttgtgagagagagctccggacgctgctccaggaaaagaacccacgaaaacggcacaagcagacgaggacactgggacgcccgaccagcaattggtgccgtttcccccctcacggcggcaacggcaacaggaaaaaccagactcctctgcgagacggcccattccctcgttcgcaacgcgaagtcgcgatttatcagcccccaactctttgtgaggtcgggaccgtgtctctggggggtgggaacgaattgcccacccgaggggtgcatcgcaggccgtagatatcttatataagccgaaagccgcaacttccactggggtatacggcgatatcgctctggtcgactctttttgacggagaacgttttatgcaagttttcatttcctgaccctcgccgattttggttttgcaaccgcggtggatcgagccactgtcatatgctaacgagtcatatacgcagatgaagttcctagactcagacaagcagcaagaggaggcgggcttgccaagtaaaggagtttttttaggtcctcgtggagttttcgcctttataagccgagggtgtcgaaaagagataacactcggttgggctgcttaaagaaaatgcacaccaaggatgtacacatctaatcctgccctttacgaaccgtttgaagtgcgcaccaacgtgtttcgctggaaggatggacggcacagtgcttgcggattggcttaaatagcaggcggtcagggtttcgtggcgtaagactagagcatcttccgcagagacagagtgagctggtggacactctttatggcttagcatgaagtttttctcaatccttttacgttagggcggggtaattcagcacagtactgcgctcagccagctgggtcgcccacactgttcacgcgtgtgcgaagaaaatgaagcgcaacgcccgacactacgaatcctcttgaaccgaccccgcgacttgcaaagaatgcaccagtaatagagccgtatttgttgtgtttttccatgctctgaagtgtggaacttcttgtctgctttccgccttctagaaggtgtgcagccctccagcctcactgggactgaatcgacgtgggcagctcgctgccacagggaggcccggccgagcgtacaactgttctccaagtgccagtggcgtactttctcttcactatagtcattcattttcggatttttccgcaagagttcgagtcattctcgcactctcgatgtcggtgaaggtccctgaaaggaagttgcagggagaccctccaggctttttgcaggctgcatgcgatacctgtagtcaactggctgatgcgtcgtcggcgggttgcatgacccgcgtacatctagcgtttttccgtccgtcacagagtcttctcgcctgcagaataagttggccatctctcgagttcccatctcctggatttcgtcagacctgaagagtacagaaaggttgcagttgagtgggagattggtccggtgcggcgtcgatgcagcggcgttcggccggctttgtgctggacaactccgtgtcaacagcgccgtgaaactgaaaatttttagacccgtggaagcttctatgaggtaaccttgcccactttggcttgggaaacagccatcttcacggtcgacttgaaagagtcttcaagccgcattcggatgaaacgcagttgttgaaagacagagattcctgcaccgaaa

SEQ ID NO: 1023 - DNA, 1339 bp, Toxoplasma gondii
  source 1..1339: mol_type = genomic DNA
tctttactaccagtgaattttctgccttttccagttgttcatctcgagcgtctaaaccttgaaacgaagacgctcttggaaagatgtgctgaactccacacatcaaaaaacacgctggtcacgaagaacccagcagcgcaactccttttgtgagcgaaaagtccatcgggagcgtacgtccaccaggtgtccatacactcgagagaaaacttcggcgggtcggcactcgctttctctttagcgatcgcgatcgcgttatcaatcccgtgggtgttcaatatgcagaacaactgttgagaagccgcgtttcacgctgcgttcttctccacttgctgtcgtctccgttctaagaaggcgagggccttctgcggatcgctctcgatgaagatgtccccctgctgtacgtacaccgcgcgtccaggcttcagcgtcttcacctcgtgtgctgcgactcccagttcactgtttagtccccgcgccgcctctccgtgtttttcccgtctctcgcctccgccacacccgccgcacgccggggtcttctccatgagagaagaaaaagaaaaaaaggcccgttttctctaacaaaaactacgaggggaaaacgccgaaggggcgaatcaaacggggaaagagcggtgagaacactgccgggacgggagcgggacaggcgacatcggcaagggcaagcgacgacaaaagacgcacgtacagtcagaaacacagagacggggaagagaggaaaagtagcaggcggccgagagagagaaggcgaaggcaaagaagagagcaaacaaaggcggagacaactgcttaaaaaagcgtatgatgaaggctttctgttccctggaaaaagagagggtccattcaggatccacgcgtaggcttcgagcagaaaaaatctggccgaaaaaatcgaaaaagtgtgcgttcctccaagcaactgaaaagcgaacgcgcggagaaaagagaaatggagagcgataagggaaaagcgagtcctgtctcgcttccttgccgccgcgagatgcagaagtgacctctctttctttttcttgagcgctgaacgcatgcatgccgtctctcttgcgcgcagggcgcatgcacttccggaaaaatcgaacctcgcgataagacgaggcccgcgcggcgtactgcgggtggccatcccacacctgtgttttctctccccccctggatggtcagcaactgagtcgagcaaactgggagttttctgaccacgaggccgttggggatcgccaagcaagtcgcagattgtgtttcttcttgttttccgttttctgcttcttcggtgggtagacactgtaaaaattctccacca

SEQ ID NO: 1024 - DNA, 1917 bp, Toxoplasma gondii
  source 1..1917: mol_type = genomic DNA
gactgctcttcagaatttcctcgaggctcctctgcagacttctttccagagtccccttcgcgcctactcacagcctttctgtcgacgacggcggccgacaggcggcgcaggaaacgcatgaaagcctggtagctgggaccagccgtccatacacttaaatcgtggagggagtgaatctgcttcttgcatgcacgcaaatcttcctcgcggcccgtcgccggctccaccgccgcaaaggcggcgggtgcgccgggtgtacgtacacccgagagcggggcggtggccaagggcgaggcccagggagcgacgcagcagacacccggcgagagcgcgggagagaacgaagctggaggtcgaaagagcggggaagaagacaccctcggcgccgcacaagcaacgccggcagaggagctcatacaaggctgaaatgcagaagaagaagggagaggaggagaagaaaaaggaggagaagacgaagaggagggagggggagagagttccggatctctgggcattgttggagatgaagaagaagagaagggggcgaggcagggaaggaaagatccagggaggcagtcgaaagatttgactggaaaagactgccaagagcgaaaaactctgaaaggaaagaggttcgttcgtttcctcggagaggcaggtgtacttacacacgagctcgacgaaagaacgcgagggacggagaaggagaatccaagagagcgagcgaagcagagaaggtgaggaggctggaaaagaaaaaagaactctgaagcgtcaacggacagtgaaaggcggagaggcgagaagatctcggaggacgatcgagtgcagcagtgtgctccagtgtcaggctcacgtctcgagcatgccttttgccggcaacaacagcggccgagagaaggaagaaaagaaggagaaagacgcgaaagaaagaggaaatgaagtacacaggagaaagaagagtaggcaggagaaagggagaaagtccagtgcgcgagcattcagttttgaggaccggcctgtgaggagacgaaaacatgagaaaacgagaagaaaaagaagaaaagaaaaagagagaaacggaccaagagaccttctcgtgacgcggcgtcaagcgccctgttcactgtcagacgcgttgcgcgtagctagtaaggcgagtctcggcggagaagaagagccccgcggtcgttctgtcttttttcgacacaagaaactgtcagatgcgcctgagacaaggtgcgagaagagtggagaggaaaagtcttcgatccgcctgtgcggagcggcagagaaaccgacagaaaactgcatgcagcttctcttttgttgtgcatgccgcggtcactcacgactctctgcacatccgccggtcctgcctccaaaagaagacaagacagacaagggaatagacggcgaaacttcagaaaatgagagagtgacctcatcccgaatccgtcttgctgcaccttcccagacctcttcctgcgtcttcgatctctcgacctctcctcttcttctacacctgtctctctccttgtcttctcggtctttctctctctctcgctctttctctcgctctttctccctttctctctctcttttcttctttctctttctctctctctctttgtctcctcgttcgttttctccttcttctccgcttcttctcccgcttctcctccttctttctcttcctccccccttctctctcctccgtcttcgctctgctctctgctgtctgtcttctcctttttctccaccgtcgcgtatgctgtatcgccccgtgcctgtgtgtggcagacgcgcccaagtccctgcttctctgtctgctgtctctcggtctgttttcgtctctcgctgtgctcctcgtcgccgactcggacgtcgaccgcgtcttcttctcggtctccacga

SEQ ID NO: 1025 - DNA, 2016 bp, Toxoplasma gondii
  source 1..2016: mol_type = genomic DNA
aatagtcagggcatctgtggacgggtacatcattcgaggctggagagcaggagcagcctgcgaagtgaacgtggctgcaggcagacaaaaagggaaccaacacaacataacaacttgttgcacgcgaaggtctgagcgcgacagcataagaacaaaacactacaatcacacgatctgcttcaatgttttttctgctactgtctcttttttctctctctatccacgtcgtacaagtgacacgaatatcttcgcttttaagtcgcatctgcggtgaagtctctctgtgccccgcctgccgatgatgagcacgaacgtaaagaatgcggcacttgccacaaaaaagcaacctacaaccgacgccactactagcgtccccagtgcccacttcagcgtgctccttccgtatacacacagaaaaatccactccaatcgtgcctcgcgtagttttctatggtcactgcacacgtttcctgtctgtgaagccatgaaaacgaacgtactcgtctgcggaattggggatcccggaggcgggcactcgacgctgtggccgccatcgctgtgaatctcgttgtcggtgtaaacacggccttccatggggctggattctgtggcgaacaaaagagagacgcaacaaggaatcgacagaatctgtgtgaacgcgcaaatattaccaaagtccaagtgcagaccacctcgacacgtatgcttttatgtcgttagcaaacgtgtgcacattccctgtcaacatgaagagcacaaatgtcctctcggacggtgtgcatacatgtgataagcttctcgttgaggcgtttctcagatatttttcttttgacactgactatggcgtacaaacggctgaagacactggctggatatatatatatatatatggggagagacggacatatccatatactccatggtccacaacacagcccgacggccctactggataggttacatattggcacatcgcattaaccgtcgacagcagcacacgtagaacaaaagcataggggaaaactcagcatgggaccctagtgtgtcagctgattatctgataaattttcgcattgttctcataacttctttctctccagcacttcacacaggcggggccgcgtagcccagcccgcgtctcccggttcccgtctcggcagactttttccacagcggtgatccacgaaatggctctccgcaattagaaccatgcatctcaggaaacagaatttgccttcagaacggccgtcctcaggctataaaggtcatggcttaccaacttccaactgacgctccgaagcgccacagttgagtggtgtgccgggggagacggtaggggaagttggttgcgacattgctgctgacaatccctactgggtacaaagatttctgaaattccctcaccgcttagtggaaacaatttcaacaaagacaagtgcagagagagaggacgcgcgccgatacatgcctttcgttgggaacggataaggaattcacagccctgagggacgcggaagaagggagcaaaaatgcgccggagcaaagttgctgccgcgtcggctgaaagaagctttccatttgtcagcggggttcctcagtggtgggggataggaaggccgcacacgctgtagcgtacgtaatgcacagtccccaaacgcaccggcttttcccccccccccccccccaccagggggtatctgtaaggtctcgcaactttggaggacgaaacgacctgtcgttgtgtcttacttctctgttcacgaacaggagacatcatcaagtgctgtgcatactctgagaaaaccttgtcgcaggccagcccaaacatgaaaaaccgcatagttcttctttttgcagaagggagacatcgaggggccatagcgatggactgtcacctgaatgtagcctcataccaggaagccgcgccctctggagtcacaaatagactgaatgacagtcttcacccataaagaatgccgaagagaactatttaatttagaacagactggctgtcaa

SEQ ID NO: 1026 - DNA, 1308 bp, Toxoplasma gondii
  source 1..1308: mol_type = genomic DNA
ccccataaggagaagtttgctgttggtcccagagtcgctcctctccatcttgctcgcgtacgtcaaacgctgaagcccacgaaggaaattcaagaagacaagacagttgcagaccacatgacaggcgtgtctccagcctcagcggcacgcggaagtatcccataaagtgaatgcacggagacaacaatgtgcacagatggttctccgagtacttgcgtgcatgcacagatgcttcgaatactgagggtgactgtaagtgcaagtccacaagcattgagccttgtgccaagagaaatcgttcttgcagttatatttagcgggaagcgtcgtcttgtcttccaccatgaggttcgtctgcgcgtacgatttccacaagtgtgacccttcaactagagcacgcgaggcaaccggctagttctcctccttcatccctctgagtagtgcacgtgaactgtagaaaatgggaggaaggcagaaagcgacgaatggggaacgccagaacacaacgaatactcggtacggagtatgacaggaatgtaccaccgaacaccggatctgggacagccacggatgccaaacaagagatccacttgtccacgtatcgaatgggtattgtttgcaagagcgagagtctcctgagtgttgctgtaccagttaaacgtctgcaataacggaattacagtcacaggcgggaaacaggaaaagtctcttactagcgggcgtggctggacatggcaaagctaggcgacggctaacgtcgggtaaaccggggcgcctgacactaaaactgaattcgtcttctccgtaattttttagtagttttgcatgtcgcggtctcagagatcaacaaagataactgttgcgtgaccgcctctcaagaaacgccgcatgatctaagtctccacagctgcatgcatgcatgcatgcacacgggtcgccagccaagctgttcgagtcttgcgaaatatgtcagcttcagcgtgtgaatggacgagggaacagtggaaacaaaggatgcttttgagttcgaatccttgcactgcaggaattttcactgagaaacgcatagagtcgaggaaccgaatgagaaatccgcaagcatctgagcttccccgtcggggtgcgcttcgtctgagccgacaacgcaggcggtcgcgcgaagtgtcggtcaacgtgtaagtcacttcagctccggtagtgttaccagttgagggatagcaacaaagttcctctttttatggatttgtacgacgttcgcaagccgttgactgcaaccgcggtgtgttttctgctttgcccgatccacca

SEQ ID NO: 1027 - DNA, 4364 bp, Toxoplasma gondii
  source 1..4364: mol_type = genomic DNA
cctgaaaagacagatggtcgtcgctctctccctcctccacatcttcccagtcttcttcttcgtcttcttcttcgccttcttcttctctctcctcgcctgcgccgttctctccgtctcgttcctccggactacctgctgccggtctctcgctcccaacgcgagacgtcgagcgtcgttcgttcgttgccggcgcatgcgcaggagtgggcaggcgccgagcctcagtgtcttctccctccgccgcgttctccgtctccgcttctctcatttctctcgcgtctcttcgctcgacgcagctgtcgcggctctcaggatctcctgctgtgttcacagccatgcctccgaccagccagttcctctctctggcgaaagaagagagcaagaaacaggagaggaagcgacggggaaacggcgggggaaaagaagaaggagacgaaagatgaggaggagaggaagcgacggggaaacggcgggggaaaagaagaaggagacgaaagatgaggaggagaggaagcgacggggaaacggcgggggaagagaagaacgacgtagaacaggtcgcgaagatcgaaggaggctgggagatgagggcaagacggtcagatttacatggagagaaaaagaggaagaagcaaacagcgaagaggaataaaaagaggcgaagtaaagcagagaagacagaaggccggggaaacacagagaagcgtggagacgggagtgtgtagcagtgagggagtagagcaagccaccggaacaaagagggggtcggaaaggcgacggtgagagagcgctcgtaaatggaagctacaaaaaggtctcgctggcgagagaaaagagatgaaacgcggggagagaaggaaactgaagaattccctgaagaccccaaagatagaaaaagatgctgtgcctctccagtcaaacaaaaaattagacgcatatgtccatctatgtcaccatcaagaaacacacatggctgcatgcagacatatatacacgcacatacatgaatgcaaatatatgcatatatatttatatgtagacagacagatacggaaatatttgttttttctgtgtcgacgactctctgtgcatgtaccccagtgtgcaggaaacgacatgaaagtctcagaagggcaacaggcaaaggaaacgcgtcaagcagtctacatgcgagttcgtcttctcttgggactggactgaagagacctttttcttcgctgagttttaggtcctcaacgcttctggcggctggaaggagagagcggcgctgcccaggcagcaggaccagacaaggcggacgttgcaactccgcagtggctctggggattttccgaggagcaaacggcgaggcctttgagaagcgaaggccgggagagagccggcggaacttcccaaaagtttgtcagagcagaaagaggtgactttcgcgggggcgttctgtcggatgcacgcaaacgcgttccgacaggctcgacatgggattccgcggaaagtccttttctgagaaacgagcgaaaaaaatcaaaaacgcagaaatgtcgattaggacgcggaaaaaaacagccgaaaaacgtttgcgacacatgcacactttcccgacatacaacgcgaagaaaaggcacttttgcggcgacagcagtcagcagtcttcatggctttgcttttttttcttcctcgctagagcgagggacgcggccggactctgtggagtcggggggtcattgctggacttccgataacgctcttgtggatatttctcggaactgaactggagctcctcgtctccggcgtcgtccgcgcgactcaaagtcacagtctcctcggaggcactcacgacggagaaccgaccgcaggactgtcgggaagtcaggtttttggctttttcctcggcgaagcaaaacacaaggaatttgtggctgcacagaggacgacagctctccggcaaacaagcctggtggatgtgggtgagcgcaggccaggagcgagaaggagcaaaaggtagccaggctgggtggatttctcttttttttgagaggaaacctgtgagaagttgccagttgaagaaaccttggcgacgatatgtggaaggtccttctttgtgaaggcctttgtcagcaagaagattcgcgatcttgtgcagcgacgccgctagggaatgtcggcgttgtctgctgtgaacgaccggggaaaaaagtgactctccaaaagtgaacagaagacatcacttccacgcatgattggagagactgcgcgaatctctgattccttccttgggcagcgaactggtttcgctgcgagagttacgaagtccaaagaaagctctgtactcgagcaaaaggtacgagagcttcctgaaagcctggtaccgacaaacgattgatttccggagtgacacagacagtgaacggtggaaggagacaaagagaaggcggaagaggtgataaaaaacgagagatggagaagcagagaacgagaaaacgatgaaggaaaaacagagtacctgtgaaatgcgagtgtccgcgaaacccaagctcgctgattgtcggctccttgctcctccctcctgttctctctccctgtcttccacctgttctttcttgttttctctccatctgttctctctccctgtcttcccgctgttctttcttgttttctctccctctgttctctctccctgtgtaccgcgtgtgtgcttcgcttgtcctcttcctcatcaagggggagcccagcaaacggatggcggaatttctgacaatcagcagtccgagagattcacacctcgctcccaaagctcttgtggagacccaattgagaaaagaccgcaatcggctgcatcaagagaaaacatttggaggcaccgctcagcctgcaatgtcgccacacttcgcttcctccatttcgctttctccatttcgctgctccacaaatgcggatttcgagtttgacgcacagccccgaggacatgcatatatacacatatatgcatgtgtatacatatatatatatatatatacacatatttatattcatatatggagagagagagttatctgtgtattcgcaagtaagtgtacctgtgcgtaactgcaggagagtgtgcaagtaataggaggcatgatgtccgcaaggacgcgtatccaggaaatggtgacttctggcctgggcaagccgacaactttggcatttctcaccccagcgcaaaatgcaactggcgaggtccagaaatgccaagaagcatgcacgcatatgtattcatagaaatatatatatatatatatatttggatgaggattttaatttgcgaatatacgaatcgatacccagcgtataaacccagtctagagagagaagcagagataggcatcattgatgcttgtacgttgtccggtatgtacctactggactctgcaattaacgaggaagttttgtccagcttctgcggagccgctgtgttcgctctttgtttttgggggtaggccattctgtttgaaatgtgtggtattttgagcgcaagaaaaaaacttcagtgcgcttcaacaaaaagtgaggtatacgacgcggttcctcgaagtaagcgtctggcttcggagagagccgttttcttcccccatcccgtcgatccctccccccgcccagcaagaagcgagaatgagcagagaggtaaactgcaggacttcgtcatgtcctctgcgtgtgcaataatgcctcttttaactctcgtcacccattggatctaggatccggtacgccagaacctcttaaattcacagtgaggttctttcgcagctgcatgcgatcgaacatcgcgagtcgccggtgtctctccgacgcggtgagtcccatgtgggatgcatgcgttttcagcgagttgaaattgtttctctttcggaagaagcaggtgcctcttccgttcctcccaggtctgattgccagtcatcctcgttttttgtcgatcgtttttgagtcgtaagcaagcggcgcagcggctcttgtcaagttccgcctttctctgccgggaaaaaggaaagcttttccgagtctgtgtgttcctgagactctgtgtgactctgaaatcttccgcttgacgccaatttcgtcgttttctgcgtcgcatgcaaaagcgcgtgccctttgaggtgtttttgtcaaagtagtttcttccgcgcatgcagagactcgcgagtttgaagattcgtcaagccgaattttttcgctggcaagttgcatgcagccccgctaggtggtgccactgggctgtttcgtgtgagtctctcccctcattcttgcgacagggacaattttgtctacgaggaacgacaggttttgcggcagaggttgtcaacgcagagatttttcaggcaaaa

SEQ ID NO: 1028 - DNA, 2177 bp, Toxoplasma gondii
  source 1..2177: mol_type = genomic DNA
tgtggtgcccgagaattttggacctgttcctcagaaatgggagaagatccgatcttaaacaagggatgcgtgttcaatcgcctgtgtgcatgtttacgcgtgaaatacccacagtatctgtgcgtgttttttggtgtagaagaggtcgcaaattcgtggatttttacaacactgcgtgagtgaacgcgtttgggggcgacgggacacgtggagagtcagagggattcgctggcctctccgtctctcagcccctccttttgtcttcggagaaaggtaaagcaggttttgggcttggaacattctgtgaaaaaagtgcatgcgcgacacttgcgtcccgcccacacgtgttgacccctacgtgggttgttggtgaggctcgcggagacagacacgaacagaagtactttcggagagtgaagactcgctcttctttggcatcattcagtgagggttctaccgcttcttaatgctgtccgagaggtgcccggacgtcgcaagaaacagccagagaacttctcttttgcgaagatggaaatgacagacgatcatcagtcgaaatgggtttgaaggtttcccagaaaagcagctgcgggaccgttgtggacttccacatgcccaaaaacaacgatgtgtgcagaaaactccctctgtctgtccgctcgaatgtgcacagatcacagctaagcaaggaatagaaaaagtaccccattgtaagtggattgccaacacacgtcatggtctacacagtgctctcattacttgtaaacggctcactttgggagagacgcccacagggtctggggtagcaagcaggttatctgagctgttgaaacatgctttttgtttcgttgcaaatacgcgtccatctaacttctcttccctgatgcttgcgaggctcgtgaggcgtgggtgagagactgcgggagcaaagtgggatattcttctgtctcggaaacaagacagttctgacttttctgggggtgtctgttctttccctcgacagtctgtatcttgcataataggagcgacacacgagtagccaaggaaatgccacggagggcatgtcaaaccagaaattctcctggatccaagagaagggacctctaaacctatttagagtcgtccgttctgtgcagattcaaagatggaggatctctacgaagtccgtttacttcccagaaactctgcttttccgcgagggtgcatccttgcacttttccccccttggtgtggaaactggggacttctctgcggcaaatctttgcatacaggcgctgtagaaaaatgtatagacgggatacatatatatgtatgtatatatatatatatgcatatatgtataggtgtatatatgtgtgcatctctataatgtgtatctgtggagcagtgcagcttcatccgttttgcactccccagtgcactttccacccagcttggtttcccttgttcagcgacgtgcctgtcgcggacggggcagcagctgagacacgcctcttggaagtgttgcttttttctagcgcagagaaggaacagatttcacgagaacttcaagaaggcggagagggaaaagtctgaggcagtcaaaaagaccaggtcttgcggctttttcgcctgcgaaaatgtgcacaccccacacagctcgaggcgcgcgagggtgcccttcggcctatagacggcgaacgcgtggtctccagttcccccccttgggtcccgcgtcgaagtttcttgggtttttcccttttctctggaacattcgggtgtctcatcgctggaaaggcgacacggcctctaaactttgacgacgttttctgctttcttcgctttttttcctctgagttggcagtggaactaccggggtcgattttggcagaagtacccaggagagtcgggagacagagtctctgtggacctgtgcgcttttctcgtcctcgatcgttttctcgtcttccctgctgcgtcgtcagtctctctctcttctctcatctttacctccgtctcttcctccctccggcaatttcctccttccgttcgctgcgcctcgtccatttgttccgttcccgaggatccagtttgagcagttgagttttttcctctgtctttgctcgtttcttctcctctgcttcctgcaagctccttctcttttccgcagcttcgttccgaccattttcccctgaaaa

SEQ ID NO: 1029 - DNA, 3024 bp, Toxoplasma gondii
  source 1..3024: mol_type = genomic DNA
aagcagctgcacacagcacagcagacactgacagccatgttgaatcggcgagagaaaggaaagagagaaacgcgagagaagagaaggagaagagggagaaaggagggagagaagacagcaagaagagaaatggaagagaaaggagagaaaagagagagaaaaaaacgcgccataaagagatgcacatctagggagggacagagaaggaaaggcagtgcgagggagagagatggaaggagagttgaagattcgtctgcccctgcactccatccctctctttgcatttctcgtgaagccaggattttccaactgtcgcgatgtcttctcgggtttccttccccgactttttttccaccttctcccgccttccaagtcgcgagttgtctggccacccgcgagcgcgagctccgaggcgaagggaactctcgctcctctttcttctcttttttttggcgacgtcttcacgaagaccagtccgacctgctggctttgccggcgtcgcgctgccactggaggaccgggtcgaggatccagaggagaatgcggctgattagaatgagagaggaagcaaggaaaagcagaaggagaagaagaaggagaagaagaagaaggcagtcacgcggatagccaccgacatgcccggtcgagagacacaagcccaagaggcggtcggcaaagtccaggaagaacagagtagccgaggcctccattgcgaagaaaagacagcgcgagggggaaggcgtagcagaacggggagagccgcgggaacagccgaagtggagaagcgaggataccgccttcttgagactcgaaggcacacaaagcagaacgcagcagcaagcgaaccgaaggcgccctccccccgtcttcaaggtttctctttcgcttggcaggaaaaggctgtgcagcgaccacggtaaagaggcgcaaacaggaaagctgagactgcgaagccgagaaagtggagcggagaggagagccaatggagaagctccgcgagggcagagggaaacgagaacggagagagagtgccccggagcatacacacagagagaggactcgagacacaaggtgaggaaaaaagaggagccccagagaaaaaaggaaagaagaaacggaaaggcgaacgactccgtgacaagttctgtcggcgccctcgcatgcgcgtagctcaccacgctgtcagttcaccaaacctcacaagaaacatgtcggagggggcaagatctgtctcggtctgtctcctgcaaattcttgtccttcttcttctgtcaatcgatccgtttcctgctcggctttttcttctcgagtgcgttcgtctctctttgcctcggatggcgcgtctggagccgctgctgtccgccggggaaaagaagccgccagagctcccgctactactgtctctcggtctctttcttgttcccccgggtgttgcctctctgtccctctctttctcttttctcgctctttctctttcctcgcttcttctctgttctcgctcttttgttcgctctctctgtcttttctcgcttcctttctcttgttctctgtcttgctctctccctcgcactcgcgctgagttcgctgtcttgctctcgttctcgttctcgggtctccgtcgcttcagcatccggtgttcctcgaacatctgagcactcgactcgtctgtcgcgccatcaacgcgacaggcagactggcctcttctctcctctctctttctcttcgccgtccatggcagcaggtgactgtcacgacggaaaggaagaggggaagagacggcgttttctctcggcagcgccgcctctcaggaggcagagagtctctccaagaaggtaggacgcggtcacaacgctccgtccagatccagcttcggttctccagcgttgcgtcgggggtctcttcgccgctccagcgtcctcttcttcggattcgcagagctccctctttctttctttccttctttccttctttctggcgtcgatttccagccgtctggttgcaaagaaagagcgagaatcggtgaaacctacctagtcgcgtcgaagtgaacatctggccgaccgtccgttctcgccgatgtagctcagtcggtagagcgcgaggctcttaacctcgtggtcgcgggttcgagccccgtcgtcggcttttcttttttctatcgtcgaggaacttcgcgtttttcgttccttctcctcccctcctctcggaaaatccttcccctgccttcgttttctgggccgcgtaacctctcacgagaaattggtgcctcttcgcgccagcctcgcgaggtcgcagtgaaaattctgccttccacgcgtctgtgcacgcattctgccgcagcaacacggagcgcagttttcttttcgttgcatgcgcatgcatctgtgaaaactgtcgggaaaacagatccccgaggagagccttgggacccgcaaaaatactcacttcgtttcgctattcgagacgcaggaaacgaggcgaaagaacggctaccgatcctgcctcgcgcggccgttgggaaaacgaggagctcgaagcctgcagctgcgaggccgactcagcgaaaggtctcttcggggggcttcaaacgcagtggtttctgcttaggttgtcctgtcttctttgtcgtcatatccttcttcggaacgacagaggggactcgcgcagcacggtgcatctctctcaggagagaggggtgcggcagaagaagagaggaaatcggccgaggagaactagaaggaaagagtggagagacatctgaagggcaaaacggagcgatacgcgactgcggagcctttttttttcttcgatttctcgcctcccaatcccaaccgttgtctcgcctcgcgtctggctcttttgcgtctgcttgcccgttccgtagccttccgtgatacgcatgttcttcgtcttctccagctgtctcctcgtcttgtcagtcgtccccttctctccgttcttcttctccctctcgttgttccttctcgtcttcctctccccgtcgtctcagtttcttccgcgcga

SEQ ID NO: 1030 - DNA, 2793 bp, Toxoplasma gondii
  source 1..2793: mol_type = genomic DNA
tttctccgccagttcgccgttccgagggattctcgacgaagtcgaagggggagagatgcagaggcgttcggcatgtctctgccgcagaaccatgggcgagtggagtgtgccggcgcccccacaggtttggcgcctgagaagacccgcgcagatgatggacggaagcctccgcgggggtggtgccaacagctgctgtggagaggagcgaagacttgcggtgatggcatcgctgcgcctccggagacactcgcgaaagcgggagagacgactcgttcgtcgtccctgagagccgcctgtcgctgcctgcgggggtcgaaaacaggcttgttcctcgtctaggaaaaagagcagaagaagcctgaacgctggccctcgacaacctcccagagcctgcctccacttgccacaggcgcggatccattggcgctgcctgtgacggttccctgcccagggaggcggcgccgccaaggaaacgcatgcagcccggtctggaagggagaaaagactccgggggacaagacagcatcgacgcaagtgcgacggctcaacaaatcgaagtgcagtcagcagttccgtcgcgccttggctgtagactgtggtcttctcgcgaggaaggacgaagagggagagagagaggacagggaggacgatggagaagcgagagagggggcgcgtcagtctagcgggggggaggggggggagcggcggcggcagggtcagacaggagcgtcgaaaacaaataagaaatcatctgcgaacgcgtcttggttggtccatgaagcgaggagctcgggaacgagggcaagacgagatgccatcaggactccctctgtccctagctcctcgtccaccgctctaaggacagagacgcccgatgtagagctctgtcttccgagagagtccccccgcccctacaggagcatcttcatatatgcgcatgcacatcgacatttatatttatacacagagggaggtgtagggagagtcagagaggtcggatgcagcagacggagagcaagtatcgcgtagttgtggttcccgttggcagcagtgcgcagcgagaaagcgaaggtaatcttgcaaaggacggtcacctggagttcgagaagcaagacggaagagcattgcggtctcgagcgagagcggaaaacaccgacagcaaaacggatgtcttccggttcgttgggccgttccgagcagacacaccagagggacttccgtaccagacaggttcgcgcgtggatttcccgatcgcaagttctgcacgcaactcatgtagaaagaagtagcagcgtaggccgatcgatgctgaagtcgaagaagcgcggaatttctcagagcccatgaagactcccgaaaagggtctctctgcgtagcagaccatgaacttgggtcgatctcggagttgaaagggagtccggcttccaaggagtgcacttcaaaaaacgagacgagacttccagaacagagtccagcgtttcaactcccgacggttttcacgggaaagcggccactctttgggcttgcagacatcgcgaacagatcgcatctaccgatcggacagaggcaggaattccgatgtgtgttgtcgtggcgaatgcctcgaagcggctccccagttgcttcgctaaaaaagagaacgacctgtttcctctcagacccaaggtggactgttcgataaagctctcgcccgataaaagtgggtctggccgtgcaccgaggcagagggggaaaccgagagaggcagagaggaccgcggaaactccgcagagaggaaaaacacagaggaacgctaagcgttgcgagaagcagaaatcagctgcgatgcatgtacatttacgccggggaacattcttctggcagactcccagctgcggacagactcagaagacacacacttgcgtgtgcttttcttgttcgcgccctccttttctcagcaccattttcctgtccgtcgcctttgcaccttgactcgctcccgccgttgcctttccatagacggcgtctgtcgacgacgagaggagagaaaacgcgaaggcgaggggacaaaggtagcgaaaggagaaatttcacagactggagtgaatctgtggtaaggttgtcttggcagaaaccagcgtccggcaaacgcgtgccacacagctaatctggaacggcgcagttgacagcctacccagttcgagtggagcaggcccagagaagcgagtgaccaaacaaccgatggaaaggcagtctgaatctcaatgacgctcaagcaatttccgctcttcacagtgaaatcgatacgtcgacttctcgttctctctcgcctcggccgtccgttcggggcgggcaacagaggaatttcctcactccagcctctttagctcagtcggtagagcgccagccttttaagctggtggtcaggggttcgagccccctaggaggctctatgccttttttctgctcaacttgtctcgtttgtgtctgcagtttggtgggattgtgttttccctgtttcctccggtctgtagctcttgccagctgaagacagtgatcagcctgagtggaatttactttcctttgaccttcgatacggggtccgccggagaccctcttcttcctttttagactggcgacgagctactgagtgcgtagggaaatgacaatccaaaccctcaactgtccgccgggccataaagtagaatgtggagtagaatagaattccttttttgcgtaaaaatgcgtggaaacctgactttcgattcgggctacagatagtatggtagcgaaaaaaagatcgctttcgatcag

SEQ ID NO: 1031 - DNA, 4538 bp, Toxoplasma gondii
  source 1..4538: mol_type = genomic DNA
gttgctcgcatggccgtcgaaaacggcgtaaagcgacatgtcttgcgcgaaagccggcagcgcctctttgctttctcgagacccggactgtgcaagttcctcgagagtcttggcggccgcaggcgaagcagtccgaagagacggcgtcgcgatgtgagcgtcttccatcgtctgtcgccatccctgcatcgaggcggcaccgaagcaggtgatcgtgcgaccctcttctccaccttcttccgagaccttctgggtcttaggtttcgccagatacgctcccatcttcgcgcagcctttgaaagcgcggagacgtccgaggaactctcgctcggcggtgatcacgcagatgcagggtgtacacagacaccgtctgaggcgcggagcgggaggagagcgcggagaggagactgcgacggaagatgtcaggcgggagacagagaccgttccgaaaagagaacggcggcggacgaactgaagaacacccaggcgggagaactgacttcagagaaacgacgagtttgctgacggggaagagacgggggaacaaaaggttcggtggaagctgatgcgagtggcgctcaacgcttgggttccgcgagacaggcgaaacggcatgaagcctgcagggcgttgagccgccaaaaggacagcaaaaaaccggagagaactcagaggctctgaagtcgcaagtctttttctccaggaaggaacgcgcagagacgcggtggaagcggaaaggccaggtcctaggcgactggggactgtttaccggaaacaagaaaagagtttgaccttccccgcggagtcagttcgggagaggccgcgaaacagagacaacgcgcgccaccgaaaaacagatcgcgttctgacaaaaacgtggaacggcgagtttctctctcagatcgtcggcgctcggagaagtctccgtgctcagatagtcacggttccgcacacgagtcggcagccgacgcaaaccacgcgttcctcctctcaagggcagatgatcccgggctgcaaaggcgggcgtttccctctacaaattcacggggaacgcgaggggcgggaccgtccgcagaacgaacggagcggaggcagaaaaatgcagagaaactaggacggacgggagcgccctgggctgtgtagatggggcgggcgcacggtgggagttctggagagagcgactggctgcgaaaaggcgattcccgagagaaacccccgaaaaagtctgggaactggaacgcgcgacggacagggggaggagtttgtcgcctgcagagaacgcaagaaaagggccgacgaagggagaccggaatgaggaacggggagacaagagaacggggaaacaggagaaaaggcgaagacaagccagcgcggtccctacgctctcgcggagggtcgaacgaaaacgggaaaaagatgttcgccaggtttcgtagaagcgcgagaaccaggcgcggggaaaagagttctgggaagggcagcacgaaagtgcgattgtggaaagaacgcggtgccgcagaaaacacggatcaaccgggaaaacgctctgtcgcacgtggtgattttacacgacctttttgccccggcgctccgggaagttcagggctttccgggacggccaggaacccccgaacacgccgccgagaggggaagacaagaagacggtacagcataaggctttttcgcgatgcaaccgcatctccccctcttgaacaaggccgcacgctggacgttaccccccgttttaattggaaaacgattgtcgtcgcgttgcccctatccctatgttagccgaagtcgcagtcctcgcgtcgtttcgctctccttccgcacaaactcagacccctgaaaggcgcccgaaaaatcgagacaccgggaaaaaaacctcttccgcgacatttccctgaatatcagacagaccaagccggtttgtgcaggaattcatgcggtacaattatcccaccacccttctacccgctgtaggagggtcgccacacggacttgtgcgtcgctcctaacaaaggggcggaaacagcctttctgccgggcttcgacggagaaaggttacgttttcgacgtcttccgggcaacttttccactttcgagtgtctctgtagttgggagactgtgggggaaggtacgtttttgggggggagacggtaaatccaggtagtttgacgcagcagccgtgtaggcctgaggggagggtgtgccacacagaggaacctgaagcagagaagggagcagaaactcgaagggacgcggaagactaaatctggagcacatgatcgtgaattgccgtacagctgatacagctgtgtcagaggggacgatccagcaatgcccgctccggcacactcgggaaatcgacacaagctaaacaggaaaggcggaaatctggacggattacgtcttagtccgcagattgtacttcgaagatgcactccatctatctgaaaagcgtaggttgcgaaattctgcccgcctctagattgcgtctgggaatttgcagtccacttcgttaccccctgtgcaaacaccgtcccactcacactgaacaacgcagaaacgtcacgggcagcgcattcgtcggtcgtattctgctaggctgttaaacggttgaacaggaggtccatcggatttgtcctgtcagtaaacgcggaaagacttgttactgacgacagagcccccgtaattcgcaggcgaaccgtctaaggcaaggatcgaacatgcttcgctaagcagagaagaaccgaatcgatattcaccgtagtagccgtacacatgcactatgcacgttgaacgacaaagtttctcaatcacattttgtgctctgggcgatccactgtatcgtggaagctccggcagaacgttacttcgatagtcacgacaaccaccgaagatatcactccaacgaggactgacgtctctaaccatgttgaagaatggacgtgggtggctaccactttgcctgtacgtctttcctcccatccgacctctaccgcgcttaggatagcgtctgcagtatgttacagaagctgctgcaactttggattgatgacagaacaccgtgcaggtgtgtacgctcgaagagcgaaaagtctggactttccaccatcattgtcatctactcttagaactgctgatgtccgaatacgatggagttgatgaaggagtccgcgtacagaaacaccgtgcagcgcacaagaggggagcggacaatgtgagaagtagtcatcaatacgcgttcttcctcgattcaggcagtctccctagcacctcgtgcacacttctcaaaacgcaatctacgtttaccgggaggaaataaaaggaaagaggcaggaagctgtcgcctgtccagcgtagcaatcactggaaacaaccgagagcgctggatactactgccgaaaagtgtgtcttgctctagctgagtactcgggaatcggacagtcaaaacttccccaaaaatggatccttttcttttcgagtctacgtcacgattgtgacacacgccactctgcaggcgtgatttctgatctgcagtgccctgtgaacaactcattcgcgctctgtcctaaccacctcttccctacccagcaaactcgttgagtagcgttctgctctctgatcgcgccatggatccctggtccctacgttccacccattcaccagagttctttgaatcttcaaaatgaagtcaacaaacgacgcaaagcacagtgtaacagtgaatcggacggtccgccctcggaagcaactctttcagaatgtagcgaggggcctccgatccgactcgagatgtgtcagcatacagagtcaccccgtttgttgaaatgccgtaggtacagattaacagaatacatacgcaatgtatagtatgccgtggatctctaaatctctacccgagggcctgctgtgcgaatgtgtcgcgtcgtttaaaactgaacgtggaaaccgttttcgtgcgatcccagttactcggcggcgtctgaagtgtgtccctcttctccacttcaagactgggacgggaacgagagttggacgaccactggaagcgggcgctcgaattttctaaagttggcctcgggtgttcgtccggtatctcgcagcagatgacgcagcactccccgctgtttaaggaactggaatcttgaactgtgcccctctaacatcgcaccgtctctgcgcaccgtcgctgttccgcgactcccgtcagagcgatatcgcgttgcgtcacgtcatcgttattcggtttttgttcgggaaaatggcagcagcgggacgaacacactgggtagtgtccacgccgcttccgtcccacctgcgaaggtgcgtccaccacaactcacgcgactaggtgctgcggctgcgaattcgcgttcccacactcgaccagatttttttgattttcgatttccaaacgcgatttattccaatccgccttgtagcagactaaccggtgcacttttgcacgtgtacgcaagacagcttcgcagacaacatctggcagcctcccgctcatttttagtcagcaaaaa

SEQ ID NO: 1032 - DNA, 4062 bp, Toxoplasma gondii
  source 1..4062: mol_type = genomic DNA
caacttacgtgctgtctctaagtcgcttggtgcggagtacttccagccggtagtctttccaccgcagaggatcatcgtatcgtgcatcttgcagtgaagccacagaagggcttgttgacattccggaggaagggacttgggatcagtgtgccagcctgccaggcagaaacgacagaagtacacaacgccagaggaaaattgggatccagtccgatgttgtttttattactttatacaactatcactgtctctcattattacgcgagcggttaatttgcaagtttgatccgtggacgtagccgtggttgctgaagctgatgatcgtcgggggcacaaaaatatgtcacggttaatttgtgatagctcctcagcaatagggaaggaaatccgtctgactctgaagagaatgtaaactatattctggataaataaatggcttaaactgcatgacgtttgatacagggactcaggtggctcaatcgcctgtcagaatatctgagtggcacagcagattctggcggtatatgcacagctatgcagtctgttcggaccgcttgtcaccggagtaaactcgctttccacgttttccacgaaaaatacgaccgagtatccaagtttggtgtctagaggcttgttacgttccgtcactatccccgcgttgaacggggtcttccttcccagtcattaaagagggctttgttttgtgctggggatgctcaccctgtttaagggacacgtccttgagaactgcaagctgttgtcggtatgggggagggagcgacgtgtctacgagaccctcgaaaggcgcgtacagtagatatactgtgtgccacacgctgtacacaacaaaccgaacatagggagaataacacagatggctgaagcgtctgaacaaccatcactgtactacatttgttgcgcgacacacgctgcagtattttgaacggttccctctgaaccgaaactgaattccgccgtgacggttcctcgcttttggtgggaaacaccggtcctgattccgttgattttgtcccggttcgcatgccaacaagtacagtggttccgattgagtgtgtcagtgccgaaattgaagatgtgtagtctctctcttggtgcgatcaatctgtctgtggaacgtctgatatctcaacgcgggttcttcaggaacttatcagactgactgcttttcaccaatgtggtgtctggtttaagcattactcgactgtggcagcagggcaaccgaaaggaggtagactcgtcttgaactggctcgtctccacctctagcatcttcgagcaagccccaatgggggctgttgtctccgcatcttgaactccaccttgaagcgcagcgcctcctcgtagcacaggcccaccgacagtgactgatttctcgtaattcaccttcaccactgggctctctgaggaagaggacatggttgcggtctcctgccgccgaatccagttcaaagatgggcctccttcagacaggaaggaacttcgagaaccggcgtgctcagtcaccagtctgtcgcgggaaataaatgacggtgcgcgggatctacttccggagcgtgccacttgatgctggagagcggctttctcggctgatcgggaggaacgtggaaacagaacggggtcaccgggtaacagtgagtcgaagcagtttgagggtaagacaaaaatggaaacaaggaagcacattgccgcaagtagagctgacgtttctcgcagcgatacgagagaaagacgccgatgtttcccgacagacttcatggcggttatcctagtatcggcaaatgctgttgtcccgtgagaggagcagtgctgttgatgatcaacagcctcttctcaaacaaccgttacagtagaaccacactcttgagaacatcgaccggagaggaaagtgtgcgagacacaaccgcctccggcgattagatactttctccaatggattctcgcctcggacaggacataacctgattaagtgtcgcgaagtcaatagtcgcaaatccacaactgaaaagtgcctgttatgcaaaatgcttatctgttgtctacttgagaagtaggacggcacagccgagtccctcacggtgtgaaccgctctgagttccagtcgggcataactggcgacggcgtgttgtcgccggacgaatcggagaagacagcattattgacgtcgccggtgaggatcaagggctcaggaagaaacccttcagcttagcatttgggtgcatataacagaaaggtgaccgttttggtggaaaaggggtgtttttggtggaaaagcggtgattcagccgaatctcgagtgcaagccgccggcgggcaagacactatgtctctgcaaacggctagccaagtaagggggcacttgacatgccagaaggctcaccagtcctaaatcagtgaaaatacactctgggtcacttctccaaggagcttgcctggtgagacacactgcagaatgtgtaaataacaacctgtactaagtagacatcggtggaaagaggatctttgcatgggacggcagccacgccactcacgtgaccaccggtcacagacgcttgttccacagaagctgaactgcgagaaaaagggatttcgcttttgggtggaggttgccggacgcatgagttttcacgagtttcatcgttattgatatttcattggcatgttgatgacgtaaatgcaagcaaaccaccggttttggatggaattacttttcattttcaccacttgtattctgccttgctcccacttaggaattatatacgaacagtacgctgtgggtacaatgatattttgactgtcgaagcggcttagtgtgtcagtcaaagacactcccaccggctttactcgtgttgccgtggtttctcagggggagccttgctccaaagcattatgcctttccaaaacagtcctaaagcgagttgaatacaccttgtttttgtgtttgacttgatgtaccctgggatccagaggactgcgggactaccgagtaaggatcttagcgcctgtagtaacagccatcttcattgtcgtagcacagccgcgaaggttggtcatgtatccagtggcaccgagtttacacaaagccagcgtacggaatgttgtcgccggcagtgatgctgtcagcaagattccccatcaacgcccaggatttgcgtcaaagaagtttattttcacggtactataactggctactaccggccgagcagtgtggagagacgagagcaaagtcgtcagtataaactccaaaccgatcttaatcgtgcaagcaacacttgaagcaccaacaggacaaggcgccacctgaggaaagtgtgatgctcggcagagtgtggcgcctctcgcagccccaacagttttggttgctttgtatggaaacgcttcttgctgctccgacagcacgctgagtgtggcaccttttgtgtttgccccacacgctattgctggggatgcataacttacaaatatcttcaacaagcatatgcacgaaaggcacgaaattggtgacaccggaaggttgctcgtgtacttgcaagaaacggctttgcagatgcatcacaaccttccgtcccgtgatgtatgctgcgcaagtcatacttgttcgttaaaagcgtgtcgttgaccacgcaaacgtgagacagaggtctaagataagttttacctcagaattcccctccatctgtgccgtaaccctcctcaaaaaggcggccacgttttttgcagatgcacgacaccaccgtcttcggtcgaatcgttttccacgttttctcggtcagaagccattttcggcttaaatgccgtccgcccagccgtgttcgaggattctgtagcatctggatcctggaaaataatggaacgaatatgaaaacgattatttttgtttggaacaatgtggtgtctcgtcgaaccctcatctacagtcagcctttcttttcgactggaagtttgacgggttcacgatgatctgcagcaaatgagctgacgctgacacgcgcaccggtggcgttccttcttcttccagtccctccgcctgcaacccctttggcca

SEQ ID NO: 1033 - DNA, 2703 bp, Toxoplasma gondii
  source 1..2703: mol_type = genomic DNA
gaggagaaacgtatcctacagaaagtggcgtgcgacggcgaactcacccgctcctctgctaaccttttcgccttttcctcctcctctgcttctcgccgtagacgatcttcatactgttttcgatgcatcgacctgtagtcgtccaacgcagcatccacggatttgcggatttcttctcccgtctctccggcaagactctcctcctctcgccttcccgaggctccttcagcctcgggtctgctggcagcgtcagcagagttcatttcgtttacaattaacttgcgggcaacagcggttttttagtctcgaaatcgcatggttcccaaacgacccccaggtcgctgacagatttgccttggtcaaaccggcgaggtgccttttgtccagctgtcaccacctcttcacttcaaagtccacctagtgaaagcgcagcgcggtatccccaccgggagcaattcactggaaacttctacggaaactaagcgagcaacctcagttgccagaaaacacggctggttcgcagacggagtcgagaacaaacacacgccggggtgcccctaggaaacgtagaatacacacaacccgcaccgggctgaagcgggcattgatttgtatcatgaatgtagcggggagaaaaatctgagccttgcagttaggcgtccgcagggcgtctacgttcggtggagtaaagacgctcgaatgcacaaaaaaattgcgacacgcagaagacacaacgctgtaaattatcctcacgcgagacaagaccgatctgtcgaaagtaaaagctgaaacaggaccggcacggatgcggaaaccaacctcgatacgtgccttgtgtgagactgcgctgcagaacgctgttgcccaaagtggacaggatgacacgtcactcgtcaaggaacccgttttgtaggatatgcgttgacgatccgacggtatccattgacgctccgaaggtctttttctggatatcaaacggggactactgagcagcaagccgcactccggattaggccgggaagactacggtagcattcccctgtcttcatgagggggaacagtccaaggtacggcagcatatcgccgcaggccgaagttcacatcgcaaatagtgctgcggaaaacccagctcgaagacggttagatgttctagacgttcagaggcgccgcaatttcgggccgactacagtaaaagagacaatggacgctgcgttgacgtaggggtggctctctgcagctcctacagcatctgactacaccgttcagcctgctccgtcttttcttcaaacgaaaaaacggattcgaggttaagacacggcgtcggggaccccgtttccgcgccgtgcatatatcctgcaaagtcggtgttcctatgcgagacgggtgttagtcggtgcttcgcggcggaccgggaagacaactcttgaggaggcaagcgaaagaacgcgcgttgccttacaatacagatcgtcctgacagaacaagcaaaagtagtttctgcctacaaggaattccagccttgttgccggacacgcgtgcttttttctcagcgttccgagcacagtgcacacgcagcctctgtaggcggccacgcatgtgccgcggagagtcactgttccggttttgtcgacagctgctcgtagttttgagaaaacgtgaggaagaagggcttgcgtgactccagtcttctttctaaaggtcctgtgcggtatcgtatgtcgtgtgtatgcttcataaacgtagatctgtaactgtggtgcgcttctgtcttcccagcggcggctcgttgcgctgtgactttcgctggattttttccaacttaccgcttcgacctctccccaaggggggcgcttccgacccaagtttcactcgtctccacgcgggagtttttttttcgtggactcgagtgcttttggtcacagtccttttttgttaaacggggaaaactgaagtcggagttggacgaagcctgtcgcagctgcagaccagctgatttcgctgcgcttgcgagacaccaagcaagtttttacgaatgcgtctggagtacatctaactgttgtttgtacgctctttgtggatactgcggacgaacttttcacctgtgaacatccaacgagaggtatcatgtcgatttttaagggaccttcccggtcaaaagcggcatcgacactccatcgaaagatcgaggcgccagcagcgaactcgctgccccagcctcgagtgtgttttacaaggaaggattttcttttctcgtgaaggagcgaagacccaaaatgcgccaaacctcactctgtcagaaacgctgttttcaaacgcctgcgcgtttgccgtttcgcggtcgctttcgtggtctgttggtcgtcaattccgtagaagttgtatggatttccgcatttgttattcgtatatcgggaataaactgcctccagacactcttacctcggctcacgtatcaaaaaccaggaagctacgaaaggagctgagagcggggcagaacggggaaccggggtaagttcttgattgcaagatattttagggattctttcgtccaccgcacacgacatttttcgcgagccgcgaactctcccagcttctctccttcctgctttcccgtgtttgcgccctcgctcatttcctatataacaccggagccgcgaagaaacgcagcctgtaaagtgcgagtctgcggacgttctgggcaga

SEQ ID NO: 1034 - DNA, 4519 bp, Toxoplasma gondii
  source 1..4519: mol_type = genomic DNA
actgcttctgcttgggaaacgtcggcgtcttctccctttctacttgcgcccgtgtctcctgtggtccgccccggcgtggtgtctcctccaggctcaagcggcgaggcctgtggctccgcattctctctggggaagccagcagaaaccgccgaggtattctgaggactggccgaaagccgttcctcgctgccaaggagtgagtcttctcttgcacttccccccgaatccttttctgcgttcggcagcggaagctccctcgaggacgaaacagtctggggagcggcggtgggcctcagctgaaaaggagagaccttcgcggacttcgttttcaagtgagaaagcgggaggttcgtcggacgagaggcccccgcgaggcctctcgagtgtgtgcaccccatccacccgctgacgaggggagacgaggacgcgagctttcttatctgtcgactttggcatacatagtagcttccaggagatgcgtctaccccaaacaaagcatgcggagaaacagtgttttctaacgtggacgggaacgccccagctccagctcttcagtctggtgggtgctgcgtcctcagactccgttgcacagggttgacgaccctcacacagagaaaccgacagggaagcagaagaaggaaaactttcctccacaaaagtgtcgtttttcaggcgttgacagtgcgctgagaggcagaaagcgccaccgcggaagcggaagagacgaggacaaagagaaagagggagaagacgacgaggagatggagagaaaggaagaccaggagggctttcgacagacgcttgtggtcaacgaaaaaactagtttctgtgaaacaaaggtccacctcccgaagagacaaaggtgaagaagcaggaaacgggagattcagagtctcgatcagaagtcagggcactgcacgcgcgcaggcgagaacggagaagacgatccggatagcctttagagaaagggaggaagccagagggaatgaagacagtttctataagaggctatattggagagctcctgaagagtaaggcgaatgtgttccggcgaggacgaggcgggagacggagttcagagatcgaaaggagcgaaaacacgatggagagaagttgggaagcatgcaagtgaaactgcctcccctcgaaagaggcaggagacacgggaagaagcttgtggagacaggaggaacctccagattgagtgcggagacagaaacgggacgctccacacagcgggagttgcggccaagaggttgcagttgagagggaagtgtataggtttcgttgccatgaaaggcgcagaattcaacggaaacaaatgcgcaaaagtcgggtgggcacaaaggtgagaaaagcaggaaatcgaactggagaaaaagccacgcgcacttttctcgctctgttgccggtgtctagtcgcgcacgcgtagagcccatctatcgtctggggctcgaggcgagagagtcgaaaatcacacttttgaaatcgaaaacagaggaactgtcgccgtcaactcgagaacggagagaagttggcgactgggtttttagcggcacaaaaaccggaagcgtcagagtttacgtcccgtgcatcttctccgtgtctcctagaccgcccgcgtaggaaagaagactgacgtctcaggggcatggatactcagcagggatgacacctgcggcactcgacctcggcatgcagtttttgccgagccgccttttggaagcctgcgatgcggagtccacggggggtccgggtccgggagtcgttttctggaaaaaatgcgaaaatgcagaactcggaaagtagctggtggctgtcggtgtccctggtggagcgctgcggcgggcggtaaaagcaaagacaggactgtttgtcgacacttttcataccccgcctaggcccagcgccgatgttcacttccctgctcgcttgagacctcctctcagcatccgtcacagaaggcgtgaggggtggatgttgcactgatctttgcatgtctatcaggcgaaagaggcctgaagcggaggaaaaaaaggtaaaaacccagtcttcgccagcaggttttctaaccgcagctcgacaggctgctgatcttgagaggagggggtgaggtgggcgaattcggcagcggggggtacaccatgtagaacttgagtcgactggggacgcgcgtctctccttcgttttctcttctgttctgaagcagtcgcgcatgtgatcctgcatccatgtggatacgcgcctctctgcgtagccccatctggagatcgacacgctgaggtacactttcgtgtgtcggatgcggggtactgggttattatgtcggcaggcgagtgtcctcagacgttgcgcgtgagcaagagatttgcacacaagatcctgcactatagacacggcgatacacctgggcgtgtaccgaaagccacatctcgtgtagccatcagttttcgttatctcaggtgttcagcttgtaaacaggtagataggtttccacacaaatctgcagacaggaagcgtgcacgcatgtgctgacagacaaacagaagagtcggtgacaaatggtgagtctgagaaaatcccagcagccgataacaactacgggcacatgttcacgaagtacggcattccaaaggacccctcaggaaagaagtttctgacttcgtgagcctggtttgcgatcgaaagcactatttcattcgtactccacgctcaatctgacgacacatattcctttatgatcccagacgttggccagtgaagaacgacgcaccagcgatgagagaatcgtcagctctcaatcttttgtcgatatgcgctttctcgtgccggcagtgtacctgagtacccataactcaccctaatcgtctcactgatcctctggcaccttaccgctcctgctttcttcagagtcccggttttgtctgtatcacggtgtccatccttgcaccgtattgcttgttttctttgcttcggtatcttcctgttcctgcgcctgtgttgcatcattccaagcaagcttggtctcctggcagttcgtcaaataaatgtcgcacttctgttgtcgcagattgttccttccatctgggtacctccggcacacgattctgtccgattgaaatgcacaccgcttcagagctcgatcgctcccgtgatgtgtcacactgctgcctagttgaaaaatgcacatgcagaagtcaggggaaggccaacttgcaagcaaacgacagttgtttcgtgcgggtggaattgtggagaggcaatttcttctctcgaaggaaactggataaccaggctgcccgccgggagggaacccaggtaatgccatttttgcggaccgacagagcgggggctggaagttaagggaggaacgaactgctgatagaaaggcgtatgatactagccttcttctccaggtcgtctactgagcttctagactccagcaccacagctaacaaccggctttggtcctcgagaggtgagtttccgcagtacgagagcggtagccttcacctccttaacaaaaccgtggtgctgaaatacgaaaggtctgtgaagtcgtccaacaatagagtgtaggcaggtgcaccaatcttgctcggcaaaccggctctttctgttaacggggcaccgcttctgaacagcctgctcctgccttagcggagacaagaatatcctattttcgttgtcttccctgttttaggcggttggcatagccgcctgaaccgactcagctctaaagaccggcggcagtctctcaacacaaatttttcctaaggtttgtcaccaaactctgtacgctgaaatgctgttctgaaggacggtagtctggccgttgtgttttcctcaaatgtgtttctccccctaacgttttgtgttttaatgttgaaccgaatgtcagcagggatcaaagggttctgggatagacagatgccagaaaagaagacgcgacgctcagctcaaagacaaccgtggctgttcgcagggtgctccatgtctcatgtagcactctgtcaattctttgtacctcaacttctctggtctcacacaaactgtgtgatagtaggttacagacattctacttaaaattaactggctctgcaaaccctgaagctgtatataccgcgctgaaaagctgtttgtatttgtccggagacgcgttgcgctcccccatttccgacgctgtttgtcgtgttgtcgatgccagtgtctcagcggcagcgtcaaccccacatgcgggggtttcttgcgggcagtgtctgcgtctgtctgtctcggcaacctgcatgagtctgtttttttgagcctggggacgcagcgttttgttcagtgtatatcttgtttcttttctcgtaattgactcccgcttgcactgattccttcccggttttctccgacgtcgtctctagcctcgttcgtccccacgcccttctcgtcgccccaaagtgctcgcgccgcgtcgtggatagctctgggacagttgcaaagaagtacgcttttgtgttggcgacgaaaaga

SEQ ID NO: 1035 - DNA, 2416 bp, Toxoplasma gondii
  source 1..2416: mol_type = genomic DNA
gaagaaggacaagaaacctgaggaaaacgggagcggagtgggtcaagacagacgagagaaattggcaaaaaagggagagacgaaagcgtacacagaggagagaagaaagaggagaacaagcaaccgagcagaaggaagagcagtgaagaccagagaaacagaagagaagagcaatgaaaatgctgaagagaaaacgccatggctcgtagaagaaggaacagttactccaagagagaaggaggagttcagtccgacgaactgtcaaactcaccctctgatagacaagacttccgtgtttgttgttgatgaagagagaatacatctttctcaagcgaggcgtacttcggcctgcgagaggcacggagaagaagagttgaacttggcgagaagaaaacagcagagggaaaaggctgtcagaatatccacggggaactccgaggggacggaggcgaagaggggagacttcctgctccgagagaaacttccttcagagagccgacgaatctcgaagaaagtcacgacgcgaagaagacatcggaaaaaaagtgaacgccagcgaaagacgcagaagcatgcgagagcgcctcccactgcgaaaacgacggaggaaaagagaagttgcgcggcctctcctgccctttcctccgcataaaacttctttcttctttcttttcgaatcttttttcaccgtcctctctcgtaagagaagaaaggaaggccctcagacgcctatgggagaagggagagagagaacaagagagagagagcagggggagaacaagagagaaagagcagggggagaacaaaagagagaaagagcaaggggagaacaagagagagaaagagcaaggggagaacaagagggaagacaagagaaagaagaaaaggtgacgaggcagaagtctttgtcttgcagatttggcgacggagtgacagttggtgtctgggggctttgaagaaaatgtcgagacgaagtgcgtctaggccaaagtcgcgaggcgagcttcgcctgccctgcgaagcttttttctcgaggcagatatcgagaaaaaacggaggaaaaatcagttgggaactgcatgcgaaaatcgcttctcgtttgaggcaagccccgccaggcgagcgagtccagaggagtgcagcgaccgtggacctggagctcagagagggaaaagcgggaggctttgtttcctcggtttttgtgaagcgtctcggcgcgagactggaagagaacctcgaaagcctccttttgcttttcccaagctcgcatcgggcttcgcgatgcgacacacacacgcacaagatttcttttttcccccgtacaaagagaaaactccttctttttgtcgtctgaaacgcggcattccgcgcttctctcctcgcctccggtcttcttccggttgcgctcccgctgtttcacccgctgtccacgctgttcataggtaacaccttgacgaaagtttgcctcgcattgacttttgaattcccccttcctcaagttcctcccatcattccttcgtcttcgtcgtctctccagcctttcggcgacctcgcgctgcctttttctcgcttcttctctcctcagactcaaacgcagccgtcgcagcgcgctcgagcgagagatagaggtctcgcgccgctgggtccccggccgctgatacggaagccgataaggacggcgagggccggaggagagaagcagaaaggtcgactgtgcctcgccagaagaggagaagaagaggagagaaaaaccgagacagagacagaagaacagctcgtgtctctgattcgcggagtgccactggggaaagcgagacaggtcaacaagcgaaagcgaacaggcgtctctcgcgggattgacacacaaaaacagagtggaaaaatcgagctcgaagacagagacttccctccttctcattctcgcggttcttgagaaaaacgaaacaacgacttcactcgaaacgcaaaaaaaaagacaccggaaacctatgtgtgagtggctactctcagacgaggacgagacccccgaggagaagaagccacagggccgtttctctcccgtttccttgctctcgttcgtttcctcctttcttcttctccacgctcaactcttttcagttctcttccttgcgctgcgtttcgcagtttctacatccacgggggcattttcatgtgccaggctctgctcgcatctgcaacgtcaacgcactcgccaggatctagccttgagagagaattccttcctctcacgtttttgactctccctgcttcttctctcactcctctcgatcggacctctgctcgtcttccatcttctccttctgtctttgcagtttctctcttcttctcccgcaatctccagctgtctcccctcccaccgtacctccctcgcttctcttcttccggctccccacga

SEQ ID NO: 1036 - DNA, 3685 bp, Toxoplasma gondii
  source 1..3685: mol_type = genomic DNA
ttcttcataaggacctgaaagttctccacggccttcacgacatcttggagaagtctgtccaccaggcgcgtattgacggggtcgaacttctcggtgtactgcagagacagcaactgcaagcgtactcgctgaaaagccacaaattcgtcggctgcctgcgagtgcggaccctctcctgagcaagaagatgaagacgaggaagcagacgacgaagacgaagaagaacaagcagaagaagaacaagcagaagaagagcaagcagaagaagagggaaggacggcggaggactggatgagttgcggtggaaaaggcgagaagccagcgtcgtttttcggagagtagcggcagaggaagtcagcgccagtcccagcgtgagggccaggtgtacatacactcgagtagctgtctgcacgggatgcgggcaagtcgtgtcgcgagcgaaggagacacggtcccaaagggaacttcagtttgccgttctcgtcgtcttcgtttctcggatgtccggcggtttctcttgaagacttgttgaaagaagaaacgcgcgttgtatcccttctccccttttctccttctccttcttctccttcttcttctccttcctcgccttctctgtcttcctccgtctctgcctctgtctggtgcacccgtttccttgcatcttctgcggttgcacacgggggcgagcctgcggcgtcttcctcccagagcgcgcgcgctcggagacgcaggcaggacctgtttccggcctctctgctcagagccttcacttctgtgtgtcgatgagaagtgcggcaggagacgggggcgggaccgggcctgtagaagagcgtgccgctgttgccgaggggctcaggcggctgtggaacgaaggagagaggaggagtcgagtacgcgcctccgcgtgagggcattttgaagtcgcagcatgcagagagagaaagagaggcaggagaagcaggagaggcaggcagagctgcgcgacgaagacgagggacggaaggcgagaggaacctgagcagttgcggcgggcgcgcgccgcgcagactcgcgctgacgtcctccttgcagagtcgtcaggacggctcggcgtccggtgtacgtacacccgaggccgcagacgcgggaggagacatcgacgcagcggaagtgtggaggagagtggagacggggagcgcagcttcctcggcaaatgaagaagttccaaggagaaaagcgacgagcgcgcgcggcgacgcaacgctgttcttcttcactcttcttcaccgcagtgtctcccttcttttagtggcgcaagtcttctctggcgggcacacccggcgagtgtggcgatttcccgagagaaaagtctcgttcgagaaagaaatgcggagaaagcagcgcgttctcactaaaggcgtccgcagcgttcccagaaaaagaaagctgcgtgcgtctgcagaggggcggacctactgtgcgcggcgtctgctctttttctctgcttctacgagctcgagaaaacggcggggacgcgagaaacaggcggagagaggaagaagaaaattcgtcggtctctacaggcagcgaaagggaaggaggaagtgcgttctgctcgcgcgggacagagaaattcacgcaagcgagcaagcgaagaaaggggggtgcgaatcgtgtgtcttgtcaagtgcgtgtcgaacgcggcttctgcgtttctcactttttctcctactctttttctgccgccgtgtttcaggggggcatctctgcatgtagggaagacggcaacggcagcgtgagaactgccgctgtcttcttcgacggcagtctgcaactctttctgcttctggaggggaggccctctccctttccggggcgtctcccgttctcgcttttctcccctggctcctcggacgtccggtatctctccgtttctccctctttgcttctccctctgtgcttctctcctctctcttccctggctttctttctgggtggctctcctgctgctgttcgggtcgtcgcgtcgtcggtgccgcctgccggtgcctcgctgcacgacggtgagtcttcgtctcctcgcagaggggatgagatgctgagactgaaagagacagaggctgtgctgctggcagtcaagtgctgcggctttgactctgagtgcgtcgagaggcgaactgtgggcagctgcctgtcggggtctctctccaacgcatccactgagtttaattccaaaagaactgtgctcccgctaatgagcatcctgtcgtcagtcaccacagcgacgctttctctacctgtcagagacaactgaagctagacgccttgtcacacatagtcgtgtggacttgcctgttttccgcgttccagctaagggtcttctctgggccagcttatcgccgcccgttcggctctcaactgaacgacacgcggcaggaaagcctcttttcttcctctctctgactgtcagagtatgcagcgaagtccgatgggtgccgtctttgtcgctgctccttcgtgctactaaaaaaaagtagagagcttctctcaagacttccatgcggtgtacatacaccccaactgacacccctggttcggggatttaggtatctttgctttcaagtttcctgccagctttttgcctgcttctttgtgcagtgtgtgacacagcatccagcaagacagcatgtgtttagagtagaacctctttcaacacagagtggcagtttcgtgtagagactggtgtctcgcgctctcaacaagaagaggcagagcgaccttccctgtgagaacttgtcgccgagcctttcaataatttgtcgggaggctttacaacgaagctctcccgtctaatctacgggttttttcggtggctcggataaaaccatttctctgctgttcgtgctgggggaattctttctcctaagaagatccaccagcaaagccgtggagaaccgagcccggcaaccgtgtgcggtgtcccccagagaaaacgcagtcgttcagtgaagggcagcaatctctgtcttccgcaaaagcgatcgccgacgaagatgcaaacattttctctcaaaaaacgcgtccggaaaaagccgacgacggggctcgaacccgcgaccacgaggttaagagcctcgcgctctaccgactgagctacatcggcgagagtcccatcgtgcctcctctggattttcgtagctgtcctggtgttatgttttctccgagctgacgtgctctttttgtgagcgttgctttgctaacgagcacttagaggacagaaacgtcacctggaactggactctttagtatctcgaacgcctttgctggctgtcagggaggtgtacagtccccgcatccctcagacgtcaggtacgcagttcaccgacacaaagaccatgattgtggcggctgcatctctctagatgtgatgccagtgctgtgagtgtcgagttctattcggagtcgctattcggcgctttcaggtagtaggggtttgacaagtcccgcatgacgtgaagtccagtggagttccacatgctttgctcatgaatcagcatgttctttcatttgtgtccccacgcagctcgcatgtcctctgtgactgagaaaagacccgatatcctgtgtttctgcgattctttctttggcagttagaaagtctgtttggaacctttctccgagttctcgcgtgtgtggtgggtatctg

SEQ ID NO: 1037 - DNA, 1714 bp, Toxoplasma gondii
  source 1..1714: mol_type = genomic DNA
gaattctcagcctggtaccgccgctttcgaaactatcctcaaaacccgctgtaccttcagaactcatgcatctccctctgtacagacacacgtgtgagaatgtacattcctattcacatattcgcagacataggtctacatctcggcatgtctgtatctctatatatctacatctatatgtctatatgtatgtttatgtatatatgtatgtgcatgtgtatgcttgatgtgccaagcagtaccttttatttaggattcgagtacacattgggtgggagggagtgttggctgagggaagtgagcgtggaagcgacttcgagactcttgtgaagagcttttgtcctgatttttcaaggcagtgcggaacgcatgcgaacgaggagaacgtcgcctgcggaaaaagatacgtgtcagttctcgtcgatgttgaaggcagacggtcgcatgtttttcaggagagagagtggaagccgtgtgtatcgaacagcgtgctagcaaaaaaaagaatggaagaaaaaactgaacctggagagcagagctcgcaagcagaagacacaaaggagcgacagagaagcgcagagaggcacctggtgtggcaggagtgtcactgagggagagtcggccgaccccctcggctttcttgagcaatgcctctcgacgaagaaagacaggaaaggcttgcaaaggagacaaatccgaacggcctctgaaaaactttagtccgttctttggtggatcgagcgacgcggtcggcacagcggaaaacgcggcagggtccccgcagataaaagaagaacgagaggacagccgcgagcagagaatggagaaggaaaaaggagcaccaacgatggaaagacacatagagagaagcagagaggaaaagtcagagaacaggggacgagcgagaggaggaaaagaaagagacacggaaacaaagagagaaagagagagaaacgtccatctgctagggagggtcgtgtgtatcttcgctctacgagccccgagactcactgcagtcgagttgtgcggaggaggacagcgatcgatgtcgaccgccttcctgagctcccgagaagctgcagaacccccatgatccaataagcagaagacctcctgacggctcgaagcttgagtaaagagctacttttagctcgagacagagtgtgtgtcagtatgatctgtctgagaagagatcccgtgtaaaaacgaaacgagaaatccaccgcatgtgcatgcgcttactgcatgccgtgtgaaaagcttagaaaggattttctttcttcctcaaatgtgcgcaagaaaaagtgagactgtgctgtggcaaacagccagtcgtgaagaggcttcttctctttccgctaggggcgaagcagctctccttgtcttgccccccttcccaaatctgctcgccgtctctgcagctcttccactttcaacgttgacgcgcggaagaaaattgtccgcttttttcctcgccgtgttcacatttttcgaggtcttcacccgcctcaaacaagtgaaacagacccgagccttttcgtcatggcgctgcagggaaggaacgcgatcttttcctcgtctcgtcctgtatccgtctccagctaaactctccgctttttgtctctattctgcgtctgcttctcttcaccacacctctgtgtctctcgtcacttctcaattgctctctcgtccaaaactccctctactgccgcca

SEQ ID NO: 1038 - DNA, 1639 bp, Toxoplasma gondii
  source 1..1639: mol_type = genomic DNA
gagtcgaacaagcttcgaaaactctcagacacactgatagagagttgtcgttgacggacaaggagagccagcgtacttcatctttggagtactgacagtcgaggtctgcagctgtgtcttcgtgatcttctgcctgcggagaggagccttctcctgcccatttctccacgaatctaacttcttgctcctgtttgaaacagacgcgcttcgccactgcgccgcccggcggctgttctctctccggctgttccatgtttcgacttcttgccgaagacatacgagcgggagagcgccgacgttcaagctcgagagaagcgcgaagggagagcacagacgacgcggacagagggtggacagaaagcagacaggagctgagtacggtcggcagtgcgaggacgaccagttcttcgcctcgagcgagaaaagcagggatggaagacaacagcagacggacgaaggcgagccggaagaacgcaggccgtgagcgcggaggatgagcaggaagcgagacggagaaggacaggaaagaaggaggaaggtttccacatccacagcgaagagtggaagcagacagcttctctctcgctgtcgggcagagacagagtcgtcaggcggtactctcaaggtcgtacaaaaaatacgaaactcctctcgcgacccaggcagggagaggaagagagttcgaagacgcaaaaagggatgctttcgcaggaagcgcctccgacgactgcgaacggcgagtggaaagcaaggcgaatccgcggtagttctacacttcagctgtgaacgactttgttctgacaatcagcaggactacgcttgacgcgtcctccgccatcgacgtcgggcagggcacacagggaaaggagagaagagatggagagcggagacgagagctccgttgacggtgaaaaacgaaacagagagaaaatggacgagagaaactgcgagagcaacaacattcctcgtcgggagaaggtcctttctcagagaccaacgcttttccctgacatgtttctcaagctcgaacctcagggaaacgcatgctgtggcgaaagtcctcaacgcgtttttttcgtctccgttttagacaggagagtctccgcgactctttttcttttcagagaggggggagcttccagaagttgtgttgcctttcttctcggcaggagaacgcgttgcgaaacctgcatgcgaaatccagtgacttttcggtggcgcaagagacggaggaggaacagacacccagttccagcttcctaggttctctgcgaacagcgagttcagagtggatgtcctgtgcctccatcttttttttgaaggagagctttttgcgaggaaaagaagacgcgcccctccgatgtttcgtccttcgtcttggcacatttttgcaaaagtccctcgctctctggcggagttcccggagtttttcctgtttccatttcttcacccgtcgttctttcttctttcctcgcagagttcttgacaaaacgcgtccgccttcccccgctctctccgttgtgccctcagatgcaggcgcgcgttcgctgggcttccgtggacccccggagaaggcgttgatgagtggctgcgaaaaatagactttttccgacgttttcaccgtgtgaacaggcggcca

SEQ ID NO: 1039 - DNA, 4317 bp, Toxoplasma gondii
  source 1..4317: mol_type = genomic DNA
aaaactgggtgtctttgcggtcgttcacgccctccaactgcagcaaagagcaggacgggtactggttgaccttggatctgcagagacaccacacagcgggaccacaccacctgagacggctgcaagcatctctgagtctcggatggaaattcacagctcagaacaaagtgagggtgttccctcgacacaacgtcatcggccgccgcatgtcgacagcggcccagaggccagtgctctccagcagacggcttcaagtgatgcaaagtctctagtgcttggatccttaggctgtttcctatttgaccaggaaaggcgtcgctgtcgacgaaaatgagtcacgtgaacgacgggacttgttgccgcctcgcttgagacacatcgaagcgcgtcacacgccatgatgccccaatacacctgcaggtccgccaacttccaaactagagagattcgtcagcgttgaacttttctttgacagtggatcttgaatggggtgaacacagattactgtggaggtcctgacaccccgcgacgcgagtgtataggctaccactactttgtcaggccaggacattattccaccgcgattgcggcaggtagcttgaaaagcatacagggcgggagctgcagtcagccttctgacgggtggatactcaggaaacagagacgaaggtacacgaggagagagggcagtcaggcacagacagatatgctaggttcgtggaccctgaaggtatggcatgtatagattccaggttcgaacggccattgacgtcgcctgctgttttccgagggaacatggacagaaacctccgtcccccgcattacaagaaaaagtcgaaagacactcgtagttcgtttctgcaggagactgcgctctgggcaagtcagccgctcgcccccacagcctcaagaaaatcaaggaaattcactatccgaccgcgttgccgcaggcccacaaagcaggtccgacagacgagtttgtggcctcccacatgtcagagaagagaaaacgaggaccttcgtccgtgtcaacaagcaaattcgcatgccgcgttcaccgtaaaaacttgtggagcaagaaaaacgtaccttttgtatccgagcacaatcccccgcacatacagccgcacgggctgcttcgttcctgacttcttcatcctcgcgacaagagatggcacacttaaccacaaggaaaaaagaaggaaaaatgtaacaagagcctgaatcgcgggacttcccgtctcctcgcaggccagaccagtctccgcttcagcaaatgccacgtgtcgatcgaaaacgggtctacttcgctccgctgcaacagacgagtcccccccccctgagaggccgccacagtcatcccactggatcgccttatcgacgggcgcatgtcttcgtccgaacagaaagtggcgtaattgaacaaaattggagaaaacgtgcagcccgggtgcgtgcgagtttcgcagaagtcagcctcgcactgcacatccgaaaaacgagaaaaaatgagcatcgcatttgtgtgggacaaagcgagagacgtccaccagctgcttccacatcttacaaagcccctgttcccccactgtttaggccacttgattttgatctttcttccaaagaattgcttgtatggaagtgtagggacggtgaagctgcgaccagggttgctaacgggacattgccgagacattccctgtcggcttaatcatagttcctcgaaccggcccatcagccaattcccggggaatcctccggtaatttcgctatttccgtgggaacggtggtatatttgatcctctcacctagggaaccgcaggaaaatcgagcctgagggaacgttgaaagcagacatgggcgggcgggctctaagcttcagttgccgacactccgggatctataccttcactaactgggagttacccacagatgagcgggaagagtctgcaagagctggagttgcttcatgacgagatttgactctgtaggcattggtagccccctttatctggattccgcgtactggtggcagatctcgtgctcaagggagcgagtcgccggcttaacaggaacgaaaacgcacgcgtcgattcacgcacaccgaaacctctaaacacgaactgagctcagttcgtgaattactctgcgccatcagtcaagaggcttacggcgagcgcgagtctcttcacaattatggcgcagtgcataaagtgcgcgacatcggaacaagccgtggcgacgatgcgtcattcaacattcggtcgcacgtattgttgtgagaggcaacctcagcgtctgcccattggtttgtgtctctagatttgttgccggcgcgaatagcagccagagtgaaagatatgctgctgtgtccgctcgtaacgtcgatagacttgtgctgcctatcggtttgccatacgcgtcagtactcgtacgagtgtggcctgattcgggagcatacccactcagcgccttgcctgtaacattctacggggtatctcggactccgtcgtgaaaccctcgggttattgtgcttaccgactgtccatcctcaaaaatcatgtaacaacttgattttctttggaaggatcggacgcttctcgcagcgaaaaacaaaagggcactgcgcatcggataccactgaatcagccttccgacactcgttccggtaatggctgcaaggtcttgcttctcaagacagatattttacaggttggcaagcactctcgaccccctgtacgacttacgggagtgcccctgtgctggtactatccgccccgtaacctgttcacattatgaagtggcctgctgagtcgggtcgcctaggatgtcgttctccccacttcagaaagttcacagtatgtgccattccagataaagggggctgccgatgtctacaaagtcactctatctgcatggatcaactccagatggttcgtagtcttccctctcatctgtgggtatctcccagtgagtgaaggtacagatcctgtagtgctggcaagtgcgttcccacgacggggatacggacagaagttgcccactcgaccagtttctcgcctcagccaaagcaacagtcgtctcacagagagcgagctgcacctcatttcgtcttgcagttttgtttaccggcaacgggtcgtgtgaccgtccgctctcaatccctcacctccggtcccccgtatgcagagtcaaatagccaacagtctgtcctacaagcatgacaagatcggttatttgtgcacccatttctaaatgccatctaccatacaaaaaaatcatgtgggtgaaacgaaacagtacagtgtgtgtccgtagggtctcttcgtccgacgggcagccagcaccgtcgcatacgagcacgcccactagaaagccgcatatacttgtgagctacaaggtgagcaataaagcgtgtccctgtttctccgtttcatagtcaattatgggtaagtctttgttgatgccgacgaaagaaactgcgccactcgcccggaaaactttgtagatccggcgaggcaagccacaacacagcagccggcctggccggttcaaagtgcaaattctggagcatttggcttggtgagtgggagaaatgtcaattcatggactccatttctgccatctgtgtcggataccaaagatctcggacactggaaaacgtgtttatttgttacggcacctagtccgtcgttgctgcgatggcagacaacttggttttgatcccaacctgtgctattggcggcttgattaatgatggcgtttatttatcgctagaatagaaaggctgttcctgtctaacgcgcacatgagcatgctttgggcttcagggtaaatgaagttaaattgctctcctcagtccccgcgttgaccgggttcttgccatttcccgcgctcgtttattgttgtaacacacaaaccgctagtgcttgccggtggtaagctgcgcgccagagggagggcgcgtcgagaatgtggcgttacatacaggctgctgctgtcagctacgctgctcgcgaaaactgtggtggttttggtgacggctcattcaaaatccgctcttctctgtccaccccggagtgcagcggtatacccactgtgcgtgcgtgcggctcttttctgaaaaattcacatgaactggaaatccctttttctgtgagcgcgcgcggattctgggctcggaaagctttcggattttcacattcggtgtttcttgtccgggggtgttctcctggccccgatagtggtggtggttagcgtacacatacacttctcacatttccgttccagaaaactcctctttttttacaaacaaaa

SEQ ID NO: 1040 - DNA, 1689 bp, Toxoplasma gondii
  source 1..1689: mol_type = genomic DNA
ctttatcccgttctgagtcgttgttgacgcagagatggcggcatatctgcgcttctgcgcgtaaaaaaacggaagcctctcttgagaagtttgcgcgccgccgcttgcgagcgtgtcgtgtttgggtgccttggactcgcttaccgtctggtgtctggacagcacagttgattgcggcatgcgggcatccggtggtagatcagttggtgaagaaagtcgcagaattcgcccttcatgcacatgcctttccaccagtgtctgcagacaactgtgtgttttccccactggcgtccgctcacgcagtcggccctggagatgccctgctcgttcagcaggcgaccctcctcttgcttttgctgctccagagaaggctcgaaagaaaactggaacctctggtcagtgaccgaggcgggcgccggagacgcagaagacggagagagcgcagagacccgagaagacgcaggccgcgaactcgtggaaccgagaaagtcctgcagtattttccgcttccttcgtcttcggggcgccgacgcggcggaagctgaagaggcgagcggcagaagcgcgtgcgcctgcacagagagggcgaggccaggcgaagcgaaggagctgaatggatagctcggaggaagaactggtggaacaaaggaagcagacgcggccccgctgggaccgacgggggggagagacatcgccaggaaacagcggcgaggaaaaataagcttgtgagtgaacggccggccacaacgcaaaagaagcgccggcgagagagatctgaatcgaccccgtctccgtcaaaaaagcttgtcaagggcctcacatggccgtgaggaaaggggagcgacaagaaggcgaaccacaaggtaaacggcagcggaagacagacgcagaaaaaagacggatccacgcctctgaagagaaaaacagcgaactacaaggaagcacaggcggctgcagaagaggacgcgcagggaacgggagacagaagagaagaacggagtaagcgacgaagaagcgaagtaagaaaaagagacgggaaacccggaaagcgcgcaagagacaaaggaagaagtcgcgcggggatagaaacgggtgaggagcagagaggaacaatgggaagacagcgcagcgaagagacccaacggaagaggtcctatgcgcaggtagtggtcttgggaggagatccaaagagtgattgactgtggtactctgtctggaaaaagtcaaggaacgccattaaagttagacaactcatgaaagaaacacgatggacaacggaaatgggacagcacggaaagctgagagcatgcaacacatgaaattcgcatgttcacgtgaaccggcacttccatccttgtgttccgttcttctcctgcgttctctttccgctctgttgcttctctctgttttcgttgtcctgcgcaacgcttctgtatggtgtcgcccaacgagggagagagaccgccttcttctgtttgctacttcctttccgtgtgccctcagcctcaaccgcgttccctctcgctctcctcgtctccgtcgtcctcgctcatcgtcgcggcgccgtccaaaagcagccgttcgctgtccctgagaagaaaacaagaaacggtctctttcccttccgtttcgtctccgcctgcaacggttgcaggtggtctggcgtcttcgcaggtctcttctctcaca

SEQ ID NO: 1041 - DNA, 3035 bp, Toxoplasma gondii
  source 1..3035: mol_type = genomic DNA
aagcctgacagttctgctccaacattttcgaggatgcaatgcaaacatctttttgtgtgggtactgaagatctgggcctcacttgccgcgaaggagttcgctaccgactgaccgactatcagggggctagctacaagtgctggatttcgatattcgacgatgtcgaggttattccacatcgtttatgttccaggcggaatacgtggattattatcactcgtatcaacagtggctgccattgcgaggaaacgcgtgaggaacagaccatctattagaggatttgtctcttgttcctggcctgtgccccatgcttgcgaggatgcgagtaacaacgcacacatttgttttgtggcccaggaggaattcttcggtgaccaaaagacacttaagtttcacgtctttgcaccaccgtcgccggcaccttttttaaacagaggagccgtcgtaaccgcagaccgaaacgcggacctaccatttggcacaccttcattcggtccttttctcgagctgacacgggagagactcaattatgccatcgaatgatgttaactagtttctgatgcactgaactcgactcgttgtttctcactaaacaaagggatttttaggttcatgtaaactaccactttctggcctttgacacagaccaaaaaaggcggttcgtcgagccatcccgacaagctgttgctttgacaaatctcgattatcgtttttagcaaatcaaaattgcaagcaacagttgtcaaatagcaatccgacaaactgtttgaggacgtacatcactggcttcgtacgccgtggtgggcagacacgaaccgtaccaaggtatagcccaaagcttgtttgcggttcttctatcgtgcagttcatgatcaaagtgaagatacagtttcgttgttctgtttgggctccccgtgaaaaagcgacacgtgacggcgagcttgccggtcgcaccgttacaagttggcatccactacgattgaaaagcttccttctcacgggttcgtcacattgagttagcggagatagtgacgcccagatgttttgctattttctgatgttgcatcgttcaaagacaacaccaccacacaatatgtccagtccagccgcttccttgactttttctttcacgtgggaggcacggaaggcatcttcaattcagggaccatagactatctccgagatccgcagaaacaggctcatactgcttcacttccatgtcgagtgatcgtgttgacgcaacgtaccaaggattcggtggcactacaacatagggctaagctgtcgttagagacttcttgcatcgttgcagggaccgaaaggaaacttctctgcaagcttttctcagctgctgcccacaggattcttgctccgggattcaaatggccaagactacgcgctacgaatctgcttttcctgtcatggcacaacgcacccagtgtggctacgtcataaattacttccactagcattcttgtcccgtacctccctcgcgggtggcactcatcgaagcaacagccaacaccgaagattcttccgcctcttccattgatctgttactctccccatctcccggcgaagctagcttttacggtcggtgtgcaccttctgtacagcccagctactttcaataatcaaatggtgaccacggggaccttcgccgctgcctgcagatatttgtgacgttgttttgtccacctggaagactagaaaacaaagctggactttcgtcgaatttagttccataagccagtcattccttttactaaacgttcagaatctagactgtaacgtgctaggttttttcacgactgcatcggcgtcaaatgcccctgcatcgacaacttactgccattttccctcttcaagaatgcgaaagacgtgctgacaacacactcaggcgctgtgcctctccctgagaaatgcgcgtgagttctcaagaaccacggacaaagactttagggacctgcatcgcgcgtgaaccgtacgactcctgaagaagaactgcaaacgaaagaaaaggcgttgcaaagcgtatgccgacaagcaaatggactgatcagtgcgagggaggagtcgcgattctctcctacggaagtggtttcaacggatgctcttaaaagcaagtgaactttccgctgaaaggagccacaagaaatgccacagcgactgaagacgagagacacaacccccagttgtgtctgcagggggcacatgctgccgtgtcttcggaggggagggtccagctgactaggaagacgctagacgtcggagatgctgtcgagctgttgcggtgttttcttgattctgagctgttcattttctctgatgttctgtgtggtagatccatcgcaaggcattttgatttaccgttcgttacccggtggcgactttgatcctccttgatttcgagtgcagcacatcgcgcagtgcgtttcaagtcgcgttctctggggggtagtatcggtggacgtcgaggcgagaaccgctttaccgcgagccgaaggctgcgaagacttttttttcactatcttcttcggttcctcgttttttccagcaagctcactttttcgccggcacattttttcttactttccccggtactcgctggaacttctgaaaacgcactggtgggtcgatagatcagttcttgccgcttgcagacctgcagtgaacccgttttctcgtgttcctctccgcttctctgcactctcactcgcattttctgttttattcttctcacgcagtgacaagcctgactttcgtttcccttgtccagcctcgaagacccccaaactctccagtcgctcctcttccccgccgatttatgaaggctcgtacaacgggactgctgcagtcaaagacgaaccagttgatccccgcgagttttccgtcagctctcccgaagttcggtcgttcctaccgtgtgtgaataaacgtcatttttcggcctcttaatttctctggcgagaccgttcgcgtttcaatcatgccacgcgcctaaaggatttcgcggaaccttccatgcagcacca

SEQ ID NO: 1042 - DNA, 3841 bp, Toxoplasma gondii
  source 1..3841: mol_type = genomic DNA
aagcgaggcagtggtggactttttggagagcggagaaagccgcaaaaggcccgctggccttgtcgctttcgcgctggtcggaggcgactgaaacgagactctggaggcgaggaagcgacagacgagaaagcagaagaagaggatggacgcacggcagcagaggaaatcgtggaagaccgcagaaaagaggaagaggaggaggaagaagtctggaccgaggagaagagcacgagagaaggatgagggaagggagacgaagaaagtgagagaggagatcgaggccagtcgaataggccgaacctccgcgatctcacgattcttcgttttctcgcagaggagatcgttttgcctctcgggagagaaaagctgtccaaagaggagaccccaagggtccgacttgccagcggatggacagcagccatggctgtgtcgcttcgccgccgactggaattctgggcttcactcgaagcttctttttcttgatgacggctttccgcgaggaaggacgatacttctttcagagtccgtaaaagcaggcaacaaaggggagaaaagcgtaaaaaggagtaaaggctttgttgtttctcgccagtgagcttccgtctgagctcaccgcgcgctggaactcgaattcagagttgccagccaggcagctgtgtagtcctcggtttgcggacttggacaacgaggtgaagggatcctgggtcctgcgcctcagacgccgagcgctgtagaaaaaccacagatgttgcccgacaaggagagaggaaaggaagaaacgatccgcgcaagtgggcgaccaacgaggaggcgcgcatctgacgcccgcaagacgaaaaaccggaaagaagcggggaaaggagtcgcacggggaagggggaaaaagtgaacgaatgtgcatgtgcagagaggccctgaaaatttttcttcgcggacaccgccaatggagaggtcgcggaggctctgtttgctctgcttgctgttcgtaactttctccgcggctcgtgactcaaaacagaaattcatttcgcaacctgcgctgtcgaggcggactgcctctccccctcgacagagcgcctggctgagagactccgcgattttcagcggtttcaacagaatagccgtttttcctttgggcgagaggaagactttgtcggaaaactcccgattccgccgagtcgacgcatgcgcgctgttgcatgccttttctgtgaagtagtcatgcgagcgggcgggcaagcggccgcctttccggtgtgtacagggggctctgcaactcgcgttccatccggaaacagcactgtgtggtggaggtttcccagtttttttctcgagattcacttctgcagtggatcacgttcgccttgcttcacgattgccaaggcgaagacaacagcgggtcgtctcgggattccgagtcacgcaggtgaccgtgcgcacaggactccaacgcagtcgacacaagcggggaacgccgagggcaggccgtagggttccacgtcaaagaatcctttatttagacagcactggttcgacgtcctctgagacgagggaaagaaaagtttcgaggtgtggaggaaaacaacttggacgggaaccagctggagcgccaacatctcgcagtagagagggcgcacagcagctggtacggagccgagcaaccacggcggcgcccagaacggtgtttccaacatgaatttgtgagagacatcggcggcagtttcctttcccagccgcaaagaataaccgacacaggtccgctgcgacatgaaagtcgagctcgagtttgaagtctcgatgggtcaccgacgagccttggactgccgcggcgcgtgcacagcgttcccccggcaacgggtccgggtgaaagagtctgtgcgaacgggagatgtcgaacgttccacggcccagcctttccgtcccgggaaatgtactccagactgagtggcacagttcagtggcaatagacgggggttttatgtcttgtgtgtctgtgtttcccggatgcaagggagacttgtgctttccgtgcgcatcgggtgaggcgcagtaagacttgtggtatcccgcgcaagcttgagaagatccagcacttcagtctgagttgtgcaaggctcacgatattcacttggcgagtctctttgctaatcagtccgacagcaacagaaggcagccgatggaggcggcacacaaaggcttagacccagaggggaggcacgataccgcggcgacaaagtgcaggtcacgtgacgcgttccagactgtggtctgacaattgctaagagcacacatcacggagaggaaagcagcgatctgcttaagtgcgtcgagttccatgcgcggcaacgttttctggcaattccggtggtcgtcggtggacacattcgtggtatacggacatctggaattgtcgaagtcgaatatcagcctgagccgtgaaggccatcgctggactgaacgttctatgtacttagtggctctctgaagaaaacgaatcctctgatgtacgtccaaggagttcgaccctttgaaatctgcgaaaggaactgtctcctagcaaacagaagttttctatccggtctcggatgatttggcaagcctgttttccacgagtttgtaacgtccagttcacaggtgcgaacaagcacttcggtttgcccgtgactcttctacaaagttacggccaccatgtcgtgctcaatccgtcgaccagtcgcactcgtcgtcgacactccccagcaacagctgaacaggagaacttcctgtcgccgcgagagcttctttcgcgagcgggtacacccgcgttcgttagaacgtcacgtctctgcacttttggaggctacgtcggagacgcgtttatcagaaacatccgcttctactaggttctgtacggcagttggtcacccttcactcgttctcagcggaaagaaacctgcacgcacctcgctgcggttaagtgcgtggcattcctctgtgcaggaaacgtcatccgtggaaaagaggccttctggggtctgagaattggggtaagctgtttcaggagagtggtacttctttgctgaatcgttcaaaatcgctctcgacgcgggactcttgaaaatggttacgattcgcggcattttgtttcggggaatggctcgctgaaggggtgacggctggctggtctggacctgccagcgcgttttaagtccgtcgagttttgcatccgaaaacgagtttatggcgtgcaagccttgtttgtccttttcatttgagcgcagttttgcgctcgtccgcggaaatagcgcaagtggcgagggaaactcaccgcgcgtgccgcaaaatgtgcaagttccacatgcatcacggccagaacacacagcgcacggcgcggagtggcgggcgagacaggtcacttggacatgttttcgctcgcgagaaaagccatttctcatcaggcgtgtcggtgtgcggttttttgagtttttcgtggcaacttctgctgggctcggttgcgtccagagaagtctctgtctgcagtgcgagtttcgtggcagtgacgtccgcttctccagattcccgtcacggctccgcgcatttccgacgaaaatgtcaccggggccgcgtttgcgtgcttccgtgtcttcccctgtgcttgtcgatttttcaaactgtctgcggacgttcccttgccgcttgcagtgagctgcactcccagacccagttccagctgcgcttctctgccagcgacgcggcgtcgccttcgttttttttcacccgtccaacccactcgcgtcagcggctgtcgcgcaggttcccagtcccgcttcctctgtatgtcggcggtttccgtttgggtcca

SEQ ID NO: 1043 - DNA, 2820 bp, Toxoplasma gondii
  source 1..2820: mol_type = genomic DNA
cgtttcttcggctggcatttgccgcttcgaagaagatgcttcctttctcccagtttcaggttctctgaaaggctctggatggttcgagacggttatgtctcttcacggttttggggaaagaggtggacattttaagtgtaccttggataccacaactctgctcattgtactgaaagtcggacttgaatcaggtaagccaacgtcttcatctctaagtcaggagtcctcgttgtgcacatcctcgttggttccgacgcctgctgtttctggctacctcaagccttcgaggacagtgcccggcctccgttctcagcttgcggagagtctgaagcagtcgtggctgttcctgtacggtccacatacagcgcgaaagattcgtcgaattccagggtctatggaaagttgcacacacagcaccggcttgatacacacacagggaggaccgttcctccgcttgttggctttaaaatggtggttggcctgaaaacagattcatcgcggtaggaacgtccccggggggcacgcgagtctgattgcgggactgcttttttgcccgaatagattctcccgttgttcgttcaaaaccggcactgagaatcgaaacgatcgtcgctggatcacggatttttcccgtcacaccgtcagtagacatggtcttggtcgatcgctcgacagaccccgtttctcataggacggtaggttcctgccagtgttcttcgctggactcgtttcctcgttgttttctgatgcgggactgcacggcagagagcctctgggtcatcttccagttagtgactgtcgacattcatccttgctcggcagagcacacgatcctttcgtctacaacgtatcttgcctttcatatggtgtgctatcataggtctatctatcttgactctgtcagatcgagaaaagcagaaaacagcagctgcttccttggttcgagaacaggagaaatatacacacagaaagtttcacttctttgtcatattttataccaatccaacacattcgatgaaaagcggagcggacaatttggaacaccgatagatgctgctgcaatctgaacagtgaaaacttgctgaataacactgaaaaagatttctatttcacaacctgttttagtaacactggcagagtgcctttccgatttacctaataggacaatcttacaccgtcgttcccgttggccagtctctgccttggttggcgcattagagaaacggcgtgaaaaaaagtctctgcacgtgcaatagcgacctttcaacacgacacgaacaagttcgagcctgcaactctggtggatctgctgcgccttagcggattctggtgacgcttatcgaaatgctttgcggctttctgtttgagtgtatcacattcgggttttctttgtcgctaaacggctacgttcttgagataatcaacgggaaatcgtcatgaaaatagagtgcgtgcaccgtgtacgcccactttcacaagttctgttgtctgccgtgagagcgaggttgatcatgctttacctgaagcagactacactacaacttgcacagacacactctgatgtgatgcctacatgaatgccatccaaacagtctcactgcacacgtttttggccaagataaaacatcgagaatgcgacgcggggtctgtcaggttcgagcggatactgctcgctagcagacaaaacaagtagacagagaacttaacagccaaagtttgagaacgcctgcatggacgtagatgtgtatttgatatgcgtaaaaactcctatagatctattgcgacagactcttaccattgcctcggcgatttgtgcaaacgtttcgatgaattcggaaacaccaaccgagaaaacggggagtaaacatttatcgatcagctgctgttctggataaagtcgtcctcgcttgaggcacacagttgctcgttgcaggggcttctcgtttcccatctttgcttttcccatcgactaatcgcactgtttttgtttcgtcgaaggcaagcgacatccaattcgtctactagtaattcgttccaaatacgaggttcctgccttttttgcgcattgtttttcgctttttcatccttacggtggtcctcacgtgacggaaccggtctgcgcctccggtgcattgtttttgagaatgtttttgactcgatctttggaagcgccagttccgctacttcgtcctgcctcttgaaggtttttctactttttgttttggtaatgtacacgttggagctcccacccgctggcgtcgtcgcaactcaaatccgataaaaaaccacctttttgactctcgcgtttggaacgaatcggcagagaatgaagctcacttgctgaattgcttgtcttactggaagagagaaaattcttttccttggctttgattctcatgcttttgcaaactcgccactctacatatgtggaagcgacgggggtctcgaatcgacattttctgtcggatatagtgggttttcttgactttttgccacttcgttatcgtatctcttgtcaactttttttcgttgcacttggctgcgaagcatgcggggtcacactgccggaattggctctcccatcgaccagccacatcaagcacgtcgttgacttggggaaaaaatttcacctatttctgctgcaaccaagagggcagatacggagggtgcgcaaatccgagacagccaaacgcggcaatgtctagtaggtaaacgcccagagttgttgaaacggcgcccccgattgcggaccccaaagaatagccttccgtacgtcggttcgatccaggaaaaccttagtggagccacgagaagggaaga

SEQ ID NO: 1044 - DNA, 3794 bp, Toxoplasma gondii
  source 1..3794: mol_type = genomic DNA
cgtatcgagcagacgaaatgctgcggatgaaaggcctgaaagatggactcgacatcggcactgacatcgatgacaaagacgtcggagacgtcgaggaggaggacgaagatgatttcggctaaggcttgaactgacaaaggcgctttcttatttttttgcggggcgaggttatgttaaaggacggaaactggcgagaggggtgtttcagctcgaatagaagtggacaaatacatgcacacgaatgcgcgaggtcaacggggtggaattcagagtgaagggaacatgccggaatggagttaattccaaaccggggacgacatgcaagcggttgatttcgcttttcacagacggggctgcgttggtttgatggactcttggtttttgtggctgaatcacgtttttgtgtggtggttctcgtcaattgccgaggccggaaacccccgggttttttccccgctggacttgttgcccgtgtccccccggtgagactgctccaaacgacactataaacactggaaaggtgaagcgcgacagtttggattgcaaagcgaaatatccctgtttaactcgttcactagaagtcggtgttctaagctgtgccagctgatccaaaatcgtgtagtcttttgtcgtgttcgggtgctaagatgtgtacggatccacccggaatgcgagcgaccgatcgggacccatggctaaaaacacagattgatcaccgaagaatgctcgaaatgaatacataagagtagacaacgtttgacagagtacaccgaaacgcgacactgagagtcactccatccagaatccgcgttttgttcttttctgtgccatccgtcactagtctaggattactgtatgaggttcgacctttgaacgcctgagtgttcattcgtcctgggtttcccaccttccagggagtgtggggtcgtcttttccgaacggaaactactcagtgaatgttgcatgttgctttctcagccaaagcgattttcgcgtacacagggctggtgggtttttggcgtagaagaggtgctttaccatgaacaaatctttgaaaagctacattggaattgcatgcagtttctgttaaacagatattatatgcgttgctatacagaacgaacaaagtcccacctgcaatcacacgaacgcgaagctagagacctacgggcaagaaattgcaatcgtccaattcggattcaacactcgacgcacgaccatgtcgatatccactcaatagatgtcaaacaaccggtcagagcttttgccgccgaaacgtgttaaaacaagcgtgcagttatacatacccctatgtttagatttgcatatttatgaatacagcatgccaatttagagacttgcaaaacgcggttgttgcccatatctgatcggcggcaccacaggtcacatgtgtctcactgttgaacccaccgctaaatgcaaatttggaagagacaagcgtttcagtgtcttgtgagtaggaaccattaattcgaaaaacaacaagctttgtctctcatatcgtgactgtagcagacatacaatcacggatactttatggttatgtacagcatatcccacatgtactaaagcctccaagctgttgcaccgaggcctaggttttcccgggggaaattgcctctctaacgttagcaaaatgtccgtgaacgactatcctcattgttctagctctgacgaatcaaacctccgtagatgctattgcttgttttgggcttgccggaaaaaatctggcagtcacgtcaacgcgcccccgcttctagttttctgtgtgtggagtgaaactgacaatcatttgtcgtgtcttgttgctcacgtgggcaagtggctctgccatagccacacttaggatgagggtattacgggacttgtgccattcgatcagaacagatctgatcacttccgtggaaagtgccgttgccatatgcttgtcctcgttattgtgtgttggcttttctcgataaacaataaaagcaaacactcgacgagtcacgctaggaaaaaaacctcttggtcgctgacggtcttgctcaagtttagctaacccggtgcacttcctcttacataatatctggaaactgttgtggtgtttactgttgttttactgtttcggtccgcgtagaaaaaatatcaatccttgaaaccacaagtctctacttttccctttaaactttgttccacgaatgtggggtactacgtggtttgacttctgactggtgtcacggatgatttccaaagttctgtttgattcagcgatacggtcaaacaactgtcggaatgctaacatgtcatttcttgcctgcggtgcagaggcggaaatcctttctggaggcagccggagaaggataactcttcgtgtctcccaactccactgtaggagttctctatatccgtcgaactcctatggaaagtggggtcggtggcgtatacgtgcagtcttctttgtatggggcggccgatggcagcagctctctgtttggtgtgtccgtgaaaaatcgggacgctgtgggaccgaaaaatttgtcaccaatcgtctcagcatgcagacttttcagctgtctcgttattggttgctagacaaagaaacaacaaggcttaatcgctgtgacgcttgttcaaattcatattccgagctgctgcacggggataccctcagggagcagccggtggcttttttcagtcaacgtctctagaacacgtgttcgccctcaaagcatatttccactctcaccttctagtcaaaccagcaataatcatgaacgcatctgcagtaataggattgaatcgttttgatgaaggcactggcaccgcgcatgctgctgtcttccccaatgaagaggttttcgacgtacgaccaggcgagggaagaatcatatgaaaatgccgtcgacgaaataacataatggctttcgttttcccttcgcatgtttctctctttcctgagacgagtctcgagctctggaatacgctgcttgtcgtattctgcttttctctagtctgtgacattcgcagtgtgcattcatgggagaggcaatggccgcaagccagtttgtgcagccgggtgtgaatcgattgttcgccagctgcgggtgtttgagttcagtctcatttcggactcacaaaccctagaagtgctttgtatcctttctgcttcctacgtaacgtttcgctgggtttctgcagaacagccgctctgagccacaacgcaaaaaatcccagaacgtgcgccgtccatgtaaaacagtgacctcaagcccaagtatcaactgacagtttaacagtgggtcatggtacagcatccgcttttcatgaagaagcgcatgtgcttgtagaatgactgcgaacggtatttcttgggcatgctgacataccgcttgcacagattggtgtgagtgaggctccgtcttattgcgtccgttctctattgcgctcggaccccccgatgtcccagattcttcgagacacgtagactttcccggtatgcctctccgtttcatgagatatatgctctttgtttcgacagttcttctttgagatcacgaagtttctgaaacccacaattcgacccgcaacttactcgacctaacatgcaacccattttgacacgtacagtcacatcaccgcactagtgtggatgctggtttcccaggaagcgtggcgtcgtcgatatagagttacatagacggtgcattggcgacaactggctcgtgccatttctagcctgcagtccgcttgtcagttaacactcctgctagtgaacggacagatccggacaa

SEQ ID NO: 1045 - DNA, 2399 bp, Toxoplasma gondii
  source 1..2399: mol_type = genomic DNA
gggtttcgtagtcgagttttgagcctttgacgtaccaagagtagggcatgagtcggaggacgccttctttcatgcagggcgtttcgatgagtcgttcgtactcctctttggtgagcctccagatctggggaaggagaggcttcgtgaagtggatgagttcttcggctgcgtgataagaggtcaactggctggcttcaacctcttcctccgaggcagcgagccgcgccgcctcccctttccggaagcgcctgcggcgagtctcgcgcgcggcttctgctctgtcgcacaggcatcgttctccgacctctcgtctgtgtcgctctgccctctcttccacgatgccgacgcagagagacgcgaggagcttcagcgcatgcacagagtggcctgcctcgtagaacgcggttgtcaggtctttgcctgcgaagccgtggagcaaatgagcgccgccggggtgagagaaacgcgaaaggtcgtagacgcagttctcgaacatcaccaagcactggccaccggaacctggttcggctgaacatgcggcgacttcgctctcgctgaagaatttcccgtggagaggacagttcccgcggcgaagttcgcacgaacgcagacgctcggcaggtgatgacgtttcctcgtcgggctgttcagatgcaagccaagcaggcttctccgcctcggagctcgtttccttctcacagagagacagtccttcttcgccaggttgctcgatctcggcgtgtgttgtttcgtcgcagagcgaaagagcttctttgccgcaaggcgaagacatgtctcgagaggatccaccacaaaaacgctcggcaacatccacgaaagagctgtcgggacagctgccgggcgtggagaccgagtcggaggcccggtggtcgtccgcgagggaggacatctttgcttcttctaaataggcgaaatccagaacttctctcttctcgacagatggagaagaacaatctctcgactctgacgaagtccaagtcaaagtccgcattcaaaaaccaaggccctctcggaatcgtcgagtctcgcgctaacgtcaaacccgtagctgcgcaggatcttcacacactcacacacagcggtttcggttgtccaggaaatctatttctaataaaagacgatcccgagcttcaaattggatgcggaaggcagggcgtcctgcagcgaacggttaattccggagagagaaagacaagactcgatcgggtgtcggcctatgtcttctgcgtgtgtacaaccgcatctagccggggaaacgacacaaatcacagacggcgtcacgatgctgtgaggccgcaaacggaaaggctcgaaagtgtgaaagcgaaaaggcaaaaaaatggatttctcgcctccgtcctccctcattgcaaaaaacgacggcgcccggctgtacgggcagctcgtgaggggcaatattgtctagactcggcgaaaagggatctaaagcacaggaagctctacagcgtgtcgacttgaaatggagacgcacgctgccgattgtttgcgataaaacaaatgagacaaagtccacacattttcctcaaaaacccgacccgcctcacacgctgtgtctcagcgagttggactcgcgtcaggagaaaagctgcagaaaaaaggtcggcttcctctctttcgcctgcattttcttagagacactcagttctatcgaagcaaaacagctcaataaatctgcaggaagccggcagagaccgcggaactcagcaaaaaagggggcagtaaagaggcactcgcttgtcttgttgaggcgcgtgcaacgacagtccctgtttaaaaagagactcggcacacagcgtccaggcaaagaagctggaaacgagcaagaaaagccggctctcgatgcaagggcgccgcagcgttttcggggacgcaacgtctggggaattcgcgaagttttcggcatcgatgtccagaaaaactgggaaaactctccgaggcgaagtcgaaaagcggcgttttcagagtccacagtgcgctcgcggggattcgcctccgcgagagagcagaaaagcgtctgctcaccgacttcgagagcctgcactcgtggtttcgttaactagaaacgaggcaatgcgttttgacgacctcgcggagaagaaaacgctcgcttctcttgtgaaagagggcgcttcttccactgtgcagcctgtctggaacgcacgcgtgtgcctgtgactcttccaggtccgagtctctgtcgtccggcgctttggaagattctccgtccctcctccgggggaaatttcctaagcgctgtggctctggaagatcgggaagactgacggcatgcggactgagacgggagagaaactcggcaaaaatcgaccttttttttctccaggcctttcgacgaatca

SEQ ID NO: 1046 - DNA, 2058 bp, Toxoplasma gondii
  source 1..2058: mol_type = genomic DNA
cttgaagttgtcaaactccggcacaggcggaagaaaacagctttctctggagacgaaactgcgagtcctctcccaagcttgtttgcgtggacacctgcacttccatgtacatacacaatatatgtatatatgtagactgatcaataggtagtcacttttgcttgtaccgatgcgcatgaatatgtgagtgattgtagataaatatatatctgtgtgtaggtatgaagtgtcgacggtgctgtatggtctgcagcggtgagacatggagaaaacgcgtttcgtttatccagcacatttacgttatagttgtcacaagggcattgaccgcacatgtcctatctttcactgtggtgcacgttcatcgcgagaagaccgagaagcacaaggcgcatgaaaagttggacgcgagaattgtctggatccactaattttaaagctctggcatcgagccaatgcatgcaaagaggcgaactttcggcctgtttctgtctgctgtgctatcgtctaagaagctttgatcgattccaggtttctacgataaccgtttagggttttggggtcattcttgaaacgggtgttccagtatacacgctgcgcacgctttagacgcagaatttacaaagactggtaggttcttctgttgaaaggattaagaatacatttccagattttctgctggggctacagccgtttccccgaagtatttgagtgggaagtgcacgtacgtgttctcaaacgattctaccagtgggctagaggttaacaagaactgacagctgcaagtgtggcgtcgcatattgattcttattattgggagcttcttcgtgaacccctacgtttttcggacgtcccgtaagagctatgtcgctggccccctcctgtacagtctaactttgtgcgcctttcacttgacgaattctggagtcttagaagtgtgtcgtcgagtcttcccaggtgccatgccgacctcatggcagtccaggatcgacttctggggaaaaagagaaccaatgtaactccatgaaccgtgattttgtgtagcgagataatatgggtaatctggggaccttcatagcgcactatcgtgcagttagatactgcgtaaattctttgtgttgtgacagtcgcagcttgtgaaaaaagctataagagggagaacatgttagagctttacgccttaagtcagtttcctttggtgtgggttgtttgaagagctacggaaactctgatgtgtctttccgtcctcgctgaacaccggggattcgaggaattcgcagacatggaattcccggacgcggatgccggcactcggctctcgtgtgttcagtcacatataccctttcctggcgcaaaacaccgacagaaaaagggatttaagtgagcttctcttgtgaatatggtttgttttgtagcccgtgcatctccctgtgtctagatatatccacctggatcgtcgatttcggttagtccattgacctcatcaacccgtcaacgaagagggttaaagtcccgttttcttccgaacccgttctcgagtttttccacgcagagtggcgtactcttcaacagctgccacccgtccacattgcaggggtttgggcgctggtgtgtgtaggttgtgtctcgttgacgtacaatttccagagacgcagtctctgtcgatgtcaccgtccgcagctgcttggagtgtcccgaaggcataaacaaaatcgtcatttaccactctctaggcttttgttggccacagatgttgagcgacgtctccaaagtgcgcggtcgctttcgctgccaagtggatttgtggagagaaaggtggacctggattgcggctttgcacacctcggcgtggtcgtgtctgtttttactgtgcgtttctcgtccacagtgccgacacggcattccagcactgtctacgcgtgcggccccgtttcacgtccttagaaagagagcaaaccgctcaaaaatcgtaggattcgccattggttgcctagacgctgttttagttctttagttcttgtgtcaccaagcgtgtgtgtacggcacagtctggtgtcaaaa

SEQ ID NO: 1047 - DNA, 4324 bp, Toxoplasma gondii
  source 1..4324: mol_type = genomic DNA
ggacttcacacatgcagcctcgccaagagagtccctcgacgagcttgcctggttgaggaagcgtccacgttgctggcagccaccctgaggcgcttctgtccgcagaggcagacagagcagtcgagcgcgaaggagagacaatgtcccctaggttgtgttccgagacgcctctcggagaagagaaatggtggaagcagaacggagacaccgcagcagggtggaagagaagtcggcgggccgcgatgcggaggttcacaaacaaggttcggagagaggagtcttccccgaagtcgtcgtcgacatccaaagactttcgacttgtcgaactgtcggaagacgaggaactatgcagtccactggacgcagaccctttcttcaacgtgccgtccttaccatttctttcttgcaagtgtctcttctctgactgcagttctgaggaggatgcgtcgggtgttccgacagaagacgcgggcgaagagggcaccgtcgaaccgagcgagcaagccgcagtccccggcagaatcagcggtcgaaactcgtcgtcgctctccaaaaagacctccattgtgtagtctccgcgcaacacgaatcaagcagagccttgtctttgtctctggacgccagcagagaccttcccgagggtcctcacaaagccatgagggccagctgaggtacacaacgtcgtctttcgggtgcgagggaagaaatccaattcaagattagaaattgcgggttcgtggttaagatacactgaggaattgtcaatacgaatgtaaggaactgtagccgtaaaagcatcgcgtcgagtaatgaggcgtcacgtacattcaggaagcgagaacgggtgaactgagtcgagagaagaatgcacccaacggttccgcaggtaagggttcaagaggtaggggaccagctgcccgcatttcatcgtcggtgatcaattcggtttgagagcgcttcctgaaggtgcaacgtggactggagagaaaactgactggaggcaggaggtcccgagacagctcggaaaacagattttcgagtgaggcgctttttccacagtataagctgaaagaaccgccgcgagagagcgacgcctctgcagccatttgctcctctcaagggtttcaccgtgtaacacgtgaaaaggcatttgcagaaggtggaagacggagcaaaacgacggaaatcatcggagaaaatcgaacacggggctagtatcaccggcagaagtgaagccgcaagttgtctgacgaaactcgactcaaggatcgcccagtttccacggctctctctcccgttctgccgacagaagggagaggcgagtggtcggaaaacggatggagaaactcagtttccagcatcgaccctggcactccgctatgagaagttccgaggggcgaagcgcgatgggcatgtatgtttgcctagaacgttccagggacacctgggtcaaacaaatccgcaaacgaaaggacatgaagtcaattttcgcagccccggctttttgacagagactgtggactaaacagtgcgcatttccatgtctttcaccggcgcgggaaaacctcgcagtcgcctgtctcggaaggagcacatgcaccgccgcgcctttgtcggttctcccccagacaggaggaacgagtcgcggttcaaccccgacgggaggaaaggcgagatttaagtggaattccttctcacactcatcaccattacggacgataagtcacttcgtttgcaagctgctcaaacacggtccgattctgttcgtgtgctgatgtgcagacgacgtgacaggatctcgaacatcgggggagtgtggcagcgccgccattgcaagaagctccacgattctcacgccgctgtgtttgctaacggggataaatatataggaatgactatacatgtgtgtacgtaaactaaaggggagaaagttctgccaaccgggcccacttgcgaggctggacgcgtttcgaatggatggtacagaagatcgaacgaaaactaatcgacttaaatcctacagggttgaactggtttgtttcgacgctcagcacgaaccactggatgggatcctcgacgcaaactcaagcgacattctggacggatgtctcagcagtccactttttgtggaggacagccgcagaggcacagctcccgagttccctgttccaggcgtaccatgtgcattactgatttcacttgcgttaacgcgaaagaaaacgatgcctcagatgacagggtagaaaaacacgacgccagtggcgttgtcatgcgagtaataatcttcgtcgcgatgctttatctcataaacacccaggatggtgttttcccgtctgccatccctatgtcacacattcgaggaaagaagaaaaaccaaagtcgaggcgtttcagtgtgtacagaggcgaccgattccccgggacgccgatcggtatggtaaggagaaaacaagtatcaacaccgtcacgtgtagtgaacggttaaaatttgagaagccgaaggacctcaaagtgtcctacgctgttagggacacacaggatgcacaggatgtccggtgagcgtatcaaacaatgctgtgtcgtcgagaatacagattcactaaacgggatgaaagtggtggctacaactcttatttgccgtagtcactccaagaccgtccttgctccacacaaggacgaggtcagtttgaggaaattgtccaatttcatgtagctgccattgctgttgtagattattcaccaggtaccgcagtatgccttcataccccggttgtcagcaccgtttctccaagttcattggcgtctgtagtatttccaaaacagtccgtgtctaaggatctgtcggcagtcgtcggcttcgcttcttcaacttctaagcgaactttcctcgcggtttagggtggtaggagaatcttttatgttctttgtctgtgctccaggtagatgcatttgggctctggcaggcaaaaccggtgaccgcacagtgcctgtttcgatattttgcagagtcacacgagttaatacttgtcgctgctcaagaaaaaggaggcgataccttttgtctaccatacgcttcgtcgatacagatgtagcataaggatctccacggaaagcaaagcgcgaacgaagtggaagagaggacagcaaagaagagtaatggagattggactgctggttccgttaggtgaccgttccgccgaaaccattcgaagtttcagtctggcagctaaaaccccttgtaggagagtgactgcttccttttatggaaccagtgaggcctgtgtaagcttcagacatttctgtagggatttttggaagaggcaggttctacgcatggcgccatcacggtttctcgacaggcctcacggacgatgcaggtgaagctcgacgggaactgcatggttcgccacgccagaaaaacagaggcaggaaccgcttcggtgaacacctctcatttggtgtgcgcaactgagagctttaccccggaaccccgagttgtgtctgcaggaaaccgagagccacaatcgattctgccaaccgagccgcctgtggcacttcttcgttggccgcgttgggtggcacgagtgaggagctgagatccgtgtgtccgcgtttcgccggatctcagcagaaagtctggttttgaccggcatattcttgcagtgtctgccgcaaagaaatggtttaaccaagctggaagacgctctgcagtcgaagaacgaggacgcgcagagtcgcagctgcggcgggtccccgatacaggtcgaaagcatcgaggacggactaccctgcgcgatgcatcgtcggacagagtaacgcgcggcaacaccaagcgccagcgcggatttcgtcctcgtttttccgagtggtctcagttccttcccaatagtccgcgacggttccgagtttctcctgctgcggtgttgacactgccgaaatctttctagtagccaagtgcgtaggctccaggcaaaccgctttttgacacttcgatgccaccggtcgtgggagttttcgcgtgagaccgactagctcactgctctccagatttccggagactcgtcgcttgcctcggttgcagggttcgtgtgtccgatttgaaccaggaagggatatttccgaaacgcccagagaatagggttcgaaacatcgttttcgtttttttatacaccgtcgacggcaactcccttagtgcgcacgctggctcgctgcaggcgccgttgcactgggcggccgcgtttccagtcgtttccgcaactttcgcgttttatttcgtcgccgttctgttcatttctgctgcctcgaacgcaaacgagcctctgcaa

SEQ ID NO: 1048 - DNA, 2087 bp, Toxoplasma gondii
  source 1..2087: mol_type = genomic DNA
agactacctccttcaaacaccacgcacaatggagatggtgataggatattaatacccatgaggatccatttggcacccaaatgcggtggacgcattttttcagacccttcatagttcgcatccaacacatcgagacgtaaatcggctcacactgtgggatgctcggagttgcgacgttgttatgcagacaagacagtcagttgcttcttttggactacaaaacaagctatgttttcggcgtttcgccgttgaacacatttttgtgtgacgcggtctaacaaagaacgcgttgacctgtttcgggtgactgtcgatgatcaaccacgaatagcgcgcatattcaatcgcgaatgccatttgtatagaccttagactgcgagcgaacccaaggttcatttgtcgtggtgttctgagaccgcgcattctgcactgaaaatcactcgaacaccagtatttgctgtccaggtccatcccacgaacagcacacgagacattagaggagggtatcgacaacaatgccgacgggcacctatacaatctgtccattgtaagaccgaaactacacgagcatctatctttccgttaattgttgctgtggatcacctgacagtgccttacgagattcagacattatccgatgacctacctagtggccattatgttaatatgtttatccgacctccgattactctatccgtccatatttccttggagtcatctgcacatccgatcaagccgccactgtgcaaacataaaggggtttatgcgcgttcttgtgagttagtttagcacttcccgtggttacgtgtgccggcttcaactgatctcattctagataattcacacaacctgtggtttagttcacgcgggcatttttctttgtgtaatcgcctcacagcagggttcttttcgctcggactactgcatgttagcgacccagcggtatcggcggctctgtcggcactggaacgctgtaacttttttccagtctgaacgcaccaaaactgctctggtagaggaacgggaaaaagcaattaatggtccctccagtgaatgaaatctggtatcgcggttagtgcgagtcatctgcatgcaacaacatgcagttagtcggtttgtgcagtccttgcggtgtttgcatgactatcgcaggcgaaccaccctgcagctggttttcgcctctgtgactgtgacgttcgcgtctccgtttttcagaagagccaaaaagcaacagcgatcaatcaccgcagtgtacgatggaactaaatcatataagtattccctttcgtccgatggtaacactttcggaaggtgttcggaaacaaaacgaaataatggaagctaccggccggcccctgggaccgcatgtcgttttgcactcgcaaagaaaccacagaaattacaatgtgtctttccaaacaactgtcgtgttagcatagacacatccaccagggctgacctgcaaagacttaccacactgaaggtgtaactttacggttcccctttcagcatctgaagcagattacattacgagcgttgagtgggaagaatgtattcagcgtatcctctgcagtatctatttggctacgatgtgtaaccggacgtcgataacaatttctcatcaagtggccgttttcatccgggtcgagattgctatttcatcgtgtcactgaacgattgagtggggcgccttcagacgacaaaacaaatacgcagcatttcatctgctactttgacgtgcctttaactcttagataccttctcccgacatccccccctgcaacccactgcttttccttggtccgatcgcttctcaacaattccatcccaggcaacccatcaccaggacaaagaggctgtttttttatttgcctgcgcgcgcttggttgttctaaaggcagactcttgggaaggaatgcccgtccaggaaaggcccgacgcgaacctgtgtgcaggaattctgcgtctctgctctcgtgtctcgggttttaccagatgccggtgaattatacgcgaaagctaaacgttctactccagacgtttctgcagcaaccatccacggatagaaaacgaacagcatttttcga

SEQ ID NO: 1049 - DNA, 4153 bp, Toxoplasma gondii
  source 1..4153: mol_type = genomic DNA
ggctttcttgacagcccaggcggaccgaaacaaagctcgagcagaggtttcatcgacctcttttcctcgttcttgtcccgaagtcccctgtctctgctccactcgtgtcgtcgccgcctccctccctcttctgtttatgaagaaaagagtacgtctccattcttccggtgtatcgaccgcctctggacgtgtctcctcgacagacacaatatgcgtcagtcttctgcgtgtcgtccgcggccgttgacagagcgcccgatgcttggagacaaaacgcaaaggaaagcaagacgacgaacggaggaggaaggacgagcaaccctggggccccattctcccttcccgttgaagacaaacgaaaaccacagacgttcttcgctgggattcaggagtgagaggttcggttgtggagagacgcaagaaggcaaatacgcaacacgagactggccaaagcagagcgaagaaggaaaggtgttttgggggggatggaaccgtcttaaaagaggcgagtaaacgtggaattggcgaagattcacacaggagggactggagaaagatggagaaaggaggcaaaaacatgcgggatgaaattatgcgctctagaaaacgcagacagattggcggcgaaggtccaagcgattctgctcgttcgagaagagcctgtgaaaacagcgagttcctcctctttgttcaagggaaaaaaggtcatggcaaaagaacaggagtgacaaagactccctgagagttttatgaaaacccgttcagggcacttggacacgtcataggacgatctttgccaacgatgctacgacggaaaagtgagacaaccggtgacagaagagcgggcttcctgtcaaagccaaaagtgtgcgcatgcaggtgttccgaaaataaactctgattttcaaagttgcagtgtgtttcaagtggttgccaacacaagaggaactcacaatcgacggaaattcgtgaccatgatggtttgaacctcagaactgcatgcaacgtaaagaacacagatgacatgcggcgtgtgtgctccgagaaatcgcgtaaaacgccaaatatggacacagcgtccctcgccttccctcttcgttatgttattcgaaggaaatgcatgaaaccggtttagaaaacccgttttctctgacactttacggtcacacaagtgccggccctgtcgagatgtcgaagcggctatcctgactgcatgcgcgagtcaaagcgtgcaagtccagattggtgagaaaggagtgagagatcagtttccgtctaaaaaatgagcttcacgacgctgtatttagaatcaaaccagtggtggcttgaagcagaacactctacatcagccgggctggcacagaacctgagacaccgtaggaatttgtgcgtgtgtgtgagaggctttccgtctgaatgttgttacaacgaacgaaaatgaatgatgcaagggcacgtttcttcggagttgctcgggtgtacacgggcatttttgagacgctgtgaaacaaagaagcttaaggttgcgtacgagtgaggcgccagtgtgtagacgggatgtttgtcgcgagctacacatgacgagaaaagtcagtgaaaacctgggagtgaggacagggttgtagcatgcgaaacgaagacaagccgaagaactgagagagaggtgggaaaaggagaggcagtacgaggtaagtaacgtctcttgcgagatgggtattccattagcgacaagactgtcgcgcatacaggcgcattcgagacgctcgaaagcaaagagttgccaggatgtacagactttgtctcgcttaagatcgaatgaatgagattcattactagtatcggtcactggaaccacatttcctgggggaattcggagaatattcagaaacaaacacgaacgttcgaattgaacttcagtgcgacctaaattccttcccacaacatagtcccgatcaagaggagcatttcgtggatgaaacgcttcctcgtgctcattttatcacttgcctacacttccacggtaaatctaaccacgctgctgacggaagacttgccacatgtttgctaagcgtttacggttgaagtggctcagcctaccgtgtgcgatagcacagcgtgggggacgtggaagagtcttgagtctgcaactgaatgaaagatctacgtttgtgttttatgacaccgcataaaatttgactcaccaacaatttttgtcaggctgttcgtgcaccattgaccctcacttgcaaagcagaatagcagcctgagattgctctgacggcgctgctgctacaaagggctggtctctcagcgaccagaaagcattaaacacgcgaatgggtgggtgcaatgccccttatacgtcaacacggtaggaacgggaactgcaaggtgtcagacactgctgccaaaaaacttttctttatcctccgttttgtgtcgcaacggtcctaacagatccgtctcaacagtctgcgctgaaaaaaacgtctaggaaaactgctgtcacgcaatgcgtggcgagtttcattcttgtcgtttctcggccctgaatctgcgtcatgacatgcacagctgtttattcggaaaaatctcacacaacatccacatgagagccgatggcacagttatttcgcggaaggagccgaacccgctcgttaactgatttacaggatcaaaacgtgtgccacatttgaaggtaaactgtcgcatccttgtttgttttcaccctggcgagcatttcctggttttcccaagcaactggaatctttatacacactgaaaggcagacgaaattggtatggcgactcatttataacttccaacaagataggacagctaaacagagcgttacccggtacgaagaaatacggaatccccttttcggcaattgattcggcgagaagtgttcaaggacgagaaaaagtttatactacactccgtcaagacgccttctacgagggaaaaggctgcattctttgcctctacaagcaaccaaaggaagagcagaaactgccagagttacttatcgtttgttgtcgccacgaatcatgcacacacatcgtagattaaattatgctctgtgctgcgtgataccttgattagatgtgctgtctttgatgatgccgtgaatgaggcgtgaccttaagtttcgcatcttctccagcgatatacgatactacatcgttaggaaaactcggggaatgctaccaaggctggacacacgaaaaccattcactcattggttttcacgtgcctcagcacaggcaagacgtacatgaatgccagcgttagcttcgctttgttctcgagcccagattgcttctcggcctaaagtctgccaccccttttttacaaggcaccttgctttgcgatgctggccaccggcagttgacccctgccgttgttttcatcgaacaaaggcgccccacgagaacgcgaaactttccaaataacgctgtggtttgagatcggtacaattctgcggtgtatgtacagcttttccaaatgaacgacgcgcgaacccgttaacacacaacttttttgcaggaactaacatgcacagacgtggcgaatgttacgcacagtacctgtgcgcggtgtaagcgctacacgtttgttttcgtctgctgaactgtgggggaatttctgcgaagacactagtatttgcagtgagcgtgtactggttgcaaccgaaagatctggtgtgttgcttggcgccgaatcggaaggtgtctgcacagacgcacagctggctggcgttttttcagctaagctagcattgacgaacggagttgtcgacgtctttcgctttttgtcggcgactctgtaaacgcgagttgtgctcgttttttgttcttgaccagaaccaatgtgcagcgtacttcttaccgtctgcagccgtcgtctaacaggggtaacgcaccccgaagtagatactgttgacggccaggtttcgccgcctgacgcaccgttttcccttccagatcaaggcggttcttttcgcgtggcaccggcgtacacgacagcgggtggtggacagatacggtcggcacgcgctgcgcagaggcgagcagctttttgtggccgcggtttcgcgcgtgccggcctgtaccgtgcgagcaacgcagcttcagagccagctgggaggcga

SEQ ID NO: 1050 - DNA, 3535 bp, Toxoplasma gondii
  source 1..3535: mol_type = genomic DNA
cagggagcgccttccagagacgctgcttgcctcgtttttgcgttttttgacgctacaacgcttctctttggttagaaacgacgtctgaggcgccgcctcgacgttacttttatctctagttcttttttctgcatgctcgtcgagccttcctccgggaagcgaaaagcaaccagccagccagggagctggcgctgaagtgaccccaggaggggaccaccacgggcaggagttgtttttccggtcaactttggcaggagaggagagcggtgggggactttcatgcaaacacaattttggacgatggatttacctaacagcttttgaatgtgaaggagttgctgtctaacactggagctcttcaagatgcacggaaatctgcatctgtcatggagagatgcttaacactacactctagggaaattggggactcagaggaaatgtaggtagaatcacagcaatttgtgattgtaaatgacatctatggccattcctacagagtatggctcaataaaacgcttctcgacgcttgtaaatatatatacataaatacgtacatatgcgtgtgtaagtctgtacggttgtctaggtgtatatatttttactcacgtgtatgtcctgtgcatgctccgtgtatgtcaaccgaggtatttagacttttgaccaagttatttcttttcaaaaccgcggtgggttggaggctttcgggcatttgacaactgagtgtgttttctgtctaatgcacagtggttggaagagcgaaaacatcctttttttaaattcagcttgtccttcggtatccttgggtcgttgaagttttcccggagtcctaaactccgatctcgacggaattcgtggtccgttcgggctagagggaagctacggttttgcgtccgtgctgaaatcgactcggacacaaaccgttcacttgggttccgcgatttacgctttcatctccccgcagaagttgatttcacaactcgctgatggtgacgcgcatgcacccatgacagaaaagacgccgcctgctcttgcgtcagctctttcgtctccttcgcacttcgctttgagagtcttgactgagttcacgggcctgccggaggactgaaaaaaaggcgaagtgccaactgaggtgtcggagagaggaggcctctcaggactgactcagctcatagctaaacgcttgccctccgagactgaccggaagggagcactatcgaattaaaggaggtaaaaaggctgaaccgatttagctggagatgaatccatgcatcagggcagaaactgcttctcacgttctggcttctcgggtgcttcagttgtgcctcagttaccctaggagcataacagatctggaataacctttctgtatgttgtttatattactccaagagcattccgaatgtgacatacccttgatttcgaatgacattgaaatccagagattcgccaaatgcttagggctgcttaaatccacggattgcttttccaacctttccttgcaaggcgacaaacggttacaccaattgacagctaggaacagaaaagcctgtctcccagatcagcaccggcaaaaggcaacagtgggctcacataggatttgccagtaaatttctgctgcggtcaagccgtaacgaacgtcttttatgtgtctgaaacgatcctctgagacatgaactttttttgggcggcttgcatctctgaaatatccgagaacactccaggtagattcaaagctatctttcagagtgtgacgaggaacaagattcacggaagctacaaaaatccgtgaagtcggagctcttgcgcacaccccaaccgcgccacttcgaaattgcgtaccgacgtcttttcatggatactcaagcagtgcaacagcacatccgttcgacttgaaagacaacagctagaacctgctgactcctaagggacgaaatcattgtttatgcggatgtgcaatgaccatctacaatgtgcatttatcgaggcagggagagacatatgcacatacacctaccgctgcagaaccttctaaaatatataggagtgatccgtaccaaagggcatgtgtctcggcgtcgtggcacctactttattcgcagcaactttcctacctacccacccacacaaacccccgtagagaggaagacaactctacagacgatgtgcagcagttcgtgagaccgtaaactcgtgtaaggagttggagtatgttttcccggccagtagcagtgaaaataaagaacgcaatcgaagacagacatctctccagccttcaactacgtgtcgagagcggcgaaaatgacaggaaagatggaaaaggaagaaacacgcgtttcacagctcttcaggagacgcatagggcgccggcgcccgcaacagcgctcgcgttggctgttaagcagaatcttttgtcggacagcgaagtctgcggaaatcgctttgactgcaggtgtctacggttcacaattttcaagatttagtttccccgcgcccttgaggggtcaacagaaacgcgacgctccctctcttgagcttcgtccggtaacccgggtaaagatgtcgcgcttgaagttaccttctgtcctcaaagatgtcaaccaatactaaatgtctaccgtactttgttcgcttcatctcctcacaagccactttcggttcggactaccacgcccatgtaacaaaaatcactaaactgtaaaacacgcggcgcgaagtgacagagtcgctcaggagcaaggagcaagcgcttgccaaacgcgtactacgcggggagtgtgactcaaggctgctggcacatgcagcgacggttctgttggaacgccgagagctttcgcggtgcccttccacagaaaagcacgttcacaagactttgagagtaaaaagcatcggcaaacagagagaaaacgaataccctggctgcgaaagaaggtacagcggcgacgagaaagtgtgtcgtgggcttcggcacttgacgggcaccgcgttcctcatattggagcgaaacgcgacagtgctgtcgcgaactttttcctgcaccacaactctggtgcgttttttccggaggacgtgagactcaaaagcttcaaactgatcgagattttcgtctgccgtggccggaagtcggcttccttcgcggcaaaaagcgacactcgttgtagggacttgggggatctccactagccgtggctttttcggggcttgtcgacaaattcgaccttgtttttgtcgagcgcatcttctttctttcctcgactcttttctcgtcttttcgacgctttagggacgccgttatcagacgatccctgacgtccttgctcgggtcgggtgttttgctgtttcccgtctttctgccgaccggcagccgcttccaggaaagctgttgcatcgctcgtagcgcagaaggcacgcagtctgtgtgtcttggacgacgcgtatattgaccgcaagtgatgcgttttttccagtgcctttgttgccacaagtatctctttgtccgtggaagggcgtcggtttccttactaccaacttaggaaga

SEQ ID NO: 1051 - DNA, 2311 bp, Toxoplasma gondii
  source 1..2311: mol_type = genomic DNA
gtttatctttctcttcgcttggcgcgactgatggagtcctcgcaggctcggcaagctgtcgcctggtgacctcgagaaacgtttccgccgcaccttgacaagtttccggagtttcgcagcgcactgaggcgttgtaatgtctcccgtgaacgtttggacgccgcgaatgggggagatcggaaccaggtcgacgccgacgatcgtcgttgcgaccgggcagtgcttcgctgcgacttgaagccagcctcctggggcggcgcagaggtcgacgacgctcgcgcagctcttctcgaagaggcggaaccgctggctgagctgaaggagcttgaaggcgctacgagcgcggtagccttgctccttcgccaggtggtagaacttgtccagacgctgcttccccgtcttcttcttcctatggctgtcgccccccgccatcgtggaagaagagaaaggaagaaaagaaaggaagaaaagaaaggaaagaaaggaaagaaaggaaagaaaggaaagaaaaaagagagaatcgagaaaacagggcagaacgcgagacgggaagcggaggaggagacggaaaggagaaaaggagaagagaagagagaaaagagaagccaacaggaaagacactgaagacggacagcgttggaggtgcgagacagtagcgcgactcgaggaagagaagtggagagcaggtgagagagaagagaatgcggtttcttgaacaaggacggtgacgacaggcaaatctcagatcagaaaaacgaggacctcccctaacagtgccgcgagaatgaagttgtacgcctccatgcagtttgttttcgacagaaaagaggacaagattgaaaattaaaaaaaaatctgcctgctttctgcgaaacttgaccctctcgatgctctgccgtcgtgtggggtattcgaaaggagacaggcaaggagagagacgacctctttgacctccgttgagaaggaaggcctcggcggagaaggaaaagagagaaactgaagcagaagttcgcttctccagccaaatccgaagatttcctcctgcaaggaagaacgcaggattctttgcgcgaaaagctgcatgcgctcttctctcactcctccgtggagagtctcctcagcgcctctcgcgagccgccgagcacgccagagactcgcgtggacacacaggcgaaaaggaaaaggaaaaagagaaggagaaagaagaaagaaaaaggaaaaagaaaaggaaaaagaaaagggaagaagccccgtgtgtgtagagacagacacctctttcttgttttgctgtcttcagcgaaaagggaggactttctactctcaagcggaaaggagaaaaccttttcatcgtgcagaaaaagagcgcgactgcgttgcttgtcggggaagcgcttgagagcgagacgagagaagagttcgtccgtttcgatttgaaagatatcctcttccaccatcctctggcgtgtatggcttcccgtatagacctcgtttgaagtcggggacgcgtctcgttttctcgcggctgcctggacggccaagaacctgcaagtcgccattttttctttccttttgcggcgcgtccttcaaaagcgtcctttcctttctgtcttctttgacgcttcgctgcctcctgccgcgacaaaggacgcggaaccggcttctgtcaggaaaaaaggcagaaaaagaactcggtcttccgcatgtttatagagtagctgcgcttctctgtgtgtctatgtgtgtatcccttgagcagcagcatttgtcgaagagttgagaagtttttttccacctgtgaaagagtctctgaaagactgttctcacggcggtgagcgtctcgctccaggacggtctcggtcaccaaaaagagcagtgcctcagaggctgtggaggatgtctagaaagttccgaaaattcgtttaaatcgaagaagcagacgcgcgacgggggggaagcgtcaggattcgaacggagaggagaggctctttctttcttctctcgtccatgcctcgcgttcctcaagtcttctgccatattcagaagcatctcctttgcccgcaatgtctcctttctcccggcttgctcccttccactctctttcttcttctgctttcactccttctttcttttgttcttctctctcgacttcttcttgttcctttcttcgttctgcgtcggtttctcttgctgcatttcggcgggcagcgtttaccagagaaggcctttcctgagagtggcgaggccctcggctccgttgaccaggacttcctccagttttcgtgaagtcttccaccttcgcgttgtggaaaca

SEQ ID NO: 1052 - DNA, 3781 bp, Toxoplasma gondii
  source 1..3781: mol_type = genomic DNA
tctttatcaacaaattcctcagcaatcgggataaaaccgaagccggcaaaggagagagggcgtctacagaaggtggcacagaaagagacgaaaacctggcgaaacacggatacattgctgcacatttgagaagaaccgattttctgtatttgaagcgttcagtgccgttgcaaagggcagcggcgtacctcgtgagtagaatgaaggagcacggggttttcaaggtaggcgaagatgaccagttgtgtctcttctcaaacggacccaagaaaaaccggttgttttgcaggaagtacatggactcacgaagcttccacagacgtgtagagggcgactgttttgtttatgactgcctacaccctccttgtgaaagtatacgctcgcgactctccgcctatcgccccactgccaggaacgtcagattaaacaccgactgttacatcgtcactattgagaaaaatttgatcttatccatccgcagagttacacagaacttctttctcaattgtgtgtcacctcctctcagagtattacggttacagcttacggttgccgcgacgaaacacttgacattgcttgtctgcgtttgtgtcctgtcccgtgtcaggcgttcatatgcacggacggaagcgaagacgagaagcgagaattgcgagacgccgtacggcgagtgggcgacgctgcttcgtcgtcaccatacactgtagtttttttcgatttgccaacagttagacgactgatgataaagacgctagaagcaagtagtcacgtctcagacgatggttcattccacgacttgaaggctgtagagacaccaggctacagcggcccaaaccacatttctctacttctacatccaggaataacagcactaattgaagtgtggattgctgcacgtgccgcctatttcattggaaccaaagattcgcgtttttcacaagccattcgctgggagcggcacttgatgggacacccgctcgaatcgagcttggaggttttctgcgtagacagctcacctgatcagactggtgggcaggcgcaaggcaagtgctttgcaacaaaaagtcatgatcctccagaaggacgcagtcgaagtgagctcaggaggaaatactggccttccttggaccccagttcgacactgtaacgtttggtcgcgatccgactccccattttcgtttcgggcatcttggaaacgtcacgctgctgccagagccgcatccgagtacgggaacatcttctcatatctccagagaagacttacgctctcttagagagaagctaaaaactcgcgcatctctagtagtggtgccatcaaccagtgttacctcgtgtcagtttcatacagttggacatgccagctgtgtgtgggagtagatccgttgtccggctaccaggctagcaacgctcgagaattcgtagatccttacctcgtgtaagacactgctactacaactggcatggatgtccctgaagtgtggaggtctgcctcgctgcgattgttcatagtgtggcatcgatgccacaaggtcagattgtttttacgaatgatttttttgaatactctccccgtggggctaaatcttgtgaggagtttgttgagtgtatccgtgccgtgggcagagggtaggggcgaccttcgggaccaggccattttccctgatcgtgcatcgatgttagaacagatgatttgagggagcgctgcagaaaatgcagtagctgcaacagatcgaacgatcacataatttgcgatgtcgaacaccgccaactctttttttcactttcctctcattcctttcgcatttggcgctcatctgcgagctcacaagcttctgggtcctcggagaaccgcatcattccccatgctaaaaaaaatcgcagtgcctcaccgggggtgcgtgtaattactatggtgtccataccaaactcgtcgtaggttttcttaactactgtgttcatgtgatcaatggtaacctgcggttccatacattctatcctctgcatccaatgtcgctgaactgtcgagccgtggaaggttgctaaggttcccttggaaacgaccacaccgatgccagaagttcggcgaggaaacgacgccggcactcgaccacaggctaaccttctttgcaagacctaagaatttgatttgacatacactatagaagctcttgtcgttgcatattatgacttttcctagtcggtgcgtatcgtctgtggcgttggctgacacagtaatgcggttcattgctgcatgctccaggagaaccaaggatctctcctttccttcgatctctgaaaggcaaatccatggtcttgtcagccaaaacacaatcactggagtcaaaagcacagatacatttcggcttgttctttgcgaaagagtggaataaccaaggacaaccgactgatggaagcgcacgagcactagcaaatctgccactcggagcttgacagcggttttactcggactcccgctagtttcttgaaaaaagctgcaaaaaagtgcgtcttttctctctgaactcaaatgtgtttgtcgcattttggtagggggaagagcagccgctcagccgttacggcaaactgtgtttttcattggcgtgcaaaccatcggttagctgctgctgcgtgcggatgccgtccatccaatcgacagaaaccgaataaatagcgaattgcaagagaccaaacatcacagacacttgtcttttgtgtacgcggcgactttaaagcctgcttttccctctattttcatgcttaacagcttccgatagtgcacagaacaacaggacagaaacgcaattatctatctgctgcgcaagcgggcgaactgctctcgcgcttgaagcccttggactgagttcgcttgtcctagcaatcgacatgtccaaccgaggcggagcgcgtttaccacaggaggcgaaggcactaccaacggattgaagctgtttcatcttcgtcgcctaagaaaagcgttatttccacctcaggatgcacatagttttattcgcgcatggccttggctgggtgtcgcacgtgtcttgagtgaacccaatggatacgcggcattgctgccaaccgttctgtcgtggaatctcgccattgtgcactcaaaaatggaggataaatgaactttttgacacacagttagttcgaggatccgttttttatccgtccctgttttctcagtctttttcacatctctgacttcgcacgttttcctgactcaaagggctggaaggaagccccgaatcgcaagaggtgattcttttttttgcttttgccgggacggtgttgctctgcctcgactaacgtgactacaacgaggaccggtcccgcctattcatttttctagcattagtttttccttctttgtggggctcttctccgagcatttcttcgctctgggcccctgtacaggtgacacgaaggacctttacacattcgcggagattcctgtgcttctcagttcgctgtgagccagagggattttcagactgactttttctctcttggcgccaccaaaacttgcaaacgtttcagaaaatttccctcaaaagcacagggtgttttcggcattttgtactgccgccggtatattcctacgctactccgcgggaaccgggccatttctgccccgagactcctggcgagcagctgaaaaagggaagctcaagacaagggaagcaaaggagcagggacgccagagataaaggggacgatcagcagggcgattgagtcgcttcagtctcttcctgcttcacccacccctcaatcatca

SEQ ID NO: 1053 - DNA, 2773 bp, Toxoplasma gondii
  source 1..2773: mol_type = genomic DNA
agcaaaattgaaacatcgtcacggtagactctcttcaaaatctccacagagtcccactctcagtgtgtcatcatggcagaagtctcacagagtcatccgcggtttgtgcacgtgtcctacgtcgtgtgcatttaacgactttccctgtcacagttcagctgacatatgaataggtgactgcaacagctgtatgtacagccgaaccatgaggccacccggtgcgaatttgcccgtcatgaccactcagtgctgaacatagttgatgctttttttccctgtgttccgtggctctgactgcggcttcgactgttccgtttgtggcgacagactcccgaacgttcgagaactagatctttcccgaaacctgtgcactcgataccgtaggaaacgtacagaaattattgggctgagtaaaagcgtaggaggatttcgagagggaccacacggtggctgtctcagtcgcaaaacaagctcgtgctgcaagcgaggatgacttccaatggccagtttcctcacgacgtgtcaatgaagcaagaaacacccggaagcgactcatgtgcgaaggtggccagctctctaagaccagaacggctagaggcgagactccgtaacgcaattaacgacctggaagcgctcgatgtaaggtctctggcgtgtagtgcattctgactctgtaatgcgaaacaacttccttcaccttgagcacctcgaaatggatatgttcaacgaggtcttgcattggtctttgctccgaaacgagcgacttcttttcgacatcagaacgactcgactgcaggtttgaacttggtcatgatacgaatgacgtgaattccgatacggttccttaggtgcagcaaagatcgacgattgtaggtcatccaccgtgaccagagcctgtttggcacaatgcaggaacaccttccatctcagctgcggcaagagaagtcgtggctcctttgacgggctcacagagggaatgttcacacttgaggagtaagaaaaggcccagagcctgagttgtttgtccggactcttccggcgcgttgtggtagttgaggcgaacattccacgccccttcaaaacttctgtgtctgctgtaagagccgggcgctgcgtttttcgtgaagcaataactatcaaagtagtacttaataggcggcgccctgtccaaatcaagatcgtcactgaatcaagaacacccagttgagattcaaatacgaagtggatatttcctttcgtgacattctacatccttcctctccaggtggactgggaagccttgatgggtattttaaagtaacggtcacaggattacaaccggtgtgcgttcattccgtatgctttcattgaggtgacgtttgcctcctttgctgtacatgtacgtgtgctagcacggaagtgctgaatatctttcctcgacactttaaccacatgcacacgcttccagggaagtacaactgctttctctacagaccaaatgcctgtatgatacggcaagccgtcgctgttaatgtaagcacgtcactccttgcttattgttgattcttcaatctggccactcagctgtctgccgctggtgcgtgtggcagaagtccgcacatcagagacggcatgcacgacggacttggtgctgcggggcagtggcccattagggagcaagagcaagaatgaagcagagttgtccggtggtcttgttcctatcccaggcccgtttttcccattctaagcagatcactcagaaattacgctttttctttcgagtttgaatgtggattgagggaagacgttgcccgtttgcatgctctttcgccagtgtctgcggacggaccggcgggctgctgtgtcttccttgttgtagtgctcaattttgtcacagtttggacgcatgcctgtctgcagcccaaagcatgtctttgtggcgccctttgctcgtcgattgcacttgcagcagtccgtcgtctgtctcattcccttttgactttttattgccgtctattccttgtgcgccagtgcatcgtgtgttggccactcgaccgcgtgccacgcatccatccattcaaggcacctgcgaaccacttgttttatttcgtctgaagcgttgggtgtatttcaacagtttcgacagtttgatgatgtgaggaagcgccttctccgaattcacgttgtgctggggccctctgcctcgtccgcaaaaatgttctctcagccagaagatttcaactccgcccgagcccgataaatcttcatcagctcgttgcgtggagtgttctggtgaggcaggtcactgaattcgtgcttgttcccgactcttttcgtcttctccgtggaaacgacgcgggacaccaggcactacccgcgtgttttcctcaggtcttaccgcggcgaagtcaccgcgtggactcagccttttttccgcggttatcctgttctctgagtaatagggttgggatttttccccaccgtttgttttggacaccgtttaaatttggcagtcctgtctggtgcacacgcggacggacatcccggtgctccacccagcagtatgcttccctgcagtgtgcgtgcgcagtgatttgagcgaaccagatatttgttcggggcgtttgcagcgtttttgagtgcctctaaggtttttcattgtccccttttcggagagtatttgaccagggttcctcttcttaccgtggtttccctccttgaccgagtgtccatcaactctttttttcctttattctctatctctccccatccatccgaggcccagcgtgagaga

SEQ ID NO: 1054 - DNA, 1949 bp, Toxoplasma gondii
  source 1..1949: mol_type = genomic DNA
tccagttgctttatttagagttcaattgcacaattacgtttccacgtgttatcagctcacgctcaaacaccccaaccacaaacggtggaatactttgtgattcttgacgactggttagtactcgtgtgtcacggaggaaattgtcagtctgttgttgctcggggaacgagtaaatctcttgaaaggatagttgtgccccgctgtggcagatgttcttcagtttttggatagggatctatgtacagaattcaagcttgcatttaacacagtccttagagaacttacatggtcttgcttcccgctagtagcgatctatgtccattagaatcttcttttcccgtagacactacatcgcatctgtaccctttctcgtgaactattaacttcctgaaggcggcacgcgccgtgtcgttttcggcggtagctctcaagtgactcgtgtcatcgataggtttatgttcatgatcattcgcatcatccaccattccaacagaagcccattgatcgaacttcgcgacacagggatcgctcagggctcctggatgtgtaaaaacgcagaaggtccatgtagaagcatttcaaaaagtggcggtgtggctctcgatgttgcgaactgtcgattaactccagcgcgaccagacgcgaaacttcagcagagcaccttgactaggcaacagttacctggatgtggagtcttccgggcgaggaaagtgtcctcagtttcagcaaatatggaaaacgatcgtagttgtcggggcagttgccgaccgtggtatagttacgcgggcgttcccttgcgcaatcagatactatgtcctgcttcgcagctctgtcaccaggtaatttgacgaatctctgggtccctaaagtgtaaccttgtgctggcgtcatatttgggccagggtttttgcatcttccgcattacatttcaaaccgagtgaggatgcgtgcgcctccattccggtgaatagtttcctgtgcctcttctttctctacacggtgtcattcgatgcggtgaagtgataagggtccttttctggaagccactttctaatgttgtcagtagatagcgtggatgtgagaacaccgatgtcttcttcagaagagtcaagcatgatagacaagccgaatcggcggcacggtactcacggacaacaaccatatttcttgttcatggtcccccaggctagcttaactctttcaagcaaggaatttgaagtttccgactctggagcaaaggtatttctttccccgggctggttcgttacgcaacgccggtgttttcactttggtttcgcccttctgaaacaccgttagcccgaaccggattcacgccaacatatagccactcaggatttgaaagcattagacgtagtcacttttttgtcataaagcgtttatattaagattgccgagcccctgcactcgaaaatgttactaactaccaagcttcgccggaacagcggtcacagcagcacatcagtgcgtcaggacggaagcgccgcgagaggcatttgccggaaaccgtatgtgctctaacgtgcttgtataataaagcagctgactcttgcatcccagaaaaacagtcgtggttgtccaagacaagcagctgctaatggaaaatggaagccggtcaggtggctccgccaatgctacctttcgaccttatacccagtgtagtagaaaaggtgggggcacagcatcgggatgctggtgcaactccggtggacaagggacgctggttgatggcgcgccagcaaagatgcgctgctggaagaggccggcggccgcctgttgcatgcaccctgcgatcgagaacggagtcgcttatcgttcttgcccatggcgaaataccacgactgttgagcagtagcatgttccttcagggacacagaaaaatgctgctgcaattcttgtgaattctcttcttccccttacgatagagacga

SEQ ID NO: 1055 - DNA, 3705 bp, Toxoplasma gondii
  source 1..3705: mol_type = genomic DNA
cttcagggttagaacattcttgaaagggtttgtcaccttcggcgttcaggtgattactgttccactgcgtaaagggcctcgcgatgtttggcaaggacgccaagagggaaatgaacacagttacgacagtgaagggtctcttgaggttctaggacgattttccttccctttcgtgacagagcctgatatgagctgcatgttcacggcagttgctcctgagaaaggggagcgaggttggtcacggggaggtggccaagtggcttcagaatttgctgcttttgtcctcaagggggaggagaaagaaacacttagccgagaaattggtctggcagcgtctggcgcgtctattccgtgcgaagacctcggttttccagttgcagatccgttagcctgtctcggtccgcctccgccattctttgtacttctctctccctaatgaagaagatacatgatcatggggaaccgtattctgtagatattacttttttcatggtgaaatttcgttcacaaaacggcattagttcttgttgactcatctgcgcttgtctatcacgttatcagacgagttaagcgaggcgcatcaagaaaggtaaccgtcttgctacagactgttgtttcgtcacgctttgttttttctgtcgaagtcttgaactttttggtgaggaggtgcttctctgaagtgcagatgagaggatgttttgccggccgacggtgaggtaatttggtagccccgaaaatccatcgtttgctgtattgcacgtaacgactcctagagtgatagtgcggctgtggcttggtaagccgtggtcaaagatcacgttacgcgtcttagtcgttataacagtgcctacatcttctctgcgatacgaggccaatgatcgccgttgctgacgatacaggcatgcctcttagcatgaaagtaatcagaacaaacgaacgtgtaggcttctctgacagtagttctagcgcgcagtggacgctcttcctgtccacgaaggaaaagtcggaggtgaatggagaaatatgtttcggagtcacgttgcacagagtaccgaaaggatttctactactggggatgcaggccattaactgatagaggaaatacgtcgtctttgccgtctagctgcaacaaattggacactcaggatcacaacacaacatccagggtgctgggttataacttatctgagaatggaaacttgaacgttccataggccatgtgtgatactgccacagtatacgtggctaggctctctgtagccgacccactttcgatggagtctcacagactctcttcatgcgaagtactttccgaataaccctcggggaaccaaatgtcgtactggtgaaagaaggtgtgtatatttgagagtattcggaggagctttgctatcgtcttgcacggtgttcagggaatctccttgccaccagctatcgaagtatatcagtggggaaatgacctctgaaccccaatttagtgttaaccatccttccgttcagaaactatacatactgttaatggggtaatgcctggttgtcgtctcaacgtacacagaactgccgtacgccaccatcccatgaaattacgacaactaacagtgaaatattaaacaaaactggtcgagactaaagtcgggcgcgtaagtgtcaaccagtaactagccaccttctgtagctttagttgttatcttatttattttccgtgttcgtttgaaccttttctcccggcaacaaaaaacgtgttgtcacaaagtagaactggcaatactatcagtacctaatatatacgagactgttggctgtttgaccatgtgcaatgcatccagcacctggcgttccttcgtcatgcgaaaagcgtgttgcacaaaactttgaaacggtggttcgggtatcctgtatttgcttccactcgcattccctgttcattttgccatgcatcactggtagtgttaggcacctaccagtggaatcaagcaaatggtggcaacccggaaataatcacccagagtgtaccccgactgcacaagggataatatctccagaagcaaagcacgtttcatctcagagtgtgccggatctgctgttcccgctctacaggcgttttacaggactctcgcctccgcgacacagagccagaaaccgatacaatttattcaagtatgctgcactcatgtgttgcccccatgtggcgcttatattgtcttaattccaaaggcagacggctgcagatcgttccatctctcaaacggcgtctgttgccttctagtgctcgagctagcaagaatcagcgtttgcccctgtggttaatttcatgtgtcaaaacgttgtagaggcgtttcgcccgtctgcagctctacggtggggacgaaggggggttaacacacagtagttggtgctttctgtccgacttataattcggttacctggctaccagcctcactgtcacagagcatgaacaactacgggtttttctcttgtcctcatagaatcggcactaacgaaaaaaggctgcccgtactctcagtgcaacaatagccgtccgggaaatctgcgcattcggaatagcggtggccacgaaggactgctaccgtacactccatgctgcgtgagaggtctagtgagtttctctcgccaagacacggagctcttccgtgctcttgcacaatcgtgtgtctaacagctagaaagctgagccagagatttgtttctcacaggcaaacgtgcatggtcatgcagagcacgctcatcctggcaagacagaccgcatctctttcagcagggtatggtctgctggtggatgggttgactctgctcacggtcgcctccacggtaggcacggggtgtgaacccagcggcgcgggcaaaagattccatctgacatttctgaaggtaaaagtatctacgagctcgcagttgcgaatttaagagaaccatatcccagaaaattagagaaatccagattttaaggagtgagcgtacaggtaaaagacagccgtcgtccagcgaacgaactcgttctaaagctgctgaaaggcttgattctcgaaacgctggaacagcgcacagccccccagaggacgcgaagactccgtcaagcgacttgtgcgcacaacaaggactccgcatgagaacatcgagtaagagaatctgttgttattccggagcgtctgaagatttcaaagacagcaaggcgaattccctttccaagtgattccctccacttcccgaaaaagcgactttaccctgagaattgcatcacgcgcaggtggtccctaccacctagcgtgtcaaagtcagctagcacgccggctcgccgctttacaagtcccatcgaagaagcttttcttaacgacctctctgcttctcttgcctattgggattgaccgtcttccgacattgcttggcgggagaagtcattctaccaaacgttgagtgatatttcgcccctgaactccctcaagctccacccaccgcgcgaccccgtgtctggcttaccctggaagaggcaactgaggccacaatctagctccgattcgtttctaattgtgggaaatccgctctgcacagtcgtattcgcgttcgattccctttctctctttcaagctgctcctatggcccatatttttgccgggaacccgggcgtggactcccctccacggaaggggacctccggaagtagttgcttgtcaatttgcccagaaggaa

SEQ ID NO: 1056 - DNA, 5039 bp, Toxoplasma gondii
  source 1..5039: mol_type = genomic DNA
acacgagacggaagctgacgaagatgcgaggaagggtgtatgtacacctcagagacggcatcactgccttcttcctgataatcctgcttgtcgtcacaccgcctctgctcgaaaaagctctctgattctgtcatctgttgttcgagtgagagaagttggcgagagcacttctcccaggaaaccgtctttgcgcgtttttttttacctcggtcttcgaacatcctctcacgccgctgtcgatcttctgtctctgctctttcgtccccttgtgtctcctgttggcgccctcgcctgcctgcacaagcaactctccatgctggcatttgagaatagccgcaaaggaaacctccacggaagagaagcgcatagtttttctcgagtacttcttttctcgccttgtcgtttcgcttttactccgaaaaaattctcaaaattcataaaaaatggaaaaatgaggtaacgcaaaacagaaccattgcactgtcagcaacgtattggcactgaaacaggatcttcgctctctctctctctcgacctcgttgtccgtcgttgttcctctcaagaggttgcgaacaagcaggctcaagcagcggcggcactgaggcagagaaagtgaaaaacgcgtttgcaagagacaaagaggagaagagaaagaggacgagaaagacgcttggaggagaaggaggaacagagaacctagaagagaatgaggctcgaacagcgacaggcggattagcagaaccgctcgcggaagagacgagggagaggagaaggcacaccacaggcttctgcgtagtcgagaggaacagggaacagaaaacaaggacgtccactcaacaagcggtcagatagcatttttgacaacagagattcgttcatcgcaaacaagactgcatgcagagtgtgcgagtgtctctgtgcacactgttgtcttcagtcttcagcgggagaagagaattctcttgcaacaggagacagaaaaccgatattcgcgttgctgctgagaaaacctcgcaaagcgctgttctcctctctctgcaaggtttggattagaaaggccgcgaaagatacaagttctgcatgcaggttgtgctgggtggagccaccaacgcggaacctgaatcgagacccgctggcacggacagataactctttcgcatgactcagactttctcttctcgcgtaaagccaagagtcactctgtgggaagcaaaaaagcctattttgtccccgcggagttctggaaaaaaaacaagaaaacgcgagcgaaaggcggtcgctagatacacactgcatgcagacgatttggtctgtacagcgagtgaccctcacaatatctgtatctatatctctatctatagatgtatatataaaagcatgtatgaataaatatacattttatgtgtataggttccttctttgatcctaggcgtcattgaaacgccacactttaggagagtccaaacgaaaattggcgatgtgtgtatcggttggataccgtatagcgcgatgtttttcctttcatcgatttaactcacctctcatctccacatctacgcccgcgagctttgcatagtgtccgctcacgaaggagatgggccagcaaccgcatctgaatttggcagtcgcagcaaagactctccagaaaaagcattgctaaattcctgaggcgataactccaccagtgtgatggcctgcccgttggaaccaccctcgattgtactgcctggtgattttctccaaaacatggccggggaactctgaatactcacttgaatgcgtgcgcttcgccatactctagtttttcgcttgttgttgtactcgccgcgaggatcatgttgatccttttctttctgagcacacaactttccaccgagaaggaatgcctagcaggctcagatcgtgaggacacagtgccctgtaggagtcggttccaaatgtattctgttttttcgtcttcgtcggccctgcgggagtctcgtctacgcgcaggtatgtcgaagcgcgagtcgctggctgcgcaaacggagcgatggaaaactcttcctgagatgctaggaaggccagtgccagcgcgctgcgaaccctcctctccgaaaagtatttacgagctttttctgaagaggattccccacacgctggactcccagtttgagctctgaaagccttggtctaccggatccgaggcctgttctgttaacgagatttcaacgacctttttttctaggaggcgcgcttccggtcaccccagcgatatttgagaacccacatttggatggaagctttgaaaatgctgcattggtttgccagtctcctaatgataatctggaggaaatagacggatcaaagtcttactgccctcgcgcctttcgtctccgcagacgccggtagtcacccacacatctcttttgcttgtttttccttagatagacatggcatgaccgtcgaatacatgacctcgtctctgtcgacgaactttcaactcgacccatacattcatacatatatatatatatatatataaatatatagggacagagagatggatgacaggtaggtggaaaggggatagatagattatagacagatctatgacagatcaatgcagatggaagtattgttgataggtctgtttcagacggataaaagcagtgggtcgatattgaagagaacgatctattgtagagacgccgcttgtcaggaggggggactggggaatacgctcacgatgctccaccggatatacactgcatatgcacacccagaagtgacagttcggcgacgattcgaaacttccagagaaacgagaggagtttggggagatgtggatcgaacctgtcaaagtgttccatgtaaacttcgacgctacactgcaattattctttgagtcgtttctcgtccactcgacgcgcttgagccgttgcggggaccggggcgtttgatttgtctagcggatatggtttcgcatattttgtgcatctgggaggatttcttatcacgacaaacgaaggacgacggtgtagtttgggagtctcggcctgtccagttcgtgtctaggaagctttctttaaccgttgaaaagcaagcagcagacatgtaaaaccgttagaaagcaacttgaaaaaagcaaggcaaaatcgaagccgcctgagaggtgctccgcgaaaaactcagacgcacagttagagacatgagaaactcgtttttccattgaggaaatcatctgaggcagttcagttaccctgccggaagaattcttctgaggagctcctgtcgacgaaagattcgcagaatgccgatgtgtagtcgatacaacaggataacttgccgatacaatgtagaccccgtctccctcgtggataatacagttgaacagtatacatacatatgcatatgcatgtacgtatctatgtaaacgtagtcagatggaacaggtgagtaaagaagactcacgtaggagcaggttcttgcctccatgtttgcgtgacattctgtaactgaaaccggaattgttattggtgtacaatgcccactctctccagagtattctttaactcgaactggggcgcgaagtcgacagaaacttaggaaacgaaaacgtcgcggtgagcagtgaccctttgagttgtctttccactctcccactgcctggtctggcactccagcatgttcttcgggtacacagaagttccgcagaaaccaagtggagaaacattcgatttgcctgtcccttgcctcttcgttttcagactggaggtctctcgacagtttttcttgtgtaaaaagccgcccagtgaaagcgtggtgtgcagcacccaggcaacctcttctttgaatctacctcacaactagagtcctgctcagtaaccaaagtcgcagattgaccctgttgcctcgacttgcccttcttactcgtgagcgttgaagcctgtccaataatagttttctccgttctaagtggtggatcacgacagacgcagtcagacgcttttttctcggtggctggtgaaactttcgaagcggcgggcgggagcctcctcccgccagtgcgctgcgcgcctgcctggagttctctcccttttggcgggcaggtttcttccgttttctttccatttccccacgctgtgtgagctaacgtttctcccgttcctttcgcctcgtgaaaaacggcgtctttctgctctcttttccccgcttcccttcgtcatgggagcggtcgagatccctgaacgacagcgagcgctgtgcgcgccagtccgagacggcgcgcgacggcgacccagtttttggtggagtttctcctccgtgtgtgccttcgagaaaagactggccagttccctttttgtctctccagacgttttttgacgcggagtgttcgctgcgcatcttcaccttcgaactctggcgatcgtcctctaactcgcggtcgacgcgtcgagagaagcgcgcacactgtccagcgcgttcttggtctcacggcagcacagctatgtccgacgtcaaaaactgcggattcctcctttctcaacagctttttctctcagatctcttaatcttttctttgcctttctctgtgtacgacctttcttttctctcttctgtctccacctctctgttccaatttttccgatcacgctcagtccacctcgtccagccccctctctgtctccggtgactcgcgtctctcgctagctcttcgcttttgacgttccgctgcagaagccctcgtgaccgccagtctccttttctctctgtcgcttttctcgctttttgtcttcgctcctccggctttctttctgccttcgttcctcccgcatgtccctgggcgtttccgactgcctctgtcacgctgtctgccctgcctctcgcgcctgagaagaactgccgccagcgtacacccgaaagcagagagaggacgcctcgatgcgcgccagccttctctctcgcgacatacacagacagcgttgcggtccccgcagcgtcctctttcctcccccagcgcctgtgtttcgctgccacagccgacctcgccgccgcca

SEQ ID NO: 1057 - DNA, 2034 bp, Toxoplasma gondii
  source 1..2034: mol_type = genomic DNA
aaacaggttgcggcgctttcaaaacctgtggacgttcacggagacacttgggggttctctccaaaagcgccgtttttctccgtgaagaacctccgccgatggccggtcgaagccgagcggagaagaaatgtgtaaaaaacgcgcgtttaaagaactgcgtcaaaagaactgcgttagaaagggagacgagcacggtgctgttcgaagatcccgagtttcttttgagcggtgaaccgtgttttttcgagaggcagagaaacagaagaaggtctgtgctgtgcttggttgcaggagcgactggacaagctgcacatcgaggagagccctctcgcgatggagaacgtctttggggactttgttcgggacagcgaagatcgtcgcggcaagaagaaacggaaagtgggagaagcgtagagtaggagaccgatttttgtgtcaaaaattgtgtttcgttttcaccaaacccccctttctctccactctcttgtgaacacacggtggtccactttggtgcactttgtcctgtctggcgcacctccctgccgactgatgctccacttcttcaaacctcgcgcatggtcggaatgcagaacgccgcgactctgtagctgacagcgaagaagctctcttgcggctctccctattttttgacgcgcctctcctcccgccagtagagagtcgcctcaagcgcagaacgcgcctttctttttgtttccacctctttctgccacactccacatccgccttgcagccggcggctctcacaagaagttacgtcctcggcaccaagccggcatgaaacgttcgagagactgcggtgggagcctccgccgaacttaacacgtcatgcgcagatgctgccactggcgctggacaagcggcgtgagacccagtcttagaagagcacaagaaacctgggatccggagaaaacacgatacgttcaccatctcaagctgcagcgcagctttgtgtggtgtcgaagcgccagaaaaagcgtataggacttctcagagatgctttctcccagtacgatggctctgctcgctgtcgagcatctgagtctgttttctctgtctctctctctggttacgagtgtggtagcagggactttgtccatattgaacctagagggcaaccgatagtccgacacgatggttttcaaaaggaaactgaactctctccattttgtgctttatgaaagtcagttcctcgaaacacaaccgccacagggcacccagatagcgtggaaaacggagagaatttccttgaagaaacgtggttggcaacgcacacaaaacagagcgtcagaactgtgttccagaagagcgtggatccgctctctcaagaaaggatgaagtgcagtcgttttgtgtcgagtaagagtccaggccctgttcttgcgctgtgttttctagctggaggaccttcgaaaaaagacaaggtgtgaggacgggaccgttataggaaacacggagacttcaacacacagaggtccgtttgcctcatttttcgggaagtcacgccaaaccccaacattttcgaagacctgtcctcgcgggcctgcgagtgaaacattcgctttcctatctttcgttctggaaagaggcgctgccccaccttgtttcctgaagctcgcgcggtcgatgttcccggttccgctgtttcacctgtgcagcctgtgggtggcgcaacagccgagcagcgcggtttctgcgcaccttcctcctttattgtagccacttctttgtttgaatctcttcgccttcttcttcgctcgtctcttgtgacaagcctgtgactttgtcatttcctcttttctgctcaagctacaacgcgcttgtgcgcacgacccaggctagctagcgctcctcgtcccggcgcgcgctcagtttctgttgttgtctcgagtgttgtctggaatttcacggtgttttttcgtgtgtctcgagggagtttcggtgtttcgctccgcgctgcttccacggccgatcgtgtctttttgccgtgaaaatttctgtcttcttctcgactca

SEQ ID NO: 1058 - DNA, 1773 bp, Toxoplasma gondii
  source 1..1773: mol_type = genomic DNA
gatgcaagcaaacgtacttcgtagagctcatcttctgtcgtagaaaagttcaagtttccaacgtacacgacgcaggaacgcgaaactttctcctgccagtcctctttgctcctcgccgtccggcgatcgtagtaggtgtcgcggcctttgatgctcgcgtagaggcgcgacatggtcaagacgaacgcagaaaacaggagaggcaacggagaagaaaaggagaagagaaggaagaaaggggagagaaagaagaggtcgtggaggaagaagagtaaggaagataacgaaaggaggagggagaagaaagacaacgaagagaggcgaaaggactccggcgcctaagaaggaaaaagaccggagggtggggcagacgcagagagaaagaagcgaaaggaacgtggagaatgggagacagagacggaggagagaagagagaagaaagaggagacgtcgaacatgcgagagaccctcgcgagagggcgaaaagacggaaacggggaacgaagaataagaagggcacagacaacagagaagaaccggagctctcccaacgactgcagcagagaggcagtcgaaaaaagataagcagctggactttttcttcctctttcttggcagtgaagaagagcagaaacaggcagacgaagaagaggaagcgtacgcctcgaaggagagaagcgaggatgccaaggatgaagatggtgaaaagcagacgcgaacaagagagagaagagagagaacaagaaagagaacaagagagagaacaagagagggaaaacaggagagaaaagaggagagaggacaagacaaagaactagagcgaataagagagaacacgagagggaaaacaagacctaacaagaatgaggacaagagagaactcgagggggaacaagaatccgagatgtcggagagaaaccgcggcaaagacaagaatgaagaaggcgacaagagcaccaagacaaagagattgcctgtacagtgttgcctggtcttcctgcgttttctccagagatgtcgtctgctggagatgatgtgcaaagagcagcagcgcgagagaaaacatgactctttctctctgagcgcatgcaccggtcgccagctccgctttctcaacctgcccgtctctcgtccctgttctgttctcttttccactcttcttcagagccactgattctccgtcaatttccctcttgctcttttcttttctttcttccagactctccttcgcagggcgtcgcgacggtcgcgcgctccgtcagagtggctcttgaggtcgagttctgattcgccggcgccaacgaggcttttcctttttttgtttcctcgttccagttttctgtttcgtttccctcttgttttctttcctttccagggtgccgcgccagagaaagaaaaacagtggaggcactcgaggccaaggaccccatgggtgtggggctacgagtgttgactctttttgtctttcctttttccactttgtgtctcttcaccgggacccagttctgttttctcagaaacgaagagacgcgaagatagtcatctcattccctgtcctgtcgctcccgagtcttctccccgctccaagatcctctgcctgctttgtctctttattgtctctcctttggcattctctgcatttccttcttccatctctttcctttctcttcttttctctctctgccttatccctcttcctcttctctctcttcgctttctctccttcccctttcctcctcctcttctctctcttcgctttctctccttccacca

SEQ ID NO: 1059 - DNA, 3684 bp, Toxoplasma gondii
  source 1..3684: mol_type = genomic DNA
ttataatgctgtgcatgtgtataaatgcgtacatatttgtctgattgcttccgtctggggggctgcgcgacccccacacctgctgacagcgtttcttccgtcgcttttttcctttttttttgctcgtggtgtccctacttttttttgcccagccttctgctcgcgtcttgcggttcgctctgcagactgtgcacaccgtcgccgtcgaaccgcgatccgttcgtccccatgcaagccgtcgcggtagacatgtttcctcacacccttcactgcgaaggcgtgttgctgctgtgtcgcttgtcggacgtcgcgaagtgccgccgcgaactggcgacgaaggcgcgagagtcgcccgcgcgcgttcaagaggtactccgcgcagtcgaggccgagagcgaccgcaaccgcttcgcggacaacgtgagaggacgaactgcggagccaactgcgaaagactctccgggacagagatgcgccggctcgcggacgaggcgccgtctgcatgcagagacagaagaactcttgaaaggcgttgacgaagccgaggacgcgggaactgcgaaaggccgcagcggccgcagcagcggcgggggagggcctgcgacgcgagctgcatatagcgacgaggatacacttgcgggagactcaggtgacatcgcgtctggaaagagaaggcgagaaccgatcaacgaccgcgaggagagttctgcagccgtcgggatttcggcggccagcaacccacttctggggtgaacgtgcgttttgaaattcgaggttcgccgcagggagcgcagcagagagatccaactccagggtcgacaaatatggcatgtttctgaggtcaagagtccgtcaaacaatgcgaatttcaagtttcctgaggcgctgaaaaattgaggcaaaccgctcttcgggaaacatactacacgcttgcgcgcggcgagggtgaccacagagggatcggaagatgctctcaggctgctaactgcgcttgacatgtcgtacggtacaggcccggcggcagtgctgctttcgggggagagaggcctaagtagaaaatgcagcgggaaatggacgagcgccgctttagtttaacggcggagacgtttgcaacaaagtccgaaactgtttgtcaaaaaaaagacgtggaacgtaggtaggggaaaccgcttgcaaccatgcatacaggcaccttcgtttcgtatctgcgtcgccaccgttttcagtctttgcgagtttttctcaccaaggaacgtggattctcgaaacagctttcctgtcgacgcaaggcaaaacccacagagtctccgcgcttaatctttcatgacggctttccccggtttgccacagaatcaatgggcggaaattctacgcacgtccgatagatagacagcgctgtgtgctgcggatgaccttgatgaggagcacaggcaacaacagaaaatcgcatttcgtttagtagacagtggagtagaaattccattcagatgcggtagaacgggagcgctgtgtgatgctgaggacttgaggatcacaggcaacagaaagtcgcatttcgtttagtagacagtggagtagaaattccattcagatgcggtagaaagggagcgctgtgtgatgctgaggacttgaggatcacaggcaacagaaagtcgcatttcgtttagtagacggtggagtagaaattccattaagatgcggtagaaagggagcgctgtgtgatgctgaggacttgaggatcacaggcaacagaaagtcgcatttcgtttagtagacggtggagtagaaattccattaagatgcggtagaaagggagcgctgtgtgatgctgaggacttgaggatcacaggcaacagaaagtcgcatttcgtttagtagacggtggagtagaaattccattaagatgcggtagaaagggagcgctgtgtgatgctgaggacttgaggatcacaggcaacagaaagtcgcatttcgtttagtagacggtggagtagaaattccattaagatgcggtagaaagggagcgctgtgtgatgctgaggacttgaggatcacaggcaacagaaagtcgcatttcgtttagtagacggtggagtagaaattccattaagatgcggtagaaagggagcgctgtgtgatgctgaggacttgaggatcacaggcaactgaaagtcgcatttcgtttagtagacggtggagtagaaattccattcagggacgatataaatgaacgacacggacttctatgtggtaagcatcaatctaggaacttgtctaaagcgtttcacatatcgtcactttgttctgaggataactgttttatatttctgtgtctatatctcgattaaacaaacgttgttgaataatttttattgacgttcacctgtacgaatcttcctgcgggtcgtcttttttgtttatcttcttcgctgggttattctcccttttctccccttgtttctctgcttggccatgcttcttcccgcgtttttcctcccctcttctccaccacattttttcacttcctccgtcttcactttttggatgtctctgggataaacagcggcgccttcggcttgcatgcaacgtcgtctttttttttctttggggagacgtaaaaaagcctcagacactttaactgtaaagggcgtctgtccgtcctgttgcacaagcgaggcggacccgcgtcttgttcatgactttgtttcctcgtttctgagccttccctcctgaaactccgtgaggacagcagctagatcgccagtttttgcgctgcatcgacagctggcgcgtttaacgcttttcgcttctgttcgacgcttcgctgctcctctctttctgtctgctctgtactatagcatcgtttgccttcccgcatttctctaagttggaaagaaaaagcttttccgcgacggtttctgtttccgcgagtgcattgcatgcgccgcggacaccgggtgtgtgtcggggacggtgcgttgaggtcgaattctacggtgtgttttcgcctttttgtcctccaaacgcgagcatctacgtcttcacatcacgcttctccgggtcgtcatctgtccaccattgctgcttttcccgaaccaacgccgtctttcgaacgcatatgctgacgacgacgcagacgcacaatctgcttcgtacgtccctggtttatccgcggaattccacatttttctcaactcagtctccgaacaaagatcggttctcttcggcctctctgggcaggcggctgtgcgtcgcggcggcgctctttcgtcgcgctttaatagtcacttcgagtggatcgagcagcccggcgccgccgactgttgtctgttccttcacgaagatggccgcacggtatctgaggatttttctcctttcttcttgtcgcggaaaccaagtaatcaagacgccttccctcagcgggtgtcagcgctcccgaattccttgctttttcttctgcggttagtgaccccggacacggccgtctgtcatctgctctcttcctgtcgatctgcttctcaacttctcttccattcttcactctggaactctcccccttttccacttgctacgtcttccttctcttgtcgaaggttccctcggattgctcggagaaaaacaccctcaggcgatctcgaacttctctttcttttcaaatcttttcccctctcgctgcggccacaa

SEQ ID NO: 1060 - DNA, 1273 bp, Toxoplasma gondii
  source 1..1273: mol_type = genomic DNA
atgccggatttgatcttgccagcctctcctagttggagttatttgtatttaccaagtgggaggggagcccctgttgctagcgatatcattctgtactttactcgaaatctcttctgcaggttgacgagccaaggtggttttccgcttatgtgctgtggttgtagatatcagtggtttctcagagcatctgcttttgtaggcgattactaccatggtcgatgcatccgttgtgggatataactgtagaatttctacatcttccatgatatgcagtaaaccttgtcctgattctggtgactcagttttttacattgggaagaaaaagctagaggctgtactcgcaagccaatttgattagccagtcctgctgtacctccggacttgagccaggcgactccacatggtgggtaaaaagcaacagacaagtttgaagggaagacatccgcggtgggctcattgcttctcagagtcacgtcgtcgcatctgattcgcccagtagtcactccatgaacaagaagccgtcacaacaacgcacattcactctacttgtcgatttgtaacgccgtgtctgtcatggttcgcaccccgggcctcacttggcggcacacgagggacggcgaggttgtcactttctgctgaaaagaagcagttctactcggtcgatccacgtttatcagaacacgttgtcagcggatagtcgggaggcgaaataatcttcggatttctacagggttaccaacgctgttgcggcatgtgtctactgtatccctgtgtaaaggactattattattcagttgagaaggcacgttggtgtctcattacttttgttcctggatcttttgaggctccgcacaacaaagcaacagatctaccgtactaaagcgcgagcccttattgaatacaactgcggtactaggacactttggacaggaacgtcatgagaggctgcgtcaagggcaatgcattcttcgtgtgtgtagtttttggacagttgttacatcgttgcagaaccgcaggggagtttagggaaactgtgcgaatgtacaggcacgccgtgtatgactggataaccagtgttcccgtacgccacagacaaaagcagagacacagtgtagtgacacccgaaatattgagcgcgcaccgctccaataacggaggcaagcaccgggcgcaaggggaaatgcactggtctcgcgccgttgacaagccacaccggtcaacggtggtcgtctgtgttctacgtcatattcatatcggcattactgtagtggca

SEQ ID NO: 1061 - DNA, 1857 bp, Toxoplasma gondii
  source 1..1857: mol_type = genomic DNA
gttgcagatgtggacgaggcaacaaagaaggaagttcgtgatattctcgttgcgtacgacagatccctgatcgtcgccgatccgcggcgctgcgagccgaagaagtttggcggtcctggtgccagagcacgctaccagaaatcttatcgatgagtgttttggagggttcctgtctcccctgttcggttttctgaaggggaggaagggaggtcttcttgtgtgctcgttgactcttttcacttcacccttgtggatcctctttcttctttggcgcgcagcccatggctaaagctggtacggaagactggaagtgtgagtattctaaactgtgcttcgaaaacatgcagccttctgggcattgtcggctagtgtgtagcctgaactgtgttgacagcgcctgaaaagtttcgagtaatcataaagaagtcgcctgtatttgttccctcgtctggaaagacacattcacccaggtccagtggtcgcgcggctaacagtcacaaacggacggaggcaccttttgtcgacatccatattcgcaaactccccgctcagaagcgcaccactccactacataatggttgtacgaagatactagagtccatagttggttgtcagcagatcaatttgttccgtgcgtcttcgcgcacggaaaaatcccagtttttagtgcgtgactgttggattcagtcagaaccaacatctggcctggatttgcaaacaagacgttttgtctacgtatggagtcgaacaaaagctgttttgtagaagaaaggttctcatcaaacacatttaacccagttcagctgtccaactgattctctcctagaggacgtagaccacgtgcgaaaagttgacaaagagttgtcccacaagcaacgtcgtgcgccactggatgcgattgtctacattcattggagctttctttgaacactctcattcgacaagcacttccactagcagcaatgtcaattatggaacatcaagcgaatgctgcggccactacatccaagacctgcacctggttccttgcgtagcgcttcttagcaattgtctatagacaccggagaactactgggtatgtcaagtttctattagctgtactgggtgaatgttttactcacaattcatagttggtacgatttttaaacgtctcttagaactgccctggtgtatgtgttgacaagatgccggccactcaggaaatggttatggacatggagcctaattccgaaatgcacggagacgcacttgcccaggcgactcttgcagtccaaaaatacgaaacagaaaaagaaatatcacggcatatcaagaccttctttgacgcaaagtactcaccaaactggcactgtattgtcggcaagaacttcgcaaactacgcgtcctacgagtgcaagtgctaccttttcttctacgtcgggcagacagctgtactcctctacaaaatgggatgaccctgcttgcggcgacgtagtagtacgcaaaattgttggagtttcctcgcagcattttttttcagtagatctccttttctatgtctagtcccgttcctacatgctctgtgtttgttgtgcgcactttccatttctcaggcatccactgcatgccagacacaatgtccgctgcttctcactgtgtcgatctttttaatcagtcctgctaacatgagggctcctgtgtttaccgcatttgtctttcatactgttttctgtgttctggtccacggttttactggcctgtgctacagactgactcctcctcttctcccttccgtcatctgtctccgcagcacacctgcgccacaatcgatcacccctacactgcggccaaacagtcgtcgtgtcctgaacttgttta

SEQ ID NO: 1062 - DNA, 1774 bp, Toxoplasma gondii
  source 1..1774: mol_type = genomic DNA
acgttcttcctcatcagatgatggaagccgagggatggatttcttaactttcgcgatcagggcgaggatcctcttccctgaccgctgaatgccactgtgtgcgttgcgccagtccgaatacaactcatccgcaacagaataatggcgtgcctccccattctcaaaattgtccagctttctgtccaatttgtaagctttttctgcacccggaaagaattctgttgtcaggaagtgggcgatgagtgagggaattgattttgtgtgactcgcgcccgcagcgtgcaatcctaggagggccatccgtcgcgaaaatagatcacccgaacagaggggtgtggcctacctgcagcttgctgtgatccctctcggacatgcagtgacagtgaattataaggtccttgtgacgagttgttgtcctccagtgctcctatttcttggacttggcgttgcatcttcgaagacacgttgtggtacgattttcggcggagtgattttagtatacttcacctgtgagaatatgttttgcatcgcctcaaaatccgtctgcagcatttcagtgtcgccggtcgtcaaacgattcttcgacaagagaaggaaaacctgttggtggtacgtttatcgatgcatggcttttgaggtctaatgcttagctgacattttcgagcagcggcctgatcctgttacttctgatttggaccgagtcgagtagcttcataagggcttcatcgtttagggcttgtctctgcgcacgagaaagggactgagatatcatggctaagtggaatgccacacctgacaacgggccataaagaggggactgcaaaagttttgcgtcaaggacctcctcctgtcccgggagaactcgatacgcacgagttgtgccacaacaaaataaacagaggaaaatgacatttgataatcccattttttcaaatgatgctgtcaaccgtcagaaaaaatggttgtccgcgccacttcgaatactgccgcaacctgtcgggtatttagatatcctgtagagttgtaccggtgtgctgtacagacagtggaggcgaacatgggcgacccgaaggggactgatgatttctccggaattcgttttttcataaccctaaacaccgtctcccgaacagtcacgacaagcaaatttttaggcggctgaatctattcgttctccacgtccttgcagtgggcagcgtgcacacgctgtacgcgtgctacgcgatcatacatggcctgctacacgctgctgacgcgtacacaagcgcctccgacattcgacaaatgtggtcaaagaggtacaaatggtcgtcgcgcacgacaactgattattgaatacaaaatagcaggctagtagtgaataaaacggaatgcagtgcacgttgcgagacgcgatgaagtatactcaaagcaacgcggtgcgaatcgcatgcaattgagtgacgtgctcgtgcttctctgctcgttcaaaatccataactgctttccactatggttttttccttataaaaccaagaacatgtcatagtatgtaggcacagccttattttgtcggtttcgtgttctggcccctacgtttttgctcgtacgccagcgacgtcatccctccggacgatggtgagaagaatctggagacggtcccgcggcgcagttcaccgccgcgccttttgaattaattccaaagtttttgccaccgtagcttgtggtttgcatctagtcagtcatacggagacataggcatcgcattattagcgcccagtcctgtggttgctga

SEQ ID NO: 1063 - DNA, 1695 bp, Toxoplasma gondii
  source 1..1695: mol_type = genomic DNA
ttccttttccttccttgccttccttcttctcattcgtttctggcggcgtacgtgagggatgcactgagggccggcgccacggcgccgaggcgcgaggctgcgacgtcgaggaaggcgagagtcgccgtcgcaagctctccgtcggcagtcttgcgttcgcgtccgcgcgtctgcgacgaactctccagtctctcggctctcctctccagcagactctccactttctccgcgaaggcctctctcacttctgcaggaaaaagctgctcaggcgcttccgccctcacctcctctgtcacgaatccaggtgaagaagggaaggcggaagatcccgaagaagatgaggcaagaggcgggtgtgtacggattctgtcgctgtccggacaccgagaggtggaagaagaggaacctttgactggtcttgtgtctttgacttcttggacctgtttcttctccccttgattcgcgaagagaacggagagaggcttcgaacatgcgagattcagcgacgcgttcagctgtacagacatctgcggggagacagacgcggagtcttggccccggagggccgcagcgatttgcagcagagaggccatgtctcgctttcttttcgcgcgtcaggttcccctcgtttacctcatatctttctcttcttccgaggctgtcttctcgcgtttctcgccgccaaaagaggactccaagagacggtctttcggaggagaagccccgcgcgagacccccgcgggtgtacatacaccggggcgtttcagaagaacggacgcagtttcttcaagaaatccctgatcacgcaggagctacctcagacgcagcctgcgcttgaaagacacacgcaactgcacattcaagttcacagacattttagttctttgcttaacgttttcatgcatgcacctttctgtccagaactgaatacttcttctgttgaaagtctctgggtctgcaggcgaagacggcgaatcctcctccctgcacgcgcggtgagggaagaagcaagaagaagaaacaggaagcaagcaatcaggagaaaggagagaaatgaagacctttcttttcttcttctcagctgacggcgagaagctgcatgcaccgttctacctttttcgcgccttctctgcatgcgtcagcgccggcggcgaaagccggagatccagcaccctgaagcgcgttgaggggaactctgttcagaggttctttttctccgaggcactttccggctttctcggaaaagccgacagaaacgcccgccgtccaacttcgggtgtagctccactcgtggttccggtcttcggttcgcgaggtcggaaaagtctcgtcgctcgcggctgcgcttcaaatgcgggccgcactccagggccgttttctgtcttttatgccacgtaaaactttcattccttttccctgttcctccccttctaggacgatccctcattcaacttttcctcagtttctacgcctctcctctcggcttccaaacgcgctgtggctcgtctctgcgcctctcggagccccgaagcctcaaggcgacatgcagaacgcctggaacgaacgcgaaaaaaaggaacaaatgacgcagcggagcgaggggagaaaaaagagtcttcagattcctgaactgtccacgtcaccagagatctacaactgccttcttcctctcgccctcctctccaccctccacca

SEQ ID NO: 1064 - DNA, 2947 bp, Toxoplasma gondii
  source 1..2947: mol_type = genomic DNA
gagtaaggtgcttgtaattgagttgcgtactttagcagaccacatgtgagcgcttaagttggcagcaggcttaagtatactaatattttttttgttccacaatgaccgacaatagcggatggtcagcaattgcagggatcctgttgtccgcacgttctgtatgttgaaggtgcgcacaatccagttctcagaactgcaccgctttaacaactgatcaacacgtcctcacgtttctcattccgcgtgaacgcaacggctttgccggtttacggcaaatggccctagtggggcagagattgggagacagcatgcgacaggggccttctcttgaaaaggaacgtcctggcctgtgcttaaactgcaatggacgttcagagtctcagcatttgctgtttgtggacttagcgcctctcgcttgagttgccaccacatggataagtgaaccattagtaccatgaggtcccctctgtcaacatacattatgacacaagcatatgctctgcaatcaggaaataattcctctgactacggcgcgcgatggtcccgagggacagtaaaccctcttcacgtatacacttaccagttctagaggacgcgcgcactggaggcgaacagcctcccccaaatcccgtcttgctgagatctgcaaggtaatccatatcgtgggataatcacattggcacggttgaaggaaagctgcaaaagctgaagactgattacattgttttggtaatcccggatattgcgttgacgttcgctgctcgaaatactttcgagcgacaagagcacaccctggaactgcagtaccgactaaatacgcacgtgccctcctagcgcgaaatgtgatcacggttatgtctagcaattatcagagaaaagagggcgtgtcatgaaagacaacatgatggactcttcgaactttgcttgagataaaatgcgccagtgcaggacgtcttagcatactcctgcctgtgaaagaggccaggttccctggtactatgtggactgcttaagacagctaaaagcgttggattttaacgtacgacattaagactgttcgacatgggttatgttataggcgtgtgtgataatacacctgcttgccactaattcatggattccttttccctttcgcggattggaataccacacaggccttctgctgaagtgttgttttgagcagaacgcaagagcttacggtaaggagcgagaagactacaatgaaacctcgccattagttacggatagcaggatcctcttgggtggcatatcctcgttagtggatattcgatctggaatcgtttgcacccaactgctcgtcacagaaaaaatcggggcatttatgaactcgaaagttccccaccgttgacctgcgagaccacgacagtcaacggactgaattgctgggtttcgaaggttcacctccaccgacgttataaataatatagaacttccactgcattgaaaaacgatctcaactggatggggctttgccctcgcaggattatgagacatgatgcctgatggttcagagccggtagtacgacactcccagttccacccaaactgccatttatgcgcccgatcacccctagacacctccgtcgcttcaactgcaacagcactgcccctgatgtcagaaacctgagtacatgcccaggtcgccctggtgtcgctcgatcaggaaactttatgcccattttgccaacaaggatctttcctacgccttttcttccgctactgggacttgttgccttccgtccgtgttgagacgttgcctgatgcaaagaaacgatgctatgtcgctttcatgcaaggcaacaatacaaactgctttgaggaagaggcatagtgcatacagcacaccacatcagtgaccccccaaatgcgtttgaatttctacaaggaccccaacatacggggcttccctgtcgtttgctgattgtcttgtcgacaattttttcttgttcgtccaacaaagaaacacgtcgtgtgacatttcaaaatctctcaccaggcgtacgggtcgttttacgtttttttctgggttgcaaactagggcagcttcgtgcgtcagagccgggtatcatcggcactgaggcagttttcacaatgtcgtgcctcctcgccagtctgtgacgggcaagtcagtggtcgtgcgctgaaggcgagaacgcatatgtacaaatcaaagtgcagtatttgcaactgcatctgtggatgaccgcctattgcagtgactaatggtagcatttcagcagagtcctcgacatctgcgatccttctatgcctcgtttgctgccggagcgaaaaaaattttgttacggtgctgacccacctggctgcggcggacgcctgacgggaatgcatgtctgctgtgtcttgcgcacgcggcgggtgatgagttgctggtgggtttttagaagttttactccccgccgaagacttttctggcaactattgtcttcttccagttgagctgcgtttgttaagctgtatgataaaaacagaagtgggtgtcaccggtcaattcagagattcgtgcgcaggatttccagcttcgttgtcttgtctcccaaattcctcgtccttgaagagctcgacacgacgtcctactgccggtcttggtctcggccgattcgagtgtttccctgcattgtttctcaacttctgcaagtcaaaaactttccttgtttgtggcttcgccggcataagcgctcaaacaagcacgcgacagcggtacgcagtggtagctagtcgtgctgcccggccgcggaggtggctccagttgccaaacccaatttcgctgcttgccctcagaattcgcgaccgcacattcctttttttattcacggaacagaagcatctgttgtgaggttcgaaacgtggttttctgtacacgtagattcgacgcacgtgccagctgtttccgagcctattgccagaa

SEQ ID NO: 1065 - DNA, 1974 bp, Toxoplasma gondii
  source 1..1974: mol_type = genomic DNA
ttcgattcgctcacagacgccagtgcggagaaagcaacacgtttcagcctggggggcttctctcccttcttcccctcttgcttcctctcccccgagtctccggaactcgtccgttgccgctgcgtcttccttcgcttcttctctccgttcaccactcttttccgtttccctcttgtctccactcttcttctcttcgtctccacgctcctcttcttcgagaacgtcgagctcctcgggctctctgacttgtctgtgcaattctctgcactgagggcaccacaggaggtagagggacagatagtctctctctgagtggaggcgcgattggtctgtcttcttcacctcggtggagtgggcggctctgaacggcttcgcttctccggcctgtgaagccttcgcttcgcgtttcctctcgcgttcgcccgtctgacttctctccccgcgttgctcggcctcagcaagttctgtcactcttcttctttcggaactctcgaggtcgcgtctgccgtcgacatctccctgggttctcgtggacgccgggagtttggattctgccgcgtcaatcgaactcagaagcgactctccttgcaggcttcctccaggcgttccactgcatgtacatcgacaccgcgaaaagggaggaggcggcctgtctgcgcggtgtcgcgcgtcaggcactgtgactgctgggggagaatgtggcggctccctttcgccttcagtgtgtagagagggtgaagaaaaaaaaactctagaaactgagagaagcgcagggtcgccggacgcatccccgaccagcagcgcggcttcagagtctctcgccttccccacgagagactcggcctcgccgcgcggaaaaaaggagctcgctcccgcggagaagcctggcgcagacggcgaagaaggggaacaaagcagacaacgacgaatacctttgcagccacaacgaggcgcaacagacgactcagaaggggaagagtgatggggagaacagaaagaggaaacggaagaagaagaagaaaacgagggagaaggagaagaggaagaagaggcagcgtagagacaagggtgcgcgggatcgattcgttgctgtgttggcgggcgctgttgagcgccttgcgagttgtgaagtgccattttctttcaggaggactataggcgtggagtttcgagagaaggaagagacttctgcgtctggggcgaggagcccgaaacgctaagacatcccttccactttctttgagtttattccgacagttttgaggcccacaacgcggtgctgtgcaggcacatgcaaaacggaacgacgccgacgcgcgaagggcgcttggcgaggacctttcgtcgtctttcctcttctctctttcttctctctttcttctctctttcttctctctttcttctcgctcttctttgtcttctctgctgctggtgtctagacactcggcggggccttttccgtctgtttcttcagtctgcatgtgtgcgacgccttcgcgatttggaaaggctcgcggaactctgcgcgggcgcgcatgccctccctccccaactcaacatctctctcgtgtctccctttgcttcttctctccgtctcccgctcttcttcctttctccccgttttcttctcccgccctctcccttctccccggctttctcttctctctgtcatctctgtttgcttctttcttcctgctttgtctctcgcggttgtctttctgttctgctctttttcgggtgtcttcgcgccgctctcgaacggcacgcgacgagtctcttccccagccgaccgcgcggtgccagccaggaccgtctctctcgcggcgggcgcgctagcgcagctgcggcgccgcgcggcattgcgagtccgcaggaatccgacgcagagagacgggattctgcagacaccaggccgttcggggacttatgtgatttctcgcctcaagtttctcggtccaaagagcgactcgtgta

SEQ ID NO: 1066 - DNA, 2284 bp, Toxoplasma gondii
  source 1..2284: mol_type = genomic DNA
ggggagaaggaaaagaaaaactgtggcgaaggagcgcacctcgaaagtacatgcgaaaagaaaaaaacgaacgacgcgaagaaggatccacgcctccagttctcgtcgcgctgtttcacctccaagttcggaatccaaagccccacatgctcaacaagtagcgtgtctcttacacagacatatacgtttatatatatatatatctacatatacatctttgtatacacatatatatatatatatatatacatctttgtatatatgtatatacatatgcatgcacacttgtgcatgtagattggtcgatagattgactgacacaggtcgaggcaagtccgcatacaaatatatatatatatatatatatatttatatatacatatacatacatatatatatgtatatatatatatatatgaagatatgaaagatgctgtgcatgcatttatagcgcaagtcgatttgggctggcgtgtccctttgcagaggattccgaggggaaattcgatgtgcgtagaaagtttggttcttacgtctctgtttccttggcttttccagcgtctccatttgtcgccggcgaggcggccggagactgagagcctgtctgctcgggtgctgggaccatggtggagaatcgagacagaacaagagaatacgcgacagagaacaggaaagagaatacgagagagaccacggggagaacaagaaaggactctcgggagagaagaacgacagtagaaggttctttaacgcgcagagcggagtcgctagcggaaagggctgcgcgcgcggggacgagagccgcgagtttccgttgttctgacagctcaggagactaaggcgccacacgagaaggcgaggacggaggaaagcgaaggaacctcgagaaaaaagagcgaaaagcaggaaaaaaggccggtctgcgtcgacagcacacacacactgtttcgcgcgtgtgaagacaggcgcccggacgagcctggaaacgaggagcgttcggggacgctcagagtcgcagaacggcgcttgcgaagaaggtgcagagaagtcaagagagaacgcgcagccgagttccctcctacgtttgcgcacaagcggaaaagaggcctgtgcgctctcgtataactcgcggcgcaacaccgggtgtacgtacacccgaaaaacttcgagtttggcggacaagcggctggcgcgcctctcggctgcaagaagctgaacgtggaccgagacgaatcgcttcttcctggagaaagtcgacgagcgtggacaaagaaaagagaaggaatctgcggcgaggacgcctccgcagacacggaggaagaagagagaggaggccgcgagcctcgaaactctaggcgcggaaaaaactgcatgcccgcgatttttcgagttcagcgctgaatcgccggcagtctcttttccaggcggggagaggggggggcggcgggcgaggaatccgagtttttctcagtgcgttgagagacacaaagccaaacgaagactggaaaacagaagagcgaatgaaacggtctgcggtgtagacggacgtctgcgcggaggagtcctcacgcgtttcctctctcgaatttcatggaacggaacggcctctagaggaagaacgcgcgagcatcttgagctttctgtccgttttcgggacttcgtctctaacttgcgttctcttctctgtctgacaatcctcttcgagttgacactcacgtcggaaaagctccactctggaaactccagagttcactctctgtcgcagcacacgaagaagtcgccctctaccgtcgttcttcttgtactcgttcagaccttcccctcttccctctctgttctgccgtctctctcacctcttgtcgccttgtcctcttgtcgtttatctccttgtttcaccgccgtcgactcatctctgttctgtcgtccttcacctcaactctccgcctttcttttgtctgttgcttgtcctctttgtctctgaaatcactatcgattggccagtgacgaggacctcgaagattcgcttcctcctttgtctccactctctcgcctgctgctcccgcttcttcgtggcgctctcttctcaggtgtatgtacaccccagcggggccccgtcttgtgtccgctttcggggcttggctgacctttgcagcctcttggaggcggggaggaagaggcgagagctcgcgttgcctcgcgtcctcactagcgggctaacaggaagaggctgtccctggttttcgtctttcttttctctttcttttctcctccttttctgtcgaaa

SEQ ID NO: 1067 - DNA, 1956 bp, Toxoplasma gondii
  source 1..1956: mol_type = genomic DNA
atcaagtgcgaaagacgcagacgaaaaggccaaggacacagcatcggctgcagaagaaggaaacgacgagagagaaggagatgaaggagacgacgagccatgacgacggctccgcgaggaaggaagagaatggagagacagaagacgagaagaccgccaagtcgaggaaggcgaagtcgaggagctcgccgaaaggagagtgaacgaagaacttggagaagactggtcgactgggtggaatggagaggaagaggagaaactgaaagcagtgtttccgaagatctttcgccaggacgccacccgggcgcaagagacaaaggcaggcgagccggagggagagagaagaagatcggaggcgaagaaaagcaagaaattcagagaggcgaaaagaaggagaaagcgatggcaggcgccggggggccgcatggtgcagatcagacggaagagaaagcgcggcagagagagccttttccgacgtcagccggaagggcatctgcgataaacgaagcagtgtgaagaagggagaagaggaaagacgagggactggggacaaagccgctacgcttggagtttgaaggggaacctagacacgaaagagacgagacgaaaagaagaagaagaagcacgggagaggaaggaaagaaaaagaagaagagaagccaggcaacaggcagccaggggaagaaggggaaagaagaggatgaaggggagacaaagagaaacagacaagaagaggagagatagagagacagatcgtctacgacgcatttctcgagtgcctgtcttgatttacaagcgagcatcggagcttctcgcgtctttctgccggtcctgcgaacagcgatgtgtacagacgcgtctggacgacagctgcgtcggggaaggagatggaaaatccacaaaacaagcagacaggctcgacttctctgaatgcaaaaggaaggctctgctaggaaaccactgcgtaaactcaaagcgcctcccttctcgagtccgcgcgcatgcaaagttgacatgaaagaattcctggcctgtcttgcaggggtcactcgcggaaaaagcggttacgcctcctgcttgcgagaagagttccttttctgcgaagtgagcttgaaaagcaaggccaaaccgatgaagaatcgcaggcaaagaaaggaaagcgagttcgcattgcgtccgactccgaagaaagacaggacaaaggcggcgacgcctatactggatagctccctctgtgaggccattggaggacgcggaggagacatactgatcgtgtctctgtctcggaagaagacagatggagaagaagaaggaagaaccttgaggagtctcagactttttttcaagccgagacgcaaagaaggccgtctaccaagttcgaattacagagttggactttttctcttggaatttcgacctccccaggtgactcccttcgcactgcgcgcgtccgacgatggagtccccccgcgtcagctgcggccgcgatgtcggggctgcatgcgttttttttattttagcggcggaagttcttcagtcgaagattcgcgttttccctgacgcagccaacgctctagcggttttctcttcttcgctgtcggcttccttcgacgtcttcgccgttcctctgctcttcgcgcctctccggtaccgcgcgcatctgtgtcccggtgcatgcagcctttcttcagatttctcgcgtcgtttagcgcgcctctggcttccctggatcgagccttcgtctcttctaccttctgttctcgaaggacgcccctctcggtcgttctcctctcgctacactggcgccggccttcctctcatcgtctcctgcgtcttctctcctcggcgttgcctctccaggcgttgcctttttcctcgcctaaaccgtatacccctgcgctgcgcgcctcttcttcttcagcctttttccaggagattttctttctgccgattcaa

SEQ ID NO: 1068 - DNA, 4026 bp, Toxoplasma gondii
  source 1..4026: mol_type = genomic DNA
tttccctttctccggattgacacctctgtcgtcttcaagtgtctctctgtgttggcatacattaggggattcagacttgttcattttgagtaagcgcttgaagaaacagacgaaagctctccatgcggctttgagtttttccagcatagtgcagggttcttttcctcctgcatcgttcattggtttcctgccggcgcccttcgcaccatcctttccaggagaagctttgcgctcagcagcacctagggctttgcctgcagtcgccgctgcatcattcgctcctgacactgcagcacggttcgccacgtcgtctgctttcgttacacctttctcaccaacagaagttgctttagcggctgcttgccccgttgcagcaacgccctcctcgtcaaaagagccagggcgcccagcaacttcgactatattgctgccaggagcgttcaatggactcttttcgttctttgttgcttcctttccaaggctgccctcgactgtcaaggctttggaacctgctgagtctccagctaccgctacatcatctgcgctcaccagatcctctcctgctgccggaacgaaacccagtcctccataaggttcattaacaggtaaagtcgcagttctgaaccaagacaggagcgcacagcacatgatgttcacagcgaatcatggcgtatccagagtttagcgctcctcactgtgttgtctgcccgagtggattcagtttagtcacgttatttcgttccccgaggaatatcggatataccacgtgtctcaaacttacggcacacatacgaatgcgtcctgctgtgcagtcggtctggcaaacgtggctacggttcaatgccttgaaagggtggccattaaacgcaacttgtttcagcttacgcgccgctgaaaagaggccccatactctggaaaatggtcactgttgtatacgaaaaagaacgagcgctgagtttgcatctcatctcggctggcttcttggctttacccgggcgatggtccagctgtgggttgcgctggagcccacgcgagtaccgtcacgagaccttggagaacaaggctggaggccaggaggcgctgaagatttgtcgttttcactgtcgtcatcttagcaagcgcacacacgtatcctggcaagcgttgcggttgcctaacagcgggagacatgatttacaccgcctcgctgacaggtgccctcacttgttgcttacagtgtcctcggacgaggccgttaccccagtcggtcatccgtgtgtggagacggcacagttcaggacgtgtcgaacgacagcagtggtaaatggaaaacagcgaaactggctgtgtggaaagtactggaaaagtgcgaatgcgccagaataactcgacaaagtactggcgttgaaacacctctgtagcgaaatcacactgcgaaaccaccctttcggtcggcgtggtctcgcctcgcacccgcccgcggtggcggtgtctcccgaaccagggagtcacgggccccgttttcggtgccgatcatttaattccaatgggactccactaccgtctccgtttgtccccaccctgttcaccgactgtcacccgaacaaaggcccacgctcttccctctcaatctttcgacacgtgcttcatcacgtgaaattacagaacagaggaaacatgttgctagaaagacgtatcttcgtgcacacccagaaacaactgaatcgtgtacctttctgcccgatccttcccccaggataatgcagaaaagctggaacgccctcgtgatttctccaaggtgccaccacgtgtatctctatccccgtgctacctctaatggggtggacagcaaatatccttcaaagggtgcattcagtcaatttctcactgctatcccgttgcagttcctcaatatctgccgtcccatcttccttgtcgccactttcaacacaaccatctgaacccattaacgcggaagccgctgtgcggtaaaaacatagcgtagcataatgcagcgttcgtctacatttcctgtctcctgcagcatgaatgcattccagagaagtagaatctccagaagcacttcctgtacaactttgctgcttgaaactttgtttcgttgctttaagtgtccctttccattactgtgtaagaatagccggtcagtcgagactttctgctgccagatgctgcgaccagtggtccctcgagtccgatttcctcctgtgttacgttgcgttctctgcaacggtcgactggaacatcggtgtttgtttctttctgcgtccttgtatcatgtcaataattcgtctgccactgtcataagctggcgaaatcaacgcacaccaaaaacttgcatcccagacacactcacaaggcatatgacatctgggagcgtcacatacaaccaactgacgtccggcattgggctattgcgtacataccagttttgcaatcgtcttttggtcctctctacggagaaaacaggttcttaacattgaagcagtgtccttccgcgcacaactgatacacgcactgcattcgaacacgatgcttaacaccattgcattcctgcaacaagaccacctccccacacatttttcactgatcggctttgtagacttctcccttcagcggctttccagcctgcgcatcactttcgtcgtagtcaacattactgcgaaaagtctgggacgggcacgtgtgcggcccgctgttggggctccactggagcctgggtttctgccaggccattagggctgtcgggggcctgcgttgtcgtagtgcttctgtcactctccacattcgcgagtttcttgccaacggtcaccatgccccttccagctgcttctttggccaccttgaaacccctaaccgtgtgcgtttttgccgcggtgaagcctttttctgccaccacctttgcttttttgaaggccttctcactgtgctgtccgacgttttcagcgaacttcaagaacttgcgaaacagttgttctgccactctggatgcacgttgggaaaccggttcttctggctcttgttgcctctcgtctgggagtggtggtgtatgttcaccttttcctctgcagacacaaaattctacatggcaccgagtctcaagacactacagtgcgtgggaaattggactaggacaatacatatcacacagaaagcgcacctccctagctcccatgggtgcgatgaacagtcagacggcatcactctccgaaaaaaaaccgtggcagctacatcatgttgtgttatacaaatctgcagccgcctatcgttcaacccctgcctctatcattacttttgccaacttacccaactgctctctcatcaagaggtttaccgctgaaaggcacgtcgactggtccctggttaacaactccggaaaactcggcagccctcaccgagacgttgaccagggcgccaacggcaacaaccagcaaacaatgttttacggcgaacattgtgaggcgatatgtggagaagaagcaatatctaatcaaaacaactattcgtgggacgagaaacaacgtgcgataacgacgcgaattgcaaaagaaatcgtttaatgaccctttctgtcatcagttcgcaggacagacagcgacgcaggttccgctgttcattttgcgtctctggcgtcgtctctgtgtagagatgttgctcgcacttagcctaagggacgacagggagtaggctgccccgggtcaatttggtttggacgccggcgagagacgtacgtgcaagtcaccagtcagtatcaccgtgcgacgggcacgttgcctccactggacggcccaagtatttgtatattgaccgtaaggactgacgtgatacgcgttttccttcgtggtgcgtaggtaattaaccttttgcgacgaacttgtttttcgcaagcctggctgcactgcggaacctatcgcatagctacttgatgaagcaaacgggaggcgttcgtccacggcaagtcacccgaggatttttcgcctacgagacggttggaaaggtcgagagcagacgactgtcacaaagtcctaa

SEQ ID NO: 1069 - DNA, 2776 bp, Toxoplasma gondii
  source 1..2776: mol_type = genomic DNA
ttcgtttcgagtcgtgtttcgttcgggtaaaacctggaacgcgtcctgagagtcacctgcagagactcaccctttccgcctccaccttgctggttccggccccctcccgccgcctgggtgttgacccgcgcaggcgggggaccgcctcccccaacagcagcggccactgcagccatctccgcggtgggaaagttgaactactcgtccaaatcctcaactctctgtttgccggagcgatgttctagcgtgtactcgtagaaccaacatgtttacacgtgcaggggcgcgcaacaccaatcagacagcaacttgcgctagactccctcttacacattacaaaacgcgatgagggagacagtggagagagagacagttgaagaatcagaaaataacacggaaaagtacacgcacaagaaagaccacatgcgggtggctaacggaaacacggggctaggaaggagacgaagacaaagaagaacgggtcagtgaatggggcagaagaacgacagagcataatgtcgagaagaaccgtgcaacggggaaacgaaaaagaattggaaggcgatgcgatggtgaaaccgcaagaaacataggcatccagggtccccgggtacaagagtaggcgttttgtgggaatctttgaaaacatggacagcaatggaaccgatgacacagacaacaaaaacgggaagcgcagaatgacaacgcaacaaaggccagagtcttctgaacggcgggagacgccagcaaaagagcgaaaaatcaggtttaccgtgggagccacccccgccattccgttctgctacaacaaccggacgctgtagtgaccgtcgagctttggtctccttgtcacaatcgaggaagtgtgccttgttttccccgtcgtcgttgctctttaattctcgtctcccatgcgggtaggaaacgagccggaagagcacacataactcgggtcaacccaaaagcaccgaatcaagcgaggatggagttgcctctctaactcccatacaaaaaatgggcaaagcagcgctctcgtctcagataagaggaagggaacaaagaaaagatgaggaaaaggaagaaatctagccgttccgcgagcacaaaaaagaaggtcgagtcgttggcaccggcgcctaccttctccgggcggcggacacaccagtggaaaagtaacaaaaacgactacttccactatcccggggcatccacagccagtaaaccgcttctggaactttaaaaaaagagaacgactcgttgacatctggaaaaattaaatctttagaacaacgtgtcagtcccgctccatcccgggtagccgtgaacagccgcagacaccttgttccgtgacggacagtcgacaggtgacccaggacaagtcgcgtttgcacaggaaagggggttttatctgcgtcccatcagagaggcgctcggacagatctccaacagtgcccactgtgggaacaaatctgtgtgcgaaacgtgttgcgagccatgtcagcgagctgccaaacagcctagcctggaaggtcgcatgcatgctgcgagaggctgctaccagagagtcaaacacgcgagagcggaagagtcgcccggcgtgaccagatcagcaagctggctgtttgcttctattcgacagatacagcccctcagacccatgctattcacatttccccgggacaagagacaccaccctagatgccacgcgtgtacgcgacccggttcgccgatgccaccaacgcgcgtctcgttccggcctttctgcggatccgagacttgcagcgcggcgcggttgaaaaactggtgtcttttgcgttcccggccgtatgcagcatggagacgcacgagtaacaatgaagggaaataagtaccatcgacttcgttccctcatagcgacggaagacatcacgtaacgctcgtgtcgacgtccaccttcactcacggttaggcagagtccttgtcggtgacaggccttgcgatttttttttacgttggagctttcgcgtgttcatatgcgtacaaacggtcttctgggcgagtgtctcgccttcttgcgatttgccaaacttccgtggacgcgggtacttagtcacaaatattgatcgcattatcaaacgcggcatgtcttgacggtttgagtcagccgctggcaccggcgccgcgggccccccgcttgtcactctagatttgtcctttcgtgaggcaaccggatccttctgcttttccagtatcccgtgtttgctgccttttttgcatcaacaacgaacgtcgccacagcacgcggagcttagttcctcgccatataaagacttggccagtctttggcacagctacgcggaggcaggcgccacatttttttttcgttcaaagggtaggatgtgtgtagacaacttcggactacagtagttgtgtcccatcgacttatgcttccttaagacgggtttcccctgaattctgcagactgataatgtcagaagtgcctttcaggtgtggcaaagtggcatttttgtcggcggtggcttctgtggcacctatcatgctatgaaggtaccagagcagttcgaaactaatgctcgtgtcacccgaagttggcgtgtggactccaagggcttctccgtggcaatgagtctcagcgtcagcagctcagctattctatgccggcagcagggaagaggctgagggtatcgatgtccccagcgaagagtgaggagactgcggaaacgaaagaggacccgcgaatacgaagggtttattccccatcttcttttcgaagaaa

SEQ ID NO: 1070 - DNA, 4905 bp, Toxoplasma gondii
  source 1..4905: mol_type = genomic DNA
cgctacagcattttagcctcccgaaaaagacctgaagaaacaagcaacggcagatgttgggggcggtgcagatgtgcgaggcgctgccacgaagtgggctcgtggcgagtgtgtacatacaccgggaagacacacggaacctggttgttgagttgcgttggcaccccgttcgtttaccgattccgtggatcctccagacctaaaagtgaaaccgtgatacgcacgcgaagaagcggaagcggttgacaggacagatctgcagaaaggcgccgttgccggccacgaaaggagaaacgccttccacttcaacaccgctctttgggttcgcccaaggcacgaggtgagctttcgagatacaagaaagtggactggtctcaggatatgtatatagacaggatgacggagttcaggttggttcgaacacaaagtcgagcctaaccctagtgaattgtccgaaaaagtgtccaaagcctccacacaaactcggcacaaaacggtaagacccttttcccctccacactgagacgtcagaagaaatggccgccggaagctttggaaacaaaaagacggcagacactggagtgcgacagagtggtccgcagatttactcccgagaattccaatcctccgtcgacgaagtcaagaaagggcacacgagaaatcggaagaagcagatacatgagaggagtgcctataatgcggatgtgcagtccctgcagacgcggttgagctgtgaaagctcgcgtattatccaagagggctttcgccaccttccgtgggcatttcctcaaagtgactgacttccccgggaactacgtgactggagaggtcgacatcgcagagtttcaccaccgaatgcacctttctgcatttccttgaaggtccacaatttactgatagaagttttctcccgtacggcagaggagttgtgtgttcaaaaagcgaaaccgctggcgagtaccacagttcccgaccgtgcaaggacgctctcttcaggaaatcgtcaaaaatggagggtacggaaaggcagaaaccagcactcgcaggcacttccccgcaattgtgtttcagccatcaagacaaggatcgtggatcgcagcaagggtgtacggaagtcgaagagaagtgttagcgacttggaacgcacacacaagtgcgttttccgtcacggaagaaaatgttttttgcgcgccaccggagagaaaaaagagacgtacctgcagggttgtagacgtggaggcggaggctttcgcggaaaagacgcatttatttagaaacagacttggcaggaaggagagataaactcgcgaaacgaacacggcacgggagacaggtcttggggggaggagttgtcaaaagcggaaacgaaggggcagttgctgcgagggggactgtccgaagcgacggggtagcttctccagactcctccagaaaagattcgtgtctgcggagccggttgtatcgcagtttgccgagaaaaaaaactcggaaagaaagcagaagtgggggtgcaatcggcgcaaggaatatacggtgcagagacaccggcgccagaccaggcacagcgctgagcttccacctctcgtgtttgcttagaggggggaaaacttttccgcctttcgacgccctctcgcaagcgcgttgctgcgctcgcagcgacccgcgacctggtccgaaacgtaaccggagatcgtctaatacaagaaaagtggaagatagaggaagaagacggacagtagccgtggcagaatgtgacacctttcatatgctctgtcattgttttacacctacaatttacgtggttatagcaaccccgcaggtcgagatgtggcgcgactgaatcgcgcatttagcgctttgcaagacttgcagtggggaacgaggccgggcacaaagtgcggtcactcccagagtttctcgttccccttttttaccccctgcaccgtcggggtattgaatccccgtggagctgacctcggcaaaagcatccacttctctccaaaatacccatagacacaaaaaacgcagggaaaaatggaacaaaacttcgcaacagccaaggggtaaaaaagactgctcttatagaaaagttcaacagtttcgctgccttactacacccccctcctaatgtttagcgaaacaaccaagctgtccagagaaggaaagcgacacgagactacggactctctaagtacaccacagcagaaaaactagggggtggaacaacagggggacattctccagatacatcgatagaatcgactctctgacgtgtgcagcttttccgccagtgccttctctgctgaatctcatctgtcgttgtgtatgtgtacaagcgcacaaatccctttctcagtgatgaaggaaccacggccaaaagtgaggcaccaaggaacaccaggcatgctggatgtgttcctgttctcctgagagtggcaaggaacaacagcgccgttgttacttttgcctctacagccacaacataacaacggatgccctgcaagacagcacacagaatattaggtactgcttttttattctctgaatatcaggaaatctcttctcgttcctcgcttccgtgtggagaaaggataaccggagtggccgtcggacagaagataggtgtcaccgtccgctgacaacagaggcagacttcgataggtcactgcagggcttcgcgtcagaaaatcctgtaggcgacaggtgatcaaaagtgtccttcaagctgaagtcgcacgtgcaagagatgtcttggcacactaaactggcgttgatatgtcccgtttcttaagtgccgcagccggtgacgacacagatagtgttggttggtcgtctggcaaaagagtgtctcgcagaaccggcattttccgtgatgtgtaccgtgaccgagtgtgcagctgttcgtggcacacaaagagaacaagtagacatttaatgaccgtgaggagaacgtatcagactaagtctggacggggccgctggcaaaagagcaactcgaatttgaaaagacccgcctgaatcacaaaaatgtgctcttcctctgctccttctttcatgtcactgtggctgactgcgatgtcgggtgaatagcgaatgacgttgaaggtaggaatcgaaatcttaaggaagtaagcgtcccgtgacgagtagttggagattgcctgatggagatagactacgcgaagattacgagcccgctccaggatccaagtggttctgcacaaggcgcagatgtcaacaaaagttcacgaacagtagaagattccactaggtgtgaagctgaggaattgtccacggaagatgtagaggctgaggtgggaaacagtcctctaaccaaagtgaaccggcagagctagacggatctctttttgtctcccagcgcaaacagttttactcggacacggtacatccgacgttcgcgttgccggtgccgaagaacagctgtcgccctccacatttacgccgtaaaaggatggactgtgtccatttgtgcacgccaagaaggcttcagactatccaggttctattgcactccaattcgcagttggcgcatgtgtgatgtttccgaaaacaggctaggctacccaaagcctcgttccttcccatcgttgcgctgtgctgatcaaagcaacgcaataaagcattgttgatttgaaaatgccacgcgatgctacaacacgttccttcgtgttttgtttggggaaccccttgccgtgatttgcgtcctctggccggctgtgttctgtcaaccgcgctaagccaccagtctcgtaaactgacactggatattcgtacagctcgctacaattcggttttcccttcgttccccgatatagtcgttggtggtgtgataaaacacccgaaagaatcctgtattttgagtgactcagctcggaggctggcacgctgccggcgatgaaaaggaagacaagcggtggtagacaccgaacccgactcgggtttttctagcgatgcgtcagaggcggtgtggtctacggcatcttggttcagttgaagcaggtggtgtacaacgatgcaatttcgcgagcctgacgagacgagatcgtggcgtttgttgcaagcagatttgtaaatctgagtagctttgcgctgtgagcggttcgctgcacacagacgcctgcacaagcggttccctcgcggcgattttgcccagcatgcgagaaaggcgttctctgtcgccactttttggcacagggtaaccaaggagctgtccgagcgactgttctccaacaaatctgtgcctgtacagatggctgtgagcgcctttaactgactttactaatctgttttagtctttctgaacttcaggcgctttggagcagtgtccgtcttccgcaagtggacggtatccaaccgtttcccctggaaccttggttttgaatgatgtctcaatgagccggcgaacgcggcatggaatgaggattttctcaagtctgtgtggtgagacctaatcgggcatctctcctagctttgtcgagaagcgattgcgctgtgtgcagcgcccgaacccttcgttgcactcgagccgcccagcgacgcgctcgtcaagtattcctgcacattggtttcctgccacttcctttggcagactgctttctttgtatcaacagtctgaacagacctctgattaactgcacgcgtttgtctttgccgttccaccccccgaattcgcctcttttttctccgccggtcgcgctcggttcctttccgcgtctgatgtgcgcgtgtgtgtccacgcgtgcgtttctgactcttcacaactcagaagcgcacgacatggtggcagaaacctgagggttcttctcgttcccataactgtcaacccggtcgtctgtggacttcccactccttgccgtggattcaaaaattcagagtcccacggca

SEQ ID NO: 1071 - DNA, 2504 bp, Toxoplasma gondii
  source 1..2504: mol_type = genomic DNA
aattagcaccagcccgaaagcgagcatttgttacatgcagtgcatcactgagttcgctttccagcgttcccgtgtcagagcgtcgagcaaaagtccggtctgctcatgacaatgaggctgttttccgagaccaaacgctccctttatacaaacgacgcacaaacgctgtccccaccgctgcgagttattcaaatttataagaccgcggcaatccgccggctagcttgagcctcgttggcactgaaagaccatcgggccctgttcgagttctcttcatatgcgtacgcatgaattgctcatgaaataacgggaaatgataatcaattcactacactggaggccgaataaagaaagggggggcgagcagctccggtgaaagcgagttctagtgcccccacacgagcacaacgacagatcctgcttcagataacgaaggcccgaaaccttcgaaggaaggcggccggttgttctgtccttgtttgatttcttcatgcatgattccttttgacgacatcgatcttttccttgtttcatcagaaaaagagaaaagccttgaggaacatgctcttccttcctggaaaactaggtacacctcaacgacggaattgtggaagagcctctggtcgctgtgccgagagtctacatgtgatttggcgacgaaaaacacccggctctgcgacccacgaaggaaaacaagcaagccttctatccttggtgcgtgcgtcactttacaagcggttggcttgatattatctgtctgatcctctgatgtgacgccagatcgggctggatagccacgctaccgttcaaagacttgcgtgcaggaaaacttgcacgcagagacggggaagcatcgatgatctcattgagctcttgacttctgccactggagaacgagtaaagcgaagaaaactgaaacaaacgtctgtttctttccacgggtaacccagagggaaaacagacgcgcagttaccaacaacgagaatgtgctgttgcactgcgaagcccaccacgaaaggaacaaatcattacatgactatccccactcctcgtgcctccgagtttccgattgaaggacccccgttcacaaagaagcattcacattcggctggccacaaaaatgcagatactttttccgcatacgcgatggcctcacgccctgagcgccaacgctgggaaggcagcgaagggagggtactcggtgactaagtctttccgcggaaaaagcgtgctcagtatgaagataaactgctggggcgaagaagcctctgtctaagcatttaacgcggggaaataaactgaaaatggtgataattttccaacatcttccttcttgtaaagtcgagatgtcacaagacgctcctctggtggtcagctgctcgtgtgtcttttcgtatggtttcccagcggtcaccactgcacttctcggcctcctacgtgacaccctcacaagagaccttcaaaaaggaatgacttttcctcttgcaacaagatgtcttcagaattgtatagtgaacacagtgatttctcattccgactcttccaggcaaacagtgtcagggagttcgccggagcgtcttgttaatcttttgagtatcactgatctcctatctcctcgtcttgcgcgtgtataactgcagccaaggtgaatgctttgacggggtcgagtgtgaggccctggcgtggggcatgcgatagacatgatttcctacatcatgcgacgtttctaatgtgggtatgtgagaaaaaagggaatatgttaacgtttcgtatcgatgcgcccgaaagaacaggtttatatacggtgcgttgtgtgagtttaagccctttgtccgtccttcggagacataggctatgtgcaaccgaagactggacggacggggctgtcggatgtctaaggcttttgcagcagcgcttatgacaagtattggaacatatcgtgagcagacactctttcaatcgttctctgaattctccactcaagagaacatgcgtggatgaacttggtctctgtgtacaagcagacttgcctgtggtgtgccacccgggtgtgccgctggagacaagcggttagcagcggcggtgcatgcctctgggcaacggttaggtttactgagattgtatgagctttcgatcctctttgcacatgccagagcaagaaataattgtcagatctccgcagacggcctcgccacagccgtgtacatactctgatagggttgactgttgtatgtgacacaatctcgggatttcgctgagcggtgggattgtgcgtgtctgttgagtaaaagcgtgttacagagcattgattctaagacagtcgtttcttggtgggaaattgagttgtgcgttgaacggtatttccgtttacggatatgaggagcgctacgtagacacaaactgtggagaagattcttctgcttccgcggttatttgggttgccactggcgctgttgttgtcgtctctgcggtgtcgccgcgactctctgtcttcgccacgtaaa

SEQ ID NO: 1072 - DNA, 2061 bp, Toxoplasma gondii
  source 1..2061: mol_type = genomic DNA
ctcatcgttccagaccgcctttggaagcgaaggagaaagagcttttgcagagctggtgtcggcttctagcgaggtctttccgaggtcgaacggcgacaggggcaagaggacaggtgaaaaatcttaaaactgaaggaaagcgaggctccttctgcttgatttgaagacgagaaacaaggaaaacgaatcgaacccgggagagcgggagtgaccagacactgtgcggctgccactgctgctgttcactctctctcttttatgaggaagaaagcgagaaatgcaagcgcatctcaacgaaagtcactccagttgttcgtcgcgttgataacgatggctcttgttctcggcgttcgctgctgctcttcgctccagcagagaaaaaagcaaagatctctccccagacccagactccaggagccgtcgcctctgacaactggtgacgactcactcactgaggaagagaggccgagcgaccgccgaacgaatcgcgtacacagtggagacgccgagcagcgtagtcgtcaacatgcaacgacactgccagaaagacacagaagtggagaggcagaggattgcgaaggaagacagaagggagccgtggtttatgacttctgcggatgcgctgtgtcttcgtttttttccagtcgcttcgcgcctgcttctgacgaagaggacgaggagcgaagcacagggacggcaactgccgtccgcttctgtcggcaagcggaggcgcgaaaggcgagagggtggagggaacgatcaagctgagggagacgaaaagaggaagaaaagagctgggagaaaggaaagggaagaaggaaaaggaaactgagacgagtgaggacgccgggaagagagcgaaagaagaatcggcgaaggagacggcagaggagggcgggaggagacgcgaaggaacgagaaaaggaactgaaacgcaggaccaagagagaaaaggaagaaggaagaagaatcgcctgtgctattttgttttcgtttgtctctcgcgatatcctgaggctgcatgcatcgacttttccccaatgaaaatcacacggcggactcgcgctccgacaggcgttgtagcagcggaaggccaggactggcgggaggactggacgctggtttctcagattcgttttcgcgaccagacaaggtctgttctctcgacgaggtgccaagcaagcgcgagagaaagcctgtgcgtcgagagacgaccagcatgaaagacaagaagaattctgcgcgacagcgcggaagcactaagcgcgaaaagaagaacgaactagctgagacatctgccgagatcggctttcagcgtggttttcgcgcgagatctgtgaattctctcctctcctgtccactttgtctcctgtcgaagaaagaagcgacaagcaagacgcacaacagaacacagggtcgacggggaccggaaaatggaggagtttcgagcatccgctgcagtcacctcgctgttcttctgtgtcgcgcatttctaagatcttcaccaggaccttccccggattttttccttggctgtcgcctctctcctctgctctttctcctttttttcttcaacatttcttctctgctgtcctccgtttcctccaagttcctcctctctttctcctcctctccggcgggcattcttggcgcagcgagctgtcgtctctcgaggcgcgccagggcatgtgcctctcactcgagcgtcttagcttctttcttgtccttcttcgctctgtcttcttcctttcttcgtttctcctggagaactgtctccgtctcctccctcctctcctcccctgtcccactgcgttcttcgtcgtctccgcgcgctcctgacttctccgtccgtctctttcttctctcctgttcctgccttcggtggctctccttcgtcgccactgcttcatgcacatttcctgggtggatccgcgtccgcctcatgctcgagggtgaggcgccgtcttgctcctcctcctctgcgtcctcctctcttgaaacatgagtcgctctgactgtcgctctctcctctcacttctctctccccgcctctcttctcaa

SEQ ID NO: 1073 - DNA, 2320 bp, Toxoplasma gondii
  source 1..2320: mol_type = genomic DNA
agaaagcagaaatcgcgtcgctctccttctcaagtgtgcgagacagtcgttgtcagggaactctggaatccgccgctgcgacggcctaaagcctgtccgcagacatcgttctagaaagacatcttctggaggaccgccggggacctctagctgggctcttcagcaatgaaaagccgcctccaaaaacctttcagaaaaggacggcgggggacgcgagacccaagctgtgttgcgagaatcgaactggaagcgctctgcgccgactctttaagagttcaaaggtgcgagagacaggacccagactcgaaggtacggcaagaacaagtcttttttcatgtcaaatgctcatggtctctcggcgagaggagaagctcttctcgtctacaggagaagctcttctcgtctacaggagaagctcttctcgtctaaaggagaagcccttctcgtctacaggagaagctcttctcgtctaaaggagaagctcttctcgtctaaaggagaagctcttctcgtctaaaggagaagctcttctcgtctaaaggagaagctcttctcgtctaaaggagaagctcaatgagtctacgcgagaggaactcctctacagaacaggacggggcgtagtgacaaccagcggcagtgcgttctagtatgctcgacgagtcttcatgggaagtagctgaccttggcactcagcgaggaaagtggaggaaggcccagattggtgcagcagcgtcgaaaaagcaacagaaaaaagaggcgggtgtccatgtccgcggcgcctgcagcgtcgctagtcctcgcgtcgagttctgtctcgcgcagagagactgcatctgcgcaccgggagagcagacgcaacgccgaacggctcgagatccagatgtcggcaagcgacaaagaaacgcgtctgtggttgtcgagtcacgaggacgacaggcgcggggtcaagctgcctggcactcgcgcgtggaagtctgcgcgcccaccgcaagaagagtggacaagaaggaggtcgggtggagggcgcgcgcgacgcccttcgcgcgaagaagcacgaaatacttggaaacgaaaaagaaaggcaggaaaagcgaccaggaagatctcggcgccgatcggaagcctttcgaaagtcggtgcccgctctccgtgcccggagcgttcccccatggggagtctccagaaaagaaagtcaagttccgcgacgtttctccccttttcacacggaggttttctcgccgtcttctgcgtttcaacggcaagttctagaagaagggggaatctcggaaacgagcaagacttttggacttgccgccggaagcctccgcgccggctagctgtcggtctcgatcgaggaaccccactccactctcttgttggctgcgcgctcgcggaagtcgaaggaagtcggagagcaccgtgtggggaagaagagccgcggactttcgagaaaagtcccttttgagacgccgcctctgcccgaaatccgcagacaggcgactcaaaccgacgccggaaagtcgagaatcgcgcgcacgcgcagtgtacgtacaccgcgggtgtcgcccggaagacgcgcgcgtcggattcagagagcggccggcgaggagagacgagagacgaggcgagttctgcgcgagcagagttttttgagcaggcactgcgcgcaagagaacttgttcgtcttcaactttgcgcgcgctgcgaaaagatccgcgagaagatctgtcgctgtcggaaaccccaagcggtcggggactcgggggggtgtcgtgcatgcgtttgtccggcgaaccgaggcctcgcgtatatcctcgcgctttttcaccgcacacccgggagaaaagcggggagaaggcaaattctctctgaaggaatgccctcactcgcacgcttctctggcaacggcagacaaacggagacagtgcagaatcgcttcgtggcgggcggactgattttctggcttcctttctgcttcgaaagctcgcgcaaaagagcgacgcctgctgtgtggggggcgcctggtgtgacgtctgggaccttctcgtctgtttctgcctaagaagagaagcattttcttctccatatatccgtcagacattttcctcttccttctccgttctccgcggcctccttccactgcgtcttcatccctcttaccgcgcgcctctccctgtctcgccgaccctcaagtttccttcgctgcttcgtccctctctggaaaaggcaaaaagctgtttgcggccgtcttctacgcaggtgccttcttcgtcgtccacggaagctgaattccctcgcttctcttcaattgtcttcaaaa

SEQ ID NO: 1074 - DNA, 2687 bp, Toxoplasma gondii
  source 1..2687: mol_type = genomic DNA
ctgacaacataaccgtcctggcgacgaaatttcgaaagtttcgtcgtcaaacctcagccaagctccgaattttcgggggactggcaaagagtttcagtgagtgacggctgtgtacttcaggcggaacaagctctgggctacgtagtgattagcgttgtcgtgtctgtaacacctgcacagcgtttccagcgtgatttagggtacaggggatcgacctgtacgttttatttgatccattatgcttatctgtgcgtccccaggtcgagaaaggctgttgcgggaggagaactggtcgttcaagctgcaaggtagaaacggcttctccttacccatgttctaggcagcctgaacgtgtcagctgttgcggcgaacgccctttcctaactgaaaacataagctcaactcagccttcagatattttgcacattctgtacattgcactcgatgctgtttccgtgtttcgcaagtcaggcaaagcagctgcggttgccgcagtagcaggtgctcgcaggtccacacccgtctgctaatggtgtgttgcttctccattcaatccgaagagagagatgctgataacaaaaccagcaaataaatgcattcctctctcgtgagtaggtaatgcatgagatgtgtgcaagccatcagtggagtgggtaactgttacatcacttgtgaaagacacttgtggtgttgtcggaaagagtaaagggcgtttctttaaaatacgttttgtggtttgaaagttgcatttgaatcaaatttcgcttcattttctgggatgttagtccacgtaagggatttttgggtgagatgccgtattcactgaagttgaacgaaccttgcaacatgaactcgcctcctcatagcgtagcgctctcgaccacatcaccggattaaggaggctgtatctcgtttgtctcacggcgccaaaccactcgtttccctttctcgcggtagtctgtgttagccgaggatacctgaataataatatctggggcaatctgtccccaggacgagctgtagagataagcaggatggaaaatcgttatctctgaactggctccagctgttagtcgttctaacaatttcatcactctacccccctttggcgatgtccctgtccaacctctcctatctcaaccgcaggtatccgcacacgcatacttacgcaaacgtatgcgcatggaatggtgttaatgtggtcacacatctttgtattctcgagagcgggatgtggggaagatataagtacatagctgtgacgctaaggagcataggaaatgctcaagccccgtgtgcagcctttgctccataggtcgctcctgcattcgcaggctaccacagtcacttggtttctcagtgtggggtcgctccccttcaccagtcctctgtagccagtggtctctcggtaatcccacgtgtttcggccttttgactctggtagttccccactgcgcgatagtgaaggaagcacagagtgaacggtttttactttcagaacatccttccgcttctaccgtccagtgagcgacgattttgtaaactgtcgacctctggaggctggcgcgcagttcgcccccaaaacacgagactgatcgagggcgacactccctttcgatgtctcggcgataattgagatcggtctccgtttttacctttctgtcagcgactgggatggtccgcacttgagtcatttctgcaagaagaaacgccgcgtcctgcggatgccatacgactcagtggcagcaattttcgaaattagctggtggatcgtacacggccttcactttgtggcagtcactccagaaatcagcaagcgaaaaaggaaacagaaagtctcagttactttttcaacgctacacaattgatataccgacacatttctgtacgtagaaggagcatacctcgtgtcattgtttgccgccacgaaatcaacatcactccaatgatatcgaaaactcaaccccgaatgcaacttgaaaagaacggcgaaaacggctccgcacagtccgtttcgcagataacccgtgtcgccactcaacagcctgcagacaattgatggctttattcgttcttcgacgaaaccggcttggccgtttgcggtcacagaacacagtgttcttggacatttgtctgcaataaaaaacatgggtagtttttagcagagcaagatcatgtgctggctgctcatttcgtcgttttcgcctctgcgggcgccacgtgcagctgcgtcacaagcgggagacgagctggtttgtcttggcatttataattgctagcgataaatccatgtatcatgagttattcgttaccacggggtgacgacgaagtaatcaacgacgcgagactcccgcggacaactgcccgtctttctctatgaaagcatctggcattgtgggtgcgggagctagccacggaacaccgcttcatcaaaccatgatgttagagggaggggtttgtatcacttaagccagtggaggagggcggtcagttgttcagacattatgtgctgttcttcatctccatgcctacaaagaaacagtagaacagattggtttacaaacatgcacaaaaacggcctaccaagttggtttcccaatcgtgtctggaagcgcagtagttcagcatctcctgttccgtggctgccatcgatctggactcctgcctgagaaattgtctttcaacaa

SEQ ID NO: 1075 - DNA, 2399 bp, Toxoplasma gondii
  source 1..2399: mol_type = genomic DNA
ggagcaaccaaagtgagcgcttttccaactgtgagagttttgtagtgtctcacgttcaccaaagtttagacattgtgggtgagcatgacagtgacgttactggttttggtaatcccgtgccatagttttgcagaacgtactagagaaagcggaagaccaagaaggccgttatttacccctcgataaacggttcttcgtacacaggagctgtggcgacgtaggaactgcttttcttgaaagatcgtagcttaccggtgaaagcagacaccgtctgaagttcctagcatcgtttcgtgtccgccccccgtaaactgcggagtacttctgtcagcaagctcgtagagacgtagatcagttggcagaaacctattcgaggaatcttctggtttcttcaaacgacttgctgcaacaaagcctaatctcgacacgtgaaaacctgcaatcatggacgtaagtcttcctgcaattctcccgctaaacccgaattcttcatctgtcagtttttaggcatgaagacgtcaacgtgtacatcaaatattcatgcattcgtatgctcaaagatatggctcagtggctctgtccatttctgaaacaagctctgcgtgggggaagtcccggttcaggaaaatcgcatgacacaacgggttcgcgaggcctgctgttgccgtggaattctacaatatttaaatcagaataaatgacgtgtggacaagtcttcttctcagtccgctgtccaatggtgcaacgtttaaggtagaaggtttaggcgggccatcaggcaatttgctgacggtctgttgagtgatacgctgggtacagcaggtaacccacatctgcctcccaacgttgctgcatcggcagtgggcggcggaagcagaagcaaaaagaaaagactcccagaaacagcacaagattcctttccacaatatgcgtgaccgcttctcacagcgctttctgaagtgttatgcgaagacaatgtggggcggggcggaatagcaagacaaaccaactggagtttaatcggttcccgtgtttgccttctttttggcaatgaacaagagacccttgttcctcccaggtccctgcaattaaacgtaggtccggtcttcgtgttgtaaaaagtcgctaataaaacgatacagcttgtgggtcttcacctcctctgacctacaacgagacgcttctggacacaatctggcccccaaatcgtcacttcgtaaagtcgtgtttggctcatcgtgatatggttgcatcgaagcaaagcagcagtctcttgcttgaggcaaacaccaatttttggacacgcgagaccggtataaattgttggggcccgatccataaggacgggcgtagcgtctttctttagtgaccgttacattttgtttgtttcggggggaaatgtgcaagtagaggcgacagggcttgacaaaaatgctctgctcatgggaggtctctttcattcgcagaggttttcagcaaaagcagaccaggttcagcttcactatagtgttttccttcgattcgcacacctgaaaaaaaacatgttgattccttgaaatagtaatgtaatttattgaactgacaattttaaatacaaatgcaatcctataaataattctggatctactatcttgttgaaggtgaaacactggaataaattgggcacactcacaacatatgtgtttttacggtgtactattgttgaaactaaatataccgaaaatctgcctctgggtgaccctgagatcatctagaaaagcgttcaaatttgatcgccatattcgtttcgcagaggggcgaaacagtggatgtcgagggggaaacaccgttcagaaatcgatgtgaaaacggggcacctgtgtgcaaactcctttgccgaagatacaggcattgggatgcgctccagtcttaatggccgtgtgcgtctttttggatccaaccacaggttgtgaatcaaactgctggatctgtgaaaatcctctgattttaaggctgcatggattcctaaacttcgaacatcttccacaaggtcctaggtgttgcatagtgtcagcctggcagcccatgaagagccactcgcatcacgtacttgattatggaaagtgcaggtcagagctaggactctagcaaccatgtttccattaggatggattctccaacaaaactttcttttcccgggtcctcacaataatcaagcgaatgaactacacgcaggctttaaacgagacagtgacttccattctccttttcagccatcttccgaggcaggaatacgcgccgaagaactgattggagtgtgtggttctctgtgatagaaactcgtggtgcagccgcatcgcacacgtagaaaaaggcaaaaagggagctcaggggatgcgagagacggtgaaactgcaaga

SEQ ID NO: 1076 - DNA, 2485 bp, Toxoplasma gondii
  source 1..2485: mol_type = genomic DNA
gacaacagacgacttaaagtgacactctcatatatggaggtgtatgcacgtcccgcgggtctcccgcaagtcggcaagaaacgacaatgtccctaaacaaagcactatcactccagataggatacaggcacccaacgaagagtcatgtccatctaaaaaaaagattgcgctccatgaatgtgtcttgagagatgtagaaatccacgtggagaagccgaattagagcatggggcttgcagaagctcgtgtttctcagatgactgtgaacgtgaagaggcgagctgcgaatcgagtgcacgagttcctcctgagagtgaagcctgcgtggtaccatttgcgataccggctcagagtcttctctggatgcgcgtcgtctggagctgcgtttgaaattcagtttgtctccacagttcgcgcgtcctgggcgaagctctcgactccccggcgaatgctgcgaaggaacgccgagagacacgaggagggaggcgccgtcgaagtcactctcggacagcgaagcaagggagtcgacgccgacgacactgccctgtcgacttctgacgagtgacgagacgctgcagccatttccttgcccgaagaaggaaggtccccgatctcctggcggaaccgtcgatccttcgaatgacgtggtgagctggaccagcggatggcattcgttcgcgccctccgtcgctctgccttcttctcccctccgacttgaaggcgagtctctgaactctctctcgccttcgccatctgccctgcgctttgaagagactccagcgaggcgaatcgcctcatctcgactcttagcatcaggcggcgcggccgccgcgagggtcagaggagactctcttgaacggacgacgaactctggctgacgagacgaggaagaagaagaggaagaagaggaagaagaggacgaagaggaagaagaggaagaagcggaagaagaggaagatggctttgcgaagtagtctgaggacattcgttgtgtctgttgatttacatcaggaggtgcgtacatgctggcgagtcctccttccgtggaagccgatacgagagagacatcccgtcggtcgtggttgtcgcgcaggactggggggcctcctgtttcgtctgtccacgcgaatttggaggcttccttcgcccagagaggaggaagggcaagacaggctgcatctggggatcctggctcttccgccgcagagcgagaagaacgtggaaaccggacatctaagagagttgcggcaacgacgacccccccttgcttccgacgcaggtgaagagccgcgaggcccgcgcatgcagcgttaaacagccagacgacagcgagaggaaacagcagagcaaagggtgcacaggagcagaagagagcgacgcagagaggaagcagcgaagaaggaggcgaggagacagagacggcgtctgcggaggtgagttgccccgcgtcgtcagcctggtcgagaagaaagagaggaaagacagaaggctggagggaggcgccgagaaggaagatgtagcacccggtggacacacagcagagcgcagcttgacggaaggaggccgctgcaggtgtggacgagtgagaaggcgagccgcgcagagagggagagaagaaggccgaggggagagacagcgccggctgcgacgcaaaggaagagacgcgccgcagaacagaggcgaaggagttcgtagggagaccgaaaacgcggtcgcaggagtcgacaggaaacggaccggaggaagactcttcctggacgggagacaggccgttcaaggggagaacagagcggtcgacagcgggggtcgacggcagtgccatagtgacagagggaagcaagaaacaccgggcgggagggggaggacgcagccgtattgacgcaaaagacgcggaatgaggacaacggcgtagcaaatcagcaacggactacaggggagagaggagaaattgccgagaaacgactccgaagtgacgaggtccaggagaaaggagggagagcaggaggaacgagaagtccgacgattccgccagaacgaatgggagggacatcagatctggactgtcgcgttcgttgagcaggaactctctttctggctggtgaacgtacatctcggttccagcgtcacgcgctcgccagaccttcgggaagcgtcggtcgcgttttccatctttttcctccccgcttttgcgtgataaaatgtagcgaatgtgaagacggcttctaacaaattgcgaaaaaaagtttcgaacggcaccgcgttgccacagcatcgcattgcacctgcagaagcagtcgtgtgtctccccccttctttggggatctctcgcgctttctcgcgtgtatccgatcgaaactgtcctaccattcaatctctaaagtgaagaaacaggaagacaataccgcgacaaatgtctaaacaataccgtccactcttcagcaaacagtccgtcgaaaaagaacgacgccgcctagcgacgccacaa

SEQ ID NO: 1077 - DNA, 2432 bp, Toxoplasma gondii
  source 1..2432: mol_type = genomic DNA
tctatctcttcttcgccctcatgtccctcttgtctgcttccttctgcatgcctctaatctcctctcagtgggcctctgcgctgttctgttctgcgtttttctctccagagagatgtctcttccttctcgtctcctcttccgcacctcaaaacccagacgccggccagaggggcgctgcggtcctctctcaatctctctcttcagtcctctcgcagacgagacagctccgagcgaagtggattcttcctttggctcgactttgtcagaagcagcgaaaacttgtctccgaatccgaggcgtcggacccaacggccctccggccggactcgggcgaggccctcgactcttcgtcaacattgtcaacgcattcagtcgaatctgtacaaacctacgaatgcatctgtatgctgtattcgtcttagtcaatgcactcagaggcggagaaacacgctcatatgccgacgacacgttcacacatacacatgcatacacatgtatgtatttttatatgcatgctgatgtctgcaacggcagatgattgtctgtaggcagctcaagagaagaggagagctactcgacgcatggaggggaggcgggtcgatagagcgggcacatacgggagcagcagaaagaaaggaaaggatatgagagaagaaactggcgaggaagaagggcaccaagaaaccgttcgagagctggttaatagtgaggtccagatacacctgacgccgcgtgaagagacgggaggaaaagaatataaaaaccacaacgacggacgagtgaaaaacgcgcaaagacggcgtgaggaaagcagtgaagagaagaacgcagcttcgttgaaacgagaaaaacgacgaagacgcaaggcctcgactttcttgggccttgagagatgtgagtcttatcctcttgctatctccgcagtttctgttcgctgtccttccctctttccgcgcggtcgctctgaaaaaattgatgaccaacgagagcatttcaaaaaatccgcgactcgcccccgtccgggtcgtgttgcatcgacaaaggtcctcacgagaagcgcacaccgaaactggtgacgcaaaagccgttgagacagagtggaaagcggggaaaagatttggagaaaaaacactggagaaagagacgagaaaagcgagaagcacgcgagagtccagacacccgccacgcgacgaggtcgtttgtcgctgtcgaaaagaagactgcggagagcggcagaagcgctgaacgtgtgcgggtgagttctcttcgcctctcttgggaatcctaggctagaaccaggaatccaattctagcgcgaatcgagtgtttccgactttcaatcttttggagggcgaccgagacagcctgctcttacttgcgatgtgctgcaacagaaagcaattccttgggacgccacagacgcggtcctctctcagctgtgcccatattatacgctgcagagccctatacacggcagagcgcgacgacacagaaagacgaagaagagaaagagggatacgaggaagaaaagaggcagagagggaagaagagagagagaagaggctcttgtctttcgaggtctccgagaggagggacgagtccgaaaacgattctggcgtcttttcgccgcgactggtatacgcgtgaacgtgcacgctgagcggtgtcgagacacccgaagagacacggagacagcaagaagaaacgacgcgcagacagatcgtcctgttgtttcaaggaaagacgaacggggggacaggaggcagaaagaagcgtaatcggcgccccaaaagagacgcacttagcatgacaggaaagctggggaagaggggaggaagcatatgcggaagaagtccacggtttctgtgtcctgcttcgaggaaagtcgagagacaggaaaggagacctctctgttgagaaagcaggcttggagttgaaggtcccgcatcctctgaacgaaggagcagttgttttcggcatttcttcggactccagagcaaccaccgcagctgtctgcgttcttccacttcatgcttctcaaacacccgcgtttagggccttgcgcaatcgacggctcgacgccggtgtagaggcacccaacaaccgagatgaaaaagagagaaaacagttctcgtcttccagacggaaattgaattctttgaggcgagtggcaacagacaggaaacgcggttccgccctcggacactccttcgtctcggtacccttcggtgccggcgagagaagcgcgatttttgaggtgaagtacgcctggacctccaagtgggaagttcgttcctgtgcgttcctatcgtcggcctcgtcacgtctctccagcctccggattctccgtttctcggctttgagagagtcgctacgcctctgcaacttcgtcctctttcgtctgttcctttgacttctcttcgcgtgaagaa

SEQ ID NO: 1078 - DNA, 1960 bp, Toxoplasma gondii
  source 1..1960: mol_type = genomic DNA
tcaaactggctgtcgttctttctgttgtggcatagagcacttcgttaggtgaaatgtgaaaaaacacggcggcaagggcctctcgaggaaatctcaagctgtggcaatcaacgttcctatcagccagctctaatagaggcgaccaagcatttcggtcttcttgcggtcgaggtgaaggaatgtcttgctggaactgcccagtctatagaaacccgcgcagcgaccaggagcgacttgtggtacaattgcaggcaggagtggaagtaggatgcctttcgcggggcatgtctgcttggtcgcacgctctgtccaccagcgtctttgtactccgaaaaacaaatgcgcgaaaataccaaaaaaaggatctcttcgtgcggctcgagaggctgtaccatacccgcttttctccgttggctggctagactgcttgcgaagctttcgtcgtcagggtggggtgagatcgcgcgataaacagcgcggttagcggactctggaccgagaaggatttcaggctttcctgaggaagtcgacgagtctcgctgtttccctccggaaacgtgaactgaatagtagccatcccgagacgaggaatgaggggtggaatacaagttcatgggttccggacgaatctggtctgttgtccgcaagatgtgatggtcatctgttcgcggagaataattttcaggcgccacaccatcgtgaaggtgtggcgctgaagagcagggaagaaggccgccatcctcagtagacgggaacggagagacgcgacgaggcgcagaaagtaaagttgcagcactttcccattgatttgaaaccgctccggaagttgataagcaaggtaaagtagagtttccgccttctccgaagccatttccttgcattttgactcacgatatgtgaggcaagacgagacagactggtcgaacgcgattgtcgcgcttcaagaggcgactacgcgttcacgggcttcacacagccatggaggagagggaagtgcctggtgaagcagaaacagaagagatctcacaggttcaaaagatgtgagaaatatttgacgaaactaaaactagctgggagaggtggcaactctggactggagggaggaggggaggaaacgacttggaggccggggtggtccgacaagacagtgtgtgccaagtaacggcagtttctgaaaagaacaacagtttgctccgccactgccacgagagtccaccctacgagatttgccgtggcaacacaacaccagcacgggctatcaccaccaactgttctgtgtggagcttcagcttccaccgacaaagtgaggaaacagatccggtagccgcattgtcacccgtgattcgcatgcaaagacaagatgccactaacaggggttcaacaaggcggttgctggttcggctgtcctctgttacgcattttttggagaacgaagtggctcgaaaacaaagtttcacagagcatttcaactctgatatgaaagcaaattattcgaatttgccgggggatattggacgcgttctaacccacgactgcactatctagtagcccggatcgcgcgcccaacgctgtcaccacttctactttacggtaaccattagcatgtgttttttcttccggtccctgaacgagaaagcaactcgaaggaaagttactgagcctaagaaccttctgggatacgaacttagcagcaggagagacaagtttttgctttgcctcggaagttcctttacaaaaaggacgaacatcttttggctcagatgaggcactgccttcagcggaaccgcgataaaaatagttgttgctacacgttgagcgcactttccttccaaacatttcaactcaggaatccagtcgtgtttcctggaggcacactagacctgtagtagctttttgtctcgcgcttaatgggaaattcttccccagtggcgaattcctgtgccagtgtcagatttctgga

SEQ ID NO: 1079 - DNA, 1768 bp, Toxoplasma gondii
  source 1..1768: mol_type = genomic DNA
gctgtaaagctctacttggttttcctgacatacggctgcttccaagatccgctgaggcttttattatgtgcagaaatgcgccgaggggtgtcgaggcttggatgcgtgtcttccaacatctttatgaggttgagtgatattatattctctagtttccaccttttcgtagttccactgacattgttgtacttcgtttctctccagctgcgcaaacaacagagtgtttgttcataatgttattgcggttttggcgtgcttgtctcttttttaggtgagggaggaacttccgcataagagattcttgccctttgtctatactgaagtaaaaaccgtgcaatgacagcgaccgcgggccatatattgcttagtacgaatactggccttttttttccaagtatacgctggtcaccactaaacccagtgcactcaacatggtggttattttaagcacaatagatcttggatccaatcaatacattcttcacgatctacgccagcagattgaggccccttctgtctgaaacacacttcccttctcgccagtgacatgatctcaagtgcccgaagccatgtggcctacctattataaaaaacggggcgttacaccagaaacctgctagtgacaaatattgttagattatattacgttagcagccctcggattgccataaggccccgattatcgattgctcccaatcgagcgtacggtaccttccagaatcaactacagtgatagcaagaaactgttcagaacggttctcgcgacaagagtgtacggtgcgttgttctttcttgccttgttttttactggcaatccttggcaccctaatgtagctcgcgtgaccaccaccacccgatatcccgctaaatagtttatccaatttttgtttcagaatccgtactgccgttgcaacatggcagctcgatactatgtctgcaccagtggttcgcggtccagaactggacaactcagatcgaatcagcagagacattagagtacccaagggactgaatacgactgcagttgtgaggtgcaggcaccagcggctagagctttgtaccctgaacgcgagttgtgacagctcgcaaaacgaaggaatcgtaaggaaacctgcaaaacgcagacaacctgtttttttctgctccttggtttgagcaaagcgtggtcagggtaaccaaactaagcaactcttgaaccgcagcttatacactgctgagctatgtagagccttctaggagcagcgtggagcaagtgaaccaaggaagctgcgtgctggcgtaggacactcaactgtcctgaaacgcaacgcatgccctgcgcagccagcctaccgggctgaggcagattcaaagggtggcgccaaactcgcctgaaggaagccatctttgcctttgaatccgaacaccttattcaccgtttccctctcaaacgacgcagactgaaattttccaacgcgtgcggtgttttgctcagtcttggtgcagaaatatctgggaaaggtctctcagctgtcgagactggatttcttgcatgcacttcgccttccctcgcgctgtgggggtgaatcgcgaggggcggcgggcgagagaggcccgtcgacactggcggctctgggtaattgtgccttctccgtcggcgggattgcgtttcacacgctccgactgcctccttaacttttttcactgtgcctactgtgtctctctgcttctttggcgaggtcgatcctcccccagctggaacagcacaggaatccgaaccttgggaaaa

SEQ ID NO: 1080 - DNA, 4053 bp, Toxoplasma gondii
  source 1..4053: mol_type = genomic DNA
aatgatgttacagataccttacgtcttctgcgcgctgaaagggtcgtttgcacgaccagaagggagcccacagatagggattccatgatatcgacggcggcacaaggtacgcgttcaggacaaggatccgcaaattgggaccgtaattcccatcgcttgagtcagccgatgcggagcgcgaaactccgagagacgagtggagattgcgggaactttcagaaccggatatatttgctgagtatgcagcgactgtcgcctcactgctgcttgcgttgccgttttctcttctggcggcttccgattgtgtcttccaggcagttgggtattgaagtccctcgggatcctccccgacgaacaagttttcgtgggtgctcattccagcggggaatgaaatggcggaatagtgaacaacagagggagcctgactgacgggcgagacggttcagtgttggaaccgtcaaagcagcagatgggaaactgtttcagggggtccttactgcctgcaagaaatttgtggacagacagctgcgtacagagtcgtacaggagggtcacgatgacgaatctctcggcgtcagtgttgcagcatcacatggtgaaagacggaagcagaacttattggagcacgcagcgcatcggagaggctgatccgatggagcctctcgtaaaactcaatttctgcgcgtgtttctaccggcgagaacgaggtggaattcagacttcgaagactgccaggtgaagataatgtatcaacaacctttctaggagatcgaactccactggaacggggcatggacatctgccaactgaacgaaacctccgtgaggagacgggcaaacagcgaacgctcctaagtgtctcaaacaccagcaccgtggtatccattctttttgtccttggagggaacgtaccgctccaggccatgtctcacagctttcaatttccaaatccactgatcatgctgcccacaagactacacttgctaccgaacaaaataagcaaacagtacggttttgtgtcatcgtgaccactgtcagacttctacgatccgaacgaattgatccatacctccaatgagaagactgcgctatccggccttggttagctacacagaacgaaagacgggcacctacttgtcggcagccatcctccattttccgcaacgttctttaagatctgcaaaggaagatgcaaggaaaatgagttaaatgaactgacgacaatcactgcaggctgtgcatgcaaattccgaagggtttgctagcgcttgacgaggcgtcttaaaaagagtcaggcgtgaaatgaacgaaacccgcctgaatgctgcttgtactcaaccatgagctattacgatgccctggatctctaaaaaatccaacattcacgttttcgtctgtacccgtccattttcaccgtcttaatttatccgccagcctcaacgatcccgtgttgatcctggctcggcgcacagtagtgtgcgatccacgcagagttcatctagctgagcctaacagaaggccgacgctgcggaccccttgcttgtaattagacaggaaatgtattgctttcctctagtacccttccgtgtagtgcgtgtaggagaaggtgctgttcatgctgtctcggcacgcatttggcaagtcagttaaaaaagcgttatcttctacaagatcggggccgctgttgagccattccttcttttgaaaagccaagagcacgacaatttcgaggcgggggacaattttatgtagaagggcaggtcctcgagtccacagtgcgaaggccaatcaatgaacggcgcctaaggcccccctacgttggggtgccaatcacagtatggaaagaagtgatgtggcacgccccgggaactggaaggtggtggtatgaatgagggccattaaatagaatgattatgaaggagcttcactgctcttctggatttgttcctgcatatgaaggcacaaacgaagcacatgttttcctcttcggaacacatggtgctagccccagctgatgcagatggtgactgacatatgaaagaacagtgagtatgctattttatgtcggatctgttttcattctcacgcaaatacagacacaaggctctggctctctgaccacaactctaggaaaaatcagatgaaaccgagcacgaaactggttgctcggatggcatttcttttctgcgtgtgtcacttatgagcaacatacatcacgataataacttatgtaacatgcagagtttcggccttggtattttcaaagctcttcaatatcaagtcttttgagtgagttcggtgcaccgcctccaaggatgagaatgacgcaacatttgagagaagcgataggaaactatgccggactcccttgatggtctctctatgctcttttgttcagaaacaatctgtcacaacctgggaagttctttacgagacgtcgaattaaaaatcatcttcttccgtaataacatgaaacgaagagcacgaaaagaaaaagaccacatatagttgagcttcccagttatgtgctgtcttttccctcacttggtgggctcaacttgcatgtggacaatatcgcatacctcgtggtcctgtttacgcacccttagaaaaataatgtaaaaaaatgactcgcaatagtgacacgtatcacatcatttgccccataccaaactggctgtcctgcttattttcaactgcggtacgatagcatttgccaccctagaatggacacggccggacggtatgttctatcgccgacaagttacgctctgacaggctttcctaaaagctccatccctctgcagcatctttgttctttaacacaggactgctggcacactccacctgaggcacatagtgacaggaaccacttgtcgttcttctgtgctttagtcaattgctgttgagcaaagggcgaacccatttcgcctgtttcttttattgtctcgcgaagggagcgcaaacacggttggtccttcgagcgtctctgacgatgttacgacctcactacacaagttcttttcctaaaaacggaagccccatttggttgtggcagtcactgaatgcagccgtggtcgccgtgtcaccgtgtgcatctgagctgaacatggaagatccctccgtaccaaatagacgatgcagatgagacaccccgggggcgcgaggaagcatgacgaagggccattggctaacgtgaaaggaaaagaaagccaatttctccggcgtaacgagctaaccttgtcgaataccgaaaggttggtgagaaagatcagaaaccgcttgatgtgatgccacgtgtctccagcgcgaagtcgcgcttgtcgtctgtctcatcgaatactcgttggcccccccgaatgctgattttgttgaagaaggaataagtcaatttcttcctttagttctctagaaatcgggtatttttgcattgtttcctttctctttcggcaacggtcctttacctctcaggaggtcacgggcccgtccccgattatgcccatctggtctatgtcttcatgtggaaaccgttgcgccgctgaccgtttgcgtcggaactgcccccccctcctcactgctgttcttatttccgcaactacaaaaattgcatgagcttacccaagaaccgtctttcctcgtccccgctttgcagcgagcaatggagcagccggaccgcttctgtccatttcgtgtgccaccgtctgccggcgaagaggactccagtggctcgtatttaaaatgaaattgagcgtttatgcttttttacgggtacaagtcgaattcgcttatacaccggctacactgagctggtaatctgacgacccagcaagcagtaatctacttgatcgcacttcccgtagatgcacgggcctttgtcaaagttgtgctacgagtccgtattgtttcagggacctggaagtgcgtatgcgtgttcacgcagtgtacgatccaaaggaactgccagcatacgtcactgcctcgtgatgtttttatatgacacagcagatgacatactttttctgaaacacaacaagttcaatggtgaaagcaccaaa

SEQ ID NO: 1081 - DNA, 2388 bp, Toxoplasma gondii
  source 1..2388: mol_type = genomic DNA
cgattcaggaaatgactgagatgatcttcaagtttctgcgggcagcggggccgccgcagggagcgctggagaggccaacgggagctgggcgaggaggagagacgtcgggactgcagaactttcggcgacaacaacaccttggcaaggcactcgtctgcgtagaagctctgagggagggatgccgaagagaactggagggcgagaaattcaatgagtttcttgcggaagtgaaggcggaacagtgtcgggcggatgctgcggccgacgacagcttccggaccttttggaacttgctaaaatccagaaaaatcggcctcatcacgcacgccgaggacccacgcgtcgacctcgagccggcccagtctctgagaatctacgaagacgaatcagtgcaagagctttcgacccaaactgcgatgacggccgcgagacccttagatccgcatgacgttgatgacttactcgatctcgtcgagtagaaaacgaacgattgcttcagagaaaaatgccgtcaggcggtctttgacaaaacgggagtggttgctcttggctaacatctgcgggcagttttcgattttccgtctccatgtacgtatatttgcatataaatatgcagatgtacatgagtcgatatatctcgctagctataaatatatctccatgtatttatacatgtatgtgtatgaaacatacatctatgttatctatatctatgtacataagtgtatgaggtgttgcgcagatgcgagagggctggtcggaaagtcctaaatcttttcaaggcgtgcggaactcgttttgtttgcgttttctgtttcaacaatgttgagcagtcaaatattcttacgaggacaggccggtatggtgattgcaccgcgtgaaatagcggtgaactaaaaaaatggggagatttgctgcccccacgaagccacgcacagaaaatgaagggaagggcaaaggcttacatgagcacgcgtacacatctgcctacttcacttctcactttgacgttgattagatctcatcacacatgccttctagggagttcgcgataaatgcacgcaacggttttcacgatgttatatcgggtagtgtagtgtgtcacacctaatactaggttgaattcggagttacattcaatgactacggcccagcacgcagaagcacggatacgcggcattgctgcatggatattgtgtttgttcactgattgtacgatcggcagatacaggcacttggggagggggccatagatgtatacgcacggcaaatgcctacacaacatattgtacacatgagtggtggcaaaatttcaagggaaccttgccactggccgaatatgaatcttcttgtcgcggatttagcggatttgagctgtaccactgggaacataatatcgattgtttaactctaagctgacctgcgttttcgtttgaccacgggcggttcctagcagtagctacgtgttgcatgggactgctctgctcagttgatgatagccaggctgtggagtggtgcagacgctttctaatctgcggcaactgcagagttaaataccttgtgaagctgcatgaacaactgagggggggaaattgcttttatctgacgggtgatacgccactgttaacgttgagctctcccccaagaaccagttagtgtagcactgcgcagttcacgcggaccggcctttcattgcttgtgtgcaccatctttccgaaacgagggtaagaaacaaatgtggcaactgccttttgcctgccttcggtacgaactcgagagtatccatgtttacattcacagcacactttactaccggggtggtaccacccgtctgcagaccctcctctgtccaccgacccactggagggaaaaccagagcagcggcaacgcgcctccctcttctagccgacatgcagtctcccatcacggtgagacacgggatattttcagcgactcaactgctactgcttgtgacaaaacgtcagtgcgcagcggggattcgtccttgttgtcgtgtctgcttcgcaacgatttttgcagaagcggaagagagcactctgttgcccgaataccgatgcaaagctggctcatcggcgtacgtgcttttcctgtgagggcatagagtctgctgggagtgaatgcaaacgtgtttactgggagccggcagcaccgttttcatgagtgtcttgtaaacatttctgtctggttcggtttcctgagacatgcacacctctcagtcccgagcgttgacggttttcctctgtggacggtgccgctccgacgtgcatgcgttcatgtgcctgtgagtcgggtgtacacacaccagtcgatttggtcaatcgccacccaggcgacacaccatttcttttttccttcgctgagacatca

SEQ ID NO: 1082 - DNA, 2232 bp, Toxoplasma gondii
  source 1..2232: mol_type = genomic DNA
ctgcgctccggagtgtcagtgtgcaaagcaaaggtcctcaacttgaactgaggaggcaggcactgccaggcgttcggctacagctccttgaatgtatcctatctgttggggcaacgaagaactgtcgcacatttttcagcagtggagttgatgtgccggacagaagactgctctcagcgttcgtaactccgtcaggtccgtgatgctcactggcgtccagcgtcgcgaagttttcaggggaatatccctttcactggaaacgcaactcccttcttcggagaatacataggcctcactcagagtttgcatgaattcttgttgaaaaaagacttgcccggatccctagtatgcagcacccgcagccttggacttggtgccgatatccagaaagcgcggtggttgatgtgaacatgcggctgagaagcaagttcggcaaagtctccctttagctgttggagcaccttcgcgaaccgagttcccagtttctagaatccgttacccaaaaagtggagcctcatatgtttccgcgaaaaacaaatcaacggatcatacgttccacgttagaacgaaatccgagatcaggaaatacggcgcctgcaagggacgaacggggaaaacagcgctttgccaggtggcgtgagatgcactcttatttcgcgcaaactttcgaagcttcagttacagtctgtgtgtggccaaagcggtcgaggttcagtatgtttccccttgtgagaaacacgggaagaagcactgaacatccctcggaacgccgatccagtgaacgcgaatcgctggatgcgaaggaaaccgtgttcgtcccctgaaacagctccgttttcggcttgtgtttttcctaaaacatccctctgaagaaacaactaagctcccgcattgtggcgccgcgaaagcgacagcttgccggcagaagttactgcgagagttctgcggtgggcagaaaaggtgacaataggagcttgttcaagaaacacagtctttgtggccgctaaaacgtatgcatgagaagaaataaacctgtttgacaagactttcgagactctttgtgagcgcgaatgcagatgttgaagacttatcgcgcgatgtgcttcaagctgcagagcacagctcaaccttgaggctgttctgactcgtgcggcgccgaccaccggcaagcgctgagaacacagccaatctgtaggcagatagatcgattttctgttttgattccccgtggtaacacagtcaaggcacagcggcaggagtcacctcaatccgtttctttcaggcaagcggtacaaaaggcgtgaaactaaattctttttttttggggggggggtgcctgactagtccgacggcagcgccgacggtgagaggcgacatcgatgctactttgtctctttcagaagatttcttgagcgcagcgcaagggaagacaactggttcaaaaggactagcacagtttctgattcccgacggggaaacgggtggactgcggcttctgaacgcgaaagacaaaatcgacgaagaagcgaaacggtctgctcttccgacgatggggacagcggtgtgctgtgtgaagtgatgcacacagactccaggagtgctatcgtttccctgaaagtgaaaggttctttctcgttcagaagggtggaaaccacagcagacaggaagcgtatagttcggccgaaatgctgacacatggatgcggctcgagttaaaggcgaacagtcgagcaagcccgaaaaatgacacataaacgcgtttacttacctatctagacctactcatatctgtaatgatgtggtgtttgcagattcaaagagaaggtttcatctcaaaaagatggattctaccgttcttttcatgcgtgtagggcatgaaggtcgtggtttctcgtcgctttgcctgttcaggaaagagcgtccgtctccttatgtggaactacttttcgcacctgtaaacgctgtttttccaacgaaaaccggcttctagcattctaaaacaccactacgacaattttcctttctggtcgctgcccttttttgagtctcgtcgtcggctgttgaggtgttctcttcttttcctggccgcgttcagcgggtgtcttcttgagttttgcgaagagtgctttctcagcagagtgacctgaattggattttttttctcggcacttcagttgtctagccaactgtttctcgttgtaacaaacgcgacggacgggctgttttcgcttga

SEQ ID NO: 1083 - DNA, 2956 bp, Toxoplasma gondii
  source 1..2956: mol_type = genomic DNA
gctctatgtctcgctgtttttacaatatgattttcttcagaaaactacgtgagcgccccccctggccggcgatcttgacagacggcccaagttcttcacgtcaggagatggtcgcaaatttgaggagtgcgagagacgtccaaagagctctgaaagaacgaagagagaagaatcgtcagcctcactcgctggtgatgaatctaggataaactgccctttcgcgcccctctctcacttgcatgctcgttcctcgtggtttttctcgctttctctgctcttccccgtctccctctactcgtttctccgctgtcgactcttttttctgtttcgttttttcaaactcttcgcggagatcgttcgtctcaagctggacgatttccgcgcttgcgtggaaagcgcgcgagcaccgccggacgcacactcgtatcattcgcgtctatggctgttccgcgggctctggcgacctcatccaggagtctgccttgtcgcttgcctcagaaaacgttctcaaaaggaatttcaagcaacagaagctccaccttttttatttcacattccaccaaattcgagagacactttacgcacgaaacacgactcattttttcaaaaaaggagttgcccactcctgctaaaagaaaaacaactgtgcaactcccatcttcgtaatatgcgtcgtcgaggctttttcctctccctcccccctctcttttctttgcctccgtagcgatacctactaactctatgctggctaaatctcgacccccaaatccccacatacccatataatatatatatatatatatgtatagtgtatatttatatatttatatatatcgtatgtgtttacaaatacgtatagaacatcaatgtaaatacatatacaggacgaagatccgtcttggatttaagagcacaggatgaatgaatccagagtccccaattggtggtgctctgcaagcattttctccgtttcgtcgtgttctctcgaaacgactgtcgcaccctaggcacccttttcttgtctttttttccaaagttgaaatcctttttcgatccgtcttcgaaccctctgacgttgcctccggccagagggtgggagctgtccgcgaagcaaacgccatgtacgcactgattttctattcatgaggcggaactctccggcccccagagcctcgctctttttcatttctagagtgtttagagagcctcgctctttttcatttctagagtatttagaggactgggtcgaacacggagttgtctccttgtgccactgcacagagaaccactctccaccgggtccgatttcaaatgctgagaggcgcggaaacaaccacaaacacacacacacacaactacttccaaaaatcataaagtcattgacagatctgtgcgtaggcacgtacatacgcatgcaaatatattcatgtattcacctctatagatcttcctatctcgttatacagtcagagatgtacacagcacaaattcatcatcgtgcgtgatgctacaagttatatatatatatatatatatgcacataggcaatacgtggtttcatattgctatgtaagttgaacctacatcacagacagggcctgtgttggaaaggaaatccaggaaagtatctctctccaaacaagtgtatggatttacgaggaacatgcaactggatctgaatgcggagagcctctacttgatttgtctatgggttgggctttttaaaacctttgtgtgcacagatgcatcagcatattcgccataaatccgctcaattgtttgagagagatactttcctggatttcctttccaacacaggccctgtctgtgatgtgggttcaacttacatagcaatatgaaaccacgtattactcatgtatgtatgtatgtatatatatatatatataacacttgtagcatcacgcacgatgatgaatttgttctttgtacatcttggactttttatacttatataagtatagaggtaaagaaatatgcatatgcggatgtataaaaatgacattgtgtactttctaatcgattgcatttgggaagactgaggcttgtgtcgttcgttgcgtcggacagagcagggtgtttttcagtcccccccctggggggtcttgtcgcgcccgcgcatgcgcacagctgaaaagatgcctgccgtctccctgcgagttccttctcctttgtgacgaccgttttcgagagaagaaatcatttgaagcgagacaaagtttcggcgaagtttttttcctgcgactttcccgtcagcgtgcttgtccgaatccgggtgtacctacaccgcacacctgcctccttttctctgtggcggaaaatcgaggggggcgagagatgctcttttctccgttgttttctcgagttttcgctgaacccgctttctgttctgtttgtcttcaatttcccttcaaaactcacgtatttccaccaacggtttcgtcgttctctcgcgttttcccccgaagacccgcctgcacacggtccgcggtgtcctgcagagactcaccatgtctgcgcggcggtaaacgccacactggtatttctctctgcagcactggcgtctgcggtagagagtttttttgagaggaagaccgcgttctgttctccttttcgtctttggagacatccccggagacactcgagcctgctaggcactccgcagccttccctgacaacggcgtccgcgcttttcgcgcggtggccgaggcttttaaatgcgttgacatttcgaagagccccctccccactctgttgacggagaaaaacatcattttgagtcttcgctctgggttcctcgcctccttcccgttctctgaaggtcgttttctctgtcgggaggagagacgctttagccggccgagaggaaacactcggttttctttcgtttctctccttctgcttctgtcgaaaccaacaaagacagcgaagcgagaca

SEQ ID NO: 1084 - DNA, 3680 bp, Toxoplasma gondii
  source 1..3680: mol_type = genomic DNA
gtgagtgcctacgtttgttcacctgtgtatatccgtagtcaaactgcctggagtacaacgccgctgggcgctgggggtatgtcatttaaacccgtgtgtttttctggcctactctagaagttctgtcttgcctccgggtcattttttgtcaatttcgggagttcggagactttcagtttccttcctcccttgtcaccgcagtgaagacgcctgcttacaaaggcacatcgttgttataacgtccgtttcggccttcactctgttgacggggaagtagtttgtcaaaaatattccgccttcctcatcgcgtttgcatgtttgttcatcgtatcatggcgtgttctcccttcctcggtaccatcgttgtcaggacttcgtcgagtttcaaacagccccagggcgcacacatagatcctcaccgcgttgcttaagccaccgatttctatcacagcacgacaacagagatccgacctgacttcacatgtatcctaggatcataacgaacacagctggcttttcttgcctccttactaactggggactgcaactcaatgagactgacacgcgatttagagatgatttattggcggcgacggcaacgcagcaacacaacggtttttcacgcagagatgtaccttcttggaaacagaaattccctttggcatccgcaaactagctaaaaatcagctgcgactgtgcgcctgttccttccgcacgacttttctctgcatgtgcatagaagacctcgacaaacgagcgcgaaccactcgcgtttagcacaaagactccgaagacacgaaacggccttcccggacttcttgcgtgccaccgatggtcacccgaaaaaggaaggaagcactatggatcgacgccgttcgctagtttcatttcacacttcacaccggtcggaagatcttcgcgtgttttgtgtcacctgcacgaaaagttccagtcgatcagaaaggaaagtggtggcctattctggacgacaggcgaaaagataccgatttatcctcagtcgggactcgtagatccatctcgcgtgaatgattcggtcaggatcgcacacgccgtggtctttcctagttaccttatgctatgacatccgctgagcgagagcgcagcgctcggaaacagagggaatgcctatttgacgtaaataagactccgccagagcgacaacagagcgcgacactataggcgtgcgatggcgggagaataaaggccaaaaggtgaaaaggactcagagaagaggatgacacggaggagaggtgctcactcacgctcagacaagcactaagtggtgagtgcgaaaccttactccactgccttttctcaaatggttgggcggaagcggaaccgggacccttcagcgaggaggcagcgtccaggtattagttgtgtcaacctatgcagctactgtgggactcggagtcccagtttcagttacggagctttttgagtacaccgtgcaccgttgcattcaggaccacgacttttaatcggttggtacagaatatcccgattaactgggctagaagataccgggtaaaccgcgacccagaattctatggttgaaatcataagtgaacaggtgaatggcgctaacaaatgttagaattccatctgacggttagataagaacgtccccaactgctcgcgaagtaggactgtgccctgtgacaggtgtatacggtgggggacggaagtttgatgattaggaaaggaagcaggactgcatccagtggtattctgtctcttccaatcgatttaaattcgcgagtacggcagcccctaccactgaggtgggcaacttgagtgaacgattccatcttttacccacggaattcgaatcataagacacaacttccacatcaactctaaaagccaccacctggtcacgagaaaggacacagagttccacgtttccagttttcgtttgcttacgccttgccggctttccctcttttgtctgttgctttgtcgaaccgacaacagggtcggaagccaatcgtcccgcgcttgtacgcgtcgatttcttttttttccgtgttccactctcttttttgtgtcctggtgttgccaagcagccaactgccatttttttagaggctgtttactcggtttgaattgtggacgcatttgttgagtccctgttcgcgttttgtgaacctttgcattgaagccttacaggcttgagttcagatctcagggaagtttgagtaaacataccgcctttggcaagatcataagggagaacattcgccggtttatttcggcggatttgccttgttctcgccatatctaacatatccgcgagcggcgtcggttggagtcacagcgcgcccgctggctgaaccgtgacttgtttctgtcttgtctttccgtgcttcccaagtttcttcgcatgccggaacactggcacacacctttcttcaggtctgagttaaacgctccattttttacgagagatgtgcattctctcgccgttgctgcggcctagttggtgactttcccatccgagacaaggatcgcaagctgcgcgcagaagcgacgatcacggagcacacatcgaaaccttgcacattttataaaactgacgaaactgcggttgacgtgacggcagcgcgacgcttttcggacgccagttccatctcatttgctgtcttcccttctggaccggatttgcagcgcgaaggaaaccttttgagtgtgcaacttctcgaacccgctgcttcaactcacgcgttccttgtgccaatgcagtgagcatctcgaaaaggagcgaaaaacagtgaacggttttcacgggaagtcgctggctgtgttgaacgcgcggggctgccgtgccttggatgtcatcgcgtcctttcgtttcttcagatttttttcatttgtgcctgtgttttcgggcgcgcggcatgcctgcaacctgcgaactccgcggtctcaaaatatccgcaacttcttccgcacgtccttcgccgttttctgaccctgtcgatttctgtgagtttgtgtgactctcgctctcggatccagtcgaatcctgctgtggtttatctggcgtcgttctttttctccccagtctcgattctcgtcccgactgctcctttctcctgctccgaacgccgtttcttttctcctcctccccctctctcgtctcctctcaggctctcttctcttcctcatatatttcccctttcctaactccctgttgtttctttgtgtcaacaagctccaggagacgactgtcactccggtccgctgccctgtctacctgcgcccaagctaacgcctcgctctagatgtctcactctgccgtcgttttgtctcgctcttgccgtccgtgcacctctgcccacaaggaaaagctccacatctcaattggtaatgcaatgatgcaactttagattcgtgcgagcgctcatctcgttctcgagaagtcctacacgaaccggggaccgcaggttcgggtcgagtcgcaaaagaaacctgctgcactctgggcctctcgcgacacccgctcgcagtttattcacggcgtcaacggggtaatttctactccgcatcctttcgccctctaccttttctgtgcctctcttcttcgctggcttccaccggcctgcgaggtctctctccactgcggctgtcgcgttttgagagtttttttgcctcaa

SEQ ID NO: 1085 - DNA, 3149 bp, Toxoplasma gondii
  source 1..3149: mol_type = genomic DNA
gtgctgccatccacagtggagaaaatggcggtgaacatgcttaaccattagtaagcgaaacgtgccacgcgaggctttcatgcgtccagcagctcgcctgtttctcgtcacgttttctgagcccgataaagtggaggaaagatcggctagagttgcagagtatccttctgagcgagaggggaatgagggaaactcgccaggttggttgagaacagcgcgttgtaatgaaaccccggagacccactggatgctaggttttccctggtacgagcgtcgctgaagtgcttgcatttttgtggatgacgagaggttccctggggaagtaagggtgcgacgagaaacgaaacccgcaagaagggcttcgtagaaaggcctacaaagcattgatttgtgtttgatgtcggtcgcattgtagggcgttttatgcctctgacttctggaaagaggggaatagtgccagtgggtcgataccattctccgtgtttacgtggaatctggcaaactggcttgggtggtgcatcgttgttttctgtccattcggtatgtgcccttcagtggaatagaatgggatggcccatctgccacaggctacgccgcacgacgcctggagaagtactgcgaagaaataccccgtggagaatcgaatttgaagtgtggatggtagaccgtggtctggtgactggtgtacactgccactttttccggagcagaaaaggttcctaaccccggtggaggatgaatggggctctgagccgagtacaagaagaggcttggacgtggctacctgctcttttcaagaaacaaaacctatcgtgtttgatggtacgcattcgttggtatcctcgaatcactcttggcaattcgggtggaaaaattacctcgtcgtcgcacatttcggtcacactcgggagcggaaaaaacagacagtggcgcttctccgaagttcccctggagaacagtgaagacgccctcaatgagaagggtatatttctttcttctgtgactacttccgtactcgggtttcattggaattggattaaacacagacaatgtcaatatttctgtttttcacgtacgctgctgatgaaacaacagctaatggagtctgaatcggtgtatttgtgggccgcatctcccacctacgagagcagacctcagtatctcacgctttcgagaacttacttttctcgcattaaagcaacaggagtgtcaacgttagtcactactgctgttgaactcatagtgctgcgatgatgcagctcgtgacaaactacagcggccacggtgttcacagatggcccatccattacacgccgttaaagaaactgcaatccttgctgttttctacgaaagagcagcctgacgaacgcgctcacgaacatgagaaagaatagcactgtagaaagagcatggtctggccgctggcgctacatcatgtctctcggctccttaagtgtcccaggtcatacatccgagtgataaacaactttatgacttatgtctggtggcatccaccacaacattcggtaacactacataccagcagattcctggcctgctcacaggtggtaccaaacccgtggcagtggggacgcccgcaacgcctgtggccgccgcaccatacacgtcgatgaaatccgtaaaagcagtctgatcccctcgaactgcagtgacttgactctgacaaaaccggtgaattactcggacgaggcgtagaggcgctctttcctcccgtactttcggcctcccgtaccattccgagggtggcttcgacgtcagagtttggcaaacgtacatgaacggtggttcgttgttttctatggaaagcctttaaagcagcagaggcccgtataattctcggacagaatgcagatagaatggtcgcatgttcttgtgcataccaccgcagcagggccagcgccgactgcatcctgtcaacgccagcatgcaggtttgcggatgtacctttgagtaaacacgaatgaatgcaaagcagagaactggggtaaaccgtcagcgacgagaagcaccacggtgtctctacttgtccctagcgtcgctgatctaaattaaaccttctgcagccgcttttgtattggttggagattgaggagaagcggaagcctgttgccaatgtctttaataaatgacaagccacttgagcagcacgcggcatggcagagagtcgtgagaatcttcagacaagaggacttcgtggtgttccatatctgagcgccggttttcataagcaacaacacttccagtgtgataccccgtccacacagtcacgaaaaatccccgctgccaacaccgctggcgggctggcaaacatgttttgtattgagggaagacggctctcagcgttggccactgttgagaggtatctcggccaagcgaactgcagttgtatggcgcttacggagtaaagcactttttcggagacaatgtcgatgctaaggcacgcggcacttgcgagtgacatcttggagttaaggttccgcaccatgtatcctctcgagggtcagttgtgtgcagcgggcaacccccggtttgcgacgagttcccctcatcacgcagggaggccggcgcttgcgcttcagaacggccactggacgcgggacaggcagatatgtgggccatgcaatttctgtttcctgggcggaattcatgttggtcgttgtttggaacattttttttcagctgccgtggaggcccttggcgcaaaaactcttccgcatttttttcggctggggcgaggttgtggagatttcttggcaccaactgtttcttctctccgtttctgctttcccacggcagttcgagagatttgtcgcaggcctctcctgtacatataatcctgcggcattaagaaacacgcgtcggtgacgtgtacatagttgtgacagagtgtctgtttcccgtttcgtacaagtagcattgtggtttccgcgcgtcctctgcgtctctctgtcaaccgcaaacgagcgctttcctttttgtctatcccaggccaggtatttgcaggcaatcgtcaccacctcgcaaccctgtttaacgattttgcttcctgctgtgaggacagggagcctgactccagcctgtttaacggttccgcactcgattcgaagtccctcagttcagcgccaaaa

SEQ ID NO: 1086 - DNA, 1797 bp, Toxoplasma gondii
  source 1..1797: mol_type = genomic DNA
ttgtgcagatcgatcgcctcctcttgcccagaggcttcgacttctcgtgcggccttccgccgcctcgtcgcgccctgtcggcttgcggctacgtcgctgccgcttcggccgtcggcacaggtcgcaggcatgttctccggtcgacgcggcgagagcgctctgcaggagtcgcacagagcaagtgactccggggacgaacggagttgcgcagttcctgcaggcgctccacttgagctcagagtgcaatcggagagaatgtttgcgactgatcgccgtcgcgctacgcatcaacgcgcgagacaaggcgagcgagagaaagacattcgaaacgcttccctgcaccaggaagttcacctggtggtgcaccgcgttaggacgcggaaccggtgaactaggtccaaccgagagaggagcaccagaagagagagaagacgacgatgaagaggaggagagagaagacgacgacgaagaggagagggaagacgacgatgaagaggagagagaagacgacgatgaagaggaagaagaagacgacgatgaagaggaagaagaagacgacgacgaagaggagagagaagacgacgatgaagaagaggagagagaagacgacgatgaagaagaggagagagaagaagaagagaaaggagaagacgaagaagaaaaatgtgtgtgatattggagagttcctgcgtcgtgtagatgtgcgcctggacgcccgacagcgacgcgggagaaaggagcggagaacagaaacgccatcgttggcaaaggcgaggacggagaaaaaagagtctgtttctcccttcctgggtgtctttgaggaaagggagtgtagatcagaccgagaaaaggtcgtccgcctctgtgagatggagtggagaaaccgcatccgaaaaacaaagcctttcaaaggggacggaaacccgacaaggcatctgcgggcacccgttcgaaaagctgcgaccgagacagctcgttgaggagtacatacacctgagaagcaccgccagagggggaaagccttcgtctccactcaacgcgctgcattttcttctgtttctgcctttcggcgccgtggtctggagcgacgacgaagttctcttctatgtctccgttgacgctgaggcagaacctcccgaagccgttggaaggaggagatgaacgcgagcatgaacgaggaagagaaaagtctgcgagaaagagattttctccactttcaaataggagagtcggaatttgaaaaggtagagaaaccgctcgcgtgcagcgtctctcacttcctgggtcgtcgggaaaccgacactgcatgcgcgcgtttgcgctggaatcaagaacctccgcgagacaccggcgaggcatttttctttccgtcttttgcagctgaagcgttcgcttccggtgccatctttctcggtgtttgtgtctccgtggctgggagttgagagaaaactcaacagaaggagccagcaggcgcggagtctcccggaggagacagcagggcgatgtgacgagagaagaagccgagagaacgggagagacgaagtatgacggagaggaccagaaagaaaggagagaagaaaaaagtcatggagaagcagagagtgactctcatcgagctcgaatttctcttgagtccagaggcctgtcgaaggaaagtggatcttctctctgctgcctcggtcgcgtcgagttcgacagacgcgcttgttgagagatctctctgaaagagtctccgttgtgaggaagccaacagcgcgtctcagccttcgcggcgaaacctgttccctctggaagaga

SEQ ID NO: 1087 - DNA, 1487 bp, Toxoplasma gondii
  source 1..1487: mol_type = genomic DNA
gtctactgtggaacgcgcagaggaaagcctttgagaaaacctatccacaccaagcgtgcaaggaagtcgaacaaactcactgaatgtttagtcgtatcactgtagttttcgttcgcacgtcacggcgcacgtgagtgtgtattggtatctatagctcataaaatcaatgaggaactcaagccgatattgttctgcgccgattaacacaattggcccttgctgctgtccatgtgactcctcggaaatagtataggtcgtaatgagtcgtatatctttaccacacgccagctcttctggtgatggacaatctagtgcattccacggagagaggcagacggtcacgggtgagtggctaccaaacggttcgaactaaagtgattgctgtggtacacgggagttggggtggtcctgtggcctacttgctgcggcgtcgtgtgagttcgaaagaaccgctgggagtttggtttggttcgatgcattctcttcggccaagcaacaccatcgtgtgggctgccagctaagtaaggcacttgaggagcccaggcaggaacacgtttaacaatgataattccattactgaggctgcctatgtcctacaccctctggtatctgttgacgaggacggtcaccggcgttcaggtgaaggtgataccatttattccgagcctgaacaactgcttcgctgaaacaagcgttgagtccgacggtagctaagttctcacccaacctggatgtcgaaataacccataactaataatccttgtccagatatttggccctcacagttcacgtaaccccccgtgtaagaacagcctcgcttgatcataggtaacggagaggatcagcagtcgcgaattgaaagcttgcgtgcgacgtgaatgttatagttccaatcgggggaatcgttatctgctccagcacccctcagtgagctctccattgtcgctctgtcatccaagctaaaagtatactgggcctcacccccacccttctcttcgcggtgatgattggtgcagtcaggtgcccgatagcgaaaggtacacgtcctagctttttttggttgccttcggtgagtctaaattgatcacgttaacagtaggcaaagatggcagcaaaagattccgttgccgtgtcctgatcttccttaatgggcttgaaccaacggcgccgtctcaataatgacgtgattaacgtaaaggatgaagccgctgtccgtttgtctgtgcaaacggctgccattatctttacagtctggaagtgctgcaaatcgacacgttttatgtccacaggtgtccaccggtttcggtgcaaaggttcagggtatattttgttccatttttcccgaatattgtgtgttcttgagcaaaggttctcatactgtttcgctctctggaaaagcgttgcgtcgcctccatccacagaacacttcatgcaaaaagagcagtgtcgtgcaaccacttggtcataacaaacgacgacaacgaaga

SEQ ID NO: 1088 - DNA, 1835 bp, Toxoplasma gondii
  source 1..1835: mol_type = genomic DNA
gcacatgcgccatataaagcctgttgggctagaacgagatacacaaagagactcctcagcgcgcacactgttgcttccgtagcgtgcaatactctgtcgtagagcgctcgcggtcctcttaaggtctccctcctcttcgacttttccgtccatttcggttgctgcagacacttcctcgcgtgcgtttctctcgttttctttcacagccacgccggcgtctgcggtcgagagttcgggcattttcgctgcgcgtgagaaaaggggaaacgcaaatgagaacggaagacaaccctggtcagcagcagatggctttgaggactgagacttcgtcgcgaagcagagatctgagagtgcgaggccgacaaaaacaagaacttccgggaaggaattaacgtctggtctgcaagcacaacaagtacacaagagaggaaaccagggaacgaggcgtcgatgagtgtaagacacaacattgaaacgaaaaagcagaccacgatgaaaggagacgggtattccataaacttcgatgcagcatatgtagaaaaagggaacgtgtcgaacgagaagttgactttgtgacgaacaggtgatgatgttgcgtgttcaacagggcgttcgttccactctggaaatcgcaccttgaaatgtccaccgtactcgtgggggtagctgggagaagcagcaaatgaggagtaacgggtggcactaaggaatatgggaatgtgcagaaacgcagtcgcaaaatcttctcgtatacgtgccaaaagagctgtttttgtactcttgagactgggggctaaaggcacacagttcttgtcgagatccgaatgcacggatgtcgttagagaagaaccgcgagagagacgatttggtgtggcaggaaacgtcttactttcaggagccgaagagcaactgtggaatgcgtttctctcaagagtggtggaccgcttgtccgtactcgtgtttttcttagggatcgacggagtatctaggctcagacggaaagagtatactttaaccgcggtttctacacaagtcactcaggcggttttcccgctctctccagtgtgtcgtgttctcggggtttccgcgtttaaaaaaatgcgtgttgctgatttcgttgccgtccttgttgctccttttcttgtgttacgcttgacatgcacgcgcgtatttacatcagcgttggccgggttttcgcgaccggtgagtctcgccccaccgcattccttgcgaaaaatattcgttctgttccatttccttttccgcgcctggaactctctctccaatgtgacgttgaacgcgaaccgcctcttggagagacagcgcagcaaacccgcaaaaaggacgtgcgtgtgtgttcgtgtgtcaaggttggagaaagcttttcctgcactgcaattgcgtaggattctgtccgtctccgcaactttgcccaacgcgtcccgcccggaaatgccagcatcacccagggtggtgacccaccaaaaaatccggagaatatgcgtgtccgcacagactcagttgcgacattcacgcaccctgttagcttatggggcggaagtcagagatgacatcgggtgttgcgaaaagcagtgcgcatcggggccgcttgtttaatggttggtgaaggtattcttcttctgggttttccattttttcctttccattgtctcgtgtttgaacgcaccggtttcacggtcgcctctcctcggtcaagtgaacctccaagcaactctgttgccttcgtgaagaatcgagacacgtgcgtggcgcgtctcgcagctcccacagactcgccgctttccgggtttctctgtacgctaaaaagcacaaaa

SEQ ID NO: 1089 - DNA, 1778 bp, Toxoplasma gondii
  source 1..1778: mol_type = genomic DNA
gactttctttcacgttatgttcatgtcataggtttgaggctcgataccaacgcgacccgaatttcgtcatgaagagcgagtgacggcgctccttgggcgttgtgccttcatttcgagaagtcttcacaggtgtggattcgcgttaattgagtgtaacgtcgctacggggacagctgctacgacgacagtcgcacgccttcctggacaggttgcgcattttgaaggtgcacactccacagcgacttggaccagaaaattggtaaagggaacccatgaaccggtggaagcgttgaggcggagcccggtcttctgcgtggcagtttttgccgccaggacgtttctcttttctctaggggaaattatctataccctcccctggaagcgcgactgccactcgctgatcgcagactctcgctaatgcccggtttttgcgcaccaggaacagtgtcatccatttccagtgtcggccgtgcgagacatattcgccgttgctccgtccctccgttacgggtgcttttttttgtgaagagaatcttttccagtgccagcccagattttcggtgccgcacgacctgctttgtggcagtaggaatccgaagtcggcatgttccgtcgtgtgtgggcagattctgcgcgccaccgcattcttcgtttgtcgtctgtcttctattcttgcatgttggactattcctcctgggggaagtcgtacgttctgcttagcccctctgtcacccctgcagtctccactgatttcggcgcaccacgccacatctccgagttaaactcttctcagagttgtttcacacgactgtgctctcgagcgttgcattgaggtgcataagcgaacagatgcagaaggtatgaacgctggtcttcgtgaaagcagccttccccaatcgtgcatcctaaacggagctgcaaatactgttcgcggggccgtcttctacctcttcaaaagtaacacggcgactcctagctttttagaagaaagactgcggtgttgttgagcgcaacacacgaagccgtgtccagcgtgtcttccagcaggtatgatgatgcatctttttttgggtcaggaactttcagatgtgcaacagcactgggcgtacgaagagtgccccggactgtccacagagggaccgcagcctcttgttttgcagcttttgtacagcatcccttacgtgcgtgaggagtacgtgagccagtgtaactcccgcgaggccacaccgtgtgcgtgcttccgcttaacgcggagttccaaacatataccatctcttcatccacttttgccgcgtgcctcagtagagccacgtccacaacggacaacccgatggccgtgagcgacaccgtttctgctcagccccgaaagtccgcacacaaccttcatacgaatttagcaagatcttctcggcttttgtcctttaggtgtcgagtattgaatcacgtagtctgacccccagagtgatctgcacgaagttacacacgcggaggaaatcgcacagagataagctttttcatgcaacggctgtctcctttaacaggtggacggggggcctgcagagagggagcagcagacacaattacactacgtcgtgtactgggactgggtggcaggggcaggacagtgtgacagggaaaaccgcgcacacagacgtcgcaaacgagaacttttttgaaggcaacgccacgccaggtaccaccccgtgtttcagtaacacagtggggatcacatccgtcacatcagagcgtgggatcgcttgcgcatgccactgggacga

SEQ ID NO: 1090 - DNA, 2274 bp, Toxoplasma gondii
  source 1..2274: mol_type = genomic DNA
aaatatctgtttctgtgggatcgttcatcactgcgtgctgatgcagtcgtgcagactacactttttaggacagcgtatgaaaagaaaacacttggagggaacgtgagacaagggcgagtgcgtcgggtagtggaagagagttcacttgcgcagattcctgagcaaaaagaggaagcaggtgaagagaaaaacatcgatattttcacagtctctgtaccatcattctaggtggcttgcaaaaactgcacgtgcggggggtaacgcggtgacgtaaattttcaccacatgtatttctcatgccgtcgaccctaaaagttcaacggaacaaaatggtcgggtgtgcaacttgaaagagagaccagaagatcattggtgtctcacatctcctcctttttgatgtggaaaatctgtggatggctttatggttgtgaatagaagcggcggatgcaagtgattttctgggggtgctcgcgagccaacgtagtgcctcagaattagtcttgagcgcttgggagttcccgttcggcgaggcgtgactgcgtggcttctttcgattcttttgaaaatctgaaatgctcatttggcacgaggtacctgcgctcccaacggttcggcgcaggttgtcgcccattccccaccttgcggagtcataatgaagttcttcagaaaataaaggatgcatatcatgtgttgttgtgctatcatttttaaagaaacagcactgtagatatactaacgcttgcggccaagagaacgtatgactctcgcaaaaggttttcttttttaaagaaagcagaccgacgttggaagaggttcggatccggcaatgtcttgcaaacctgccggatttcaacgatttctttggaaaagagaagtgaaacaagaacagaaagcggattgccgactaggattccgatcttgacgctgctgattccaaacacagccgggtaccgaaccaactcacgctgaggaaccacattcacgccgctactgtttccggcaagtttccttctacggtgtgaaaagttgttcatgcagcataaacgaatcggccagcttccatccgtcaccttcacgagttgctggcttgctgggtgaggaagtgctccagtcacgaaacacgaaccgccgaagaactaccagtattttcatgtttacttggaagccgtaggcactaacaatgccgctcatagtgcgctgaatcacgtcttaactttacgctggagtttttttaatgtttactgactagagagcatggaaacaaaaataatctattgtttagctcctttcattgaaatcaagagagctaaaagaaaggggaataccagaggtaccatccaacggaatgaaagcgcagacctggcaaaatcaatgtgttcgcacgctgtcacgaagatctgcatgtatttttgtccattaaacaacccgcttcgataggagtgtatgcataacatgcatgagctcgtctgtcccgtctgttacgatactttggggggctctagcttaagtgctgaagcttatcgctaggaacgtgttttcaccgctggcaacactgtaggaagtgaggttggcgtttcaggagtttcaagagattcttgtctttcttttcaacatgtaacagagttccactgattctccattgtaattcttggtctggttcaggcacccggttgatgtaggctgcagcgattatcgctttttgacgttctgttgtgctcgaaccgtcagtcttccagcaggcagttacttcataccaatgtgactgtccaggaagctaggcttccgggactccattaagctctcaaatcctatcgctgagatgtgaccatagctccaatacgccgttttggcgctactcagccagctggttaccaggtagcccctcaactcgcgtcggcagcggagaacctttccacttaatatgtttccagccttcctcaacgcggcccagttgtcatgaagcttctcggtcagattcatcaacatgccacacgcgcatttgtctgaccactagtttctgcgagtcacttcgggagtgactttttgcaaacaagggaaagcgaagccaacgggaacacatacgagctgtgacacttccatatcttcctccctgggtcaaccgctcccgtgcctgaagattcaactcacttatccaagggttttagcgaggagagagacgcccagaagagtgcactgtgaaaattagtgccatggaagatgggaaccgacaaatgaaacaataagggagagatggtgaaacgaaagaacaaacgt

SEQ ID NO: 1091 - DNA, 4715 bp, Toxoplasma gondii
  source 1..4715: mol_type = genomic DNA
cgacgtatttttcgcctttgttgtctcacccatgaggtacgcgagtttggcgacgcacgcttcgagggttaagtccttcccgttgatgaccccgaggttggaaagccagacgccgctttcgtaggcgaggaggttggccgagccgcgtcggcactgggtcgtggcgacgatgttgattccgttttcgatcgcggccttaatggtgtcgaggagttccttggtgctgggcgcggtgccggagccgtagagctggaggacgacggcgagggggcgtttcggatcttcgaacacgcgcttcagtcggtcgaccgggaggaacggcgtgatggggacgacggcgacgttcaggcagaactgggtgaagatgcggaatccgcggacgggtggtttgaggaggagttcgtcgtggaggacgacgtcgacgccgacgcatccaagggcagggaagttcggcgactcgaaggcgtcgatccgggagcagtcgactttgctaacgcgggtgccgcgcagcacgcgggagccaaagatcaccaccagttcggtgagttgcgagtagccggccatcatcatagagaccgcgaggtttcgcttcgcgtccgtggagatatgcatcatcggcagcatcgcacccgtcatcaccactggctttcccaggttttcgagcatgaacgagagtgcggcggctgtatatgccatggtgtctgtcccgtggagaaccacgaagccgtcatagtcgccgtaaaaattgtggatctgctgcgccaggagccgccactgcggtaggccgatttcgctgctgtcgaccagtgtatcccactcgagcacgtcgaagtacggcaagttcggatcccgcatttcaggcaagtcctgcagacgctgcgcgagccgtgtcggccgcatcgaagacaactcgccgccgtagtccatgcagatcgtcccgcccgtgataatgatcagaatcagcggcttctgcgggagcaacgtcgtcgtcacacccgaagtccccggagacgacgaagacaaaagcgtcgcggcggtcgcgacactcggatcggtcgccggcgcaaagacgccagtgcccgcggacaaggcgaccgggtcgccaagcaggtgagcgcggcttcccggcgcatgcatcgagttatcggcttctgcgtgcaccttgccagtgtcgctgccggggacgggctttataaccgcgccgtcaaaacgcgagaccggtccagtcgtcccacctgacggactcgctgcagccgaacccgctggcttttcagaagcgttcgccggaaacgaggcaactgctgcatcggtcgcttccgacagatggtgcagctgcttgtcgccggatgtatcggcacctggagccacaacaggagctgcggccggcgagatgtgcaacgcggcaccctcgaagtcgagcgaattctgcgtattggtgcgtttcgacttaatttcttgcatgtccagcccgcagtcggtcacagcagcgctcaggtgcagcggggtgatgtctgcagaaaggcacacgactgtgtggtcgttcacagtcatccgctgcgagaccgagccaaaattggcgggcagcctctcgtgtcgaccgttcaccagctgaagactaccaggaaggcgactctcggtgagatgcggcgcagatgagcacgcacgcaaaacgggggtgctcaaggaggcggcgccagctccggaagccagcacagagtcagacggctgggcgccgccgctctctgcagaaggctcgatagaatgagcaggattcatcgtggaacctgcaaaaaagcaagggggcagtcgaatgaagcaaaagagagaggaacggagtgtcacagggggtggaggcggcaagaaacgcaagggaaacaagaccgaacgatgctgagaagagcgaggaggatggacaaaacgggagcgatgaacggtcactaaacgccagatgcagggagcgagaggacttagaacgaaaaacgggtctgctcttgtagatttcacggaaacggggctacaaagaatcagggtctcttcaaggcggggacaccgtgcacccaagccggcaaaatgcctctggaacgcctacgaaagggagtggcgcgagtctttgaaaaaaccagcacattcccgttttgcgcctcgcctgtccagcaggaaaactttgggaagtggtgacaaaaaaatcgtcgcttcgccacgagacgacagaagctgtttgttgtctcgagcaagcaccagctgtccgggatcccaatcccggcgccagcaggacagcagtcaaggcggccgggaggaaatgaccgagaaaaaacccagttttctgcgtttcgggaggtcacagatgggctcgccaccctcgcgatggcaaatagacactgctgcagttaccctcccgggaaagaaccaaaatctataatgctgcgcgcatgtacgcacttgcgcttgcttgcgcacaacactggttgtctcgcctcgtttcctctgtctcagcgtcgcttgtctggatgaatggaatgtttcgaagagaaagacctagaggaatgggaaaatgaattacagtaagcggatggtaacttgtctgtcggtgttgttttctgtttcttaaggcaggtgacgacaacgcgccgctgcagcggggcccggagtcgtcgggcagattaacggggatggaggtacgcagacatgttgtatatgccagtgccgaaggagcgatgaacggcccttccacctcaacagagttcttctctcctgccttttctgtgccatccgagagtcgtatttctctttaactgaaaaaatcctcgttctacactctgtgctcacgagacagacaccgacgatgcttctgaacagaagcatggctggcggtgatcttctgggacatggcgccaggaacgagcaccattggactcaagcagcacacacaccttcgcgctaggcttctcactcactgaccctcgcgcgtaattcgacaaacaaaacgattcgagacatatcgtcgcttgcaccgtagatcctgtatctccacagatgcagatttgctagcggctacatgcaccagtgtgtattccgcagctttcacaaacgagtatcgcgcgagcgaatccccgttgtagcttgtcagtgacggacatttgtgttttctgcattggtagtattctctcgtcagcatccaattataaaggattttagaggatctgtgcatgactcgcgttctgtgccagcatctgccggcgtagcgacatggcgggtccaagcgattatcggcagccgtttcacaggtagttttcgtttcccgaaaagggcttccatttttctcctcttgcaccgtcgcgaacagattctctgtctagctctttctctcccttccccgtgtggtactgactgcggcgaccccacgcccccccccttcgggacttgcgaacactgccatcacgcgaggacagacacaggctcctgcgttcttattttgcctgcctaacgaagtcatatcacttcccagagagtgtcgagtgaagaaagggaaaacattcggcagttcctactgatacacactagacatcgagatcgcaccacaaatgtatagttgcagtacagtgcacgatcatccataatggctgcctagccgcatgcacatatccagttcaaatagagtaacaatcagtcgtctgcgtatggaaatcccgataaacgtgttcttcagactgactaagaaccacaatgtctgtgtcccgatgctcgttcagacacgagacggcttatattcggagtgctgctatcagatgtggaaatcctgcggacatgcgagtaaacggcccttgatttcgtgtatcatacggtgaagaggcataattgagagcaagtcacgggtaatcttccacattatcttgtttgtgttagtggacgcagggaaagattcattcgcatcacgatgacactgaaagtgtgagccagactggaaacgcgcttcggcgtatataagaagctcgtggcgaggatgaagggcggcgcgagtggtagggttttttctcattacggacatgtgtccagcgtgagagcttccttggagagaaaagcgagggaaggcgcgttttcctctactgcccttgttcctgtttctttgactttccttgtcgcgtccctgtaattttcaccctttggacgaaactcagttgcgaaggcgcgcagccgctgccgactatcggtggagctcttaggttcgccacaccccaaacttgcgtcaagcaaaaacacacaaagttcggccagggacgggaaactcggcttccagtcaacgtccacttttcggcgccgtttcctcgcttttgcctctccccgtctgccgccaccctggagatcggtcgcgtgcctctcccctttttcggcagccccttctcggccacttcccgaaacagaaacctcctttttgtgagaaggcggagctgaccgtttcacgtcttccttcaactcttgtggtctgcgttggctgtgtttctgccactacttttttcgctgcgcaatttggagagactgcgtggacctgtggtacatgcatatcgtgcatgtgttgtggagagccgcacaaaaaacggtgccggcttcctctcgcgttttgtttccggtttttcacctgcgtgtttagccgcgtcaccgctgcgcttcggttctagcgcatctattcctccaggaaccgctttcgaagtcgaccaaga

SEQ ID NO: 1092 - DNA, 2820 bp, Toxoplasma gondii
  source 1..2820: mol_type = genomic DNA
acgaagaatttgagtgtctagtgcaaaagattcagggtggcactccgaccaattccagtgtatctgtgtgttgttttcgttttacctttccagggtttgattgtggtactttactttttttgtatcgccttccttcaactgttgccggttctcggagtttcactggccgtcacttcgttgattggataccgtgcattgtgccagagccgggcacagcaactgaacgagagcggctttcctgaaaagaagacgttctgaaagcctggcctcgtagataaaatcgatgagacgttttacttgtaggcagagatgtagcggtcgcgtcgccgtcgtggaagctccttcggcgatgtctacatacgcatttgttcgtggagaagctgaatctgtttcgtagacccatgaacaaagcgaactccgccttagctcttcaaaactactaatgcgtccatttatacatatatatatatatatatatatatacaacatgtacatatatgtgtggtatgttatatactgggactgtttgcctcgaattgactatctctaggttttgtgtggtaggttgccttctgcgttttacaacaacgcctttcttgcgcagagaggattcttctctttgcacgaaacattgtcactgccgataatttgccgaggagacggtgggtaatcggccgagtgttccgtccactttggccaaaacgtatccctctcttcctcgcgttcgtgtacttgtgtttttttctccgcggaaatgcctatcctgcatactccagcctagggcgggagtgcgtgctgtctagttttgtcgccaagtaaaccacaagtgggaaaggacacaggcgcagtaatgcctttcccgacacgcttcgaacgagaggagcgtcagcttcccgtaaaatggcctgtttgggagcgccgctggtggttggtcttctgaagacttcaaatttcgctcgcttattttatcaccaacttcttactctctgcggatgccaactgtttatccgcaccagtgttgggtgggcgaccccctttccacttgccagttgtggcgtccgcaccgccgtcaggcaccccagcgagaaatttgacaaaggcgaagtgaccccggcgttgcattttttctgctgcaatctaaactcatttttcgaattgcaggggaaaagaacccgctgtccgccgcatccgaaatcagaaaacaaatccgagatcccgctggagccactgtagtaagacaccccaggtgcgagggtccgtcatggcacacctctctttggcggggttccgtctcccctctctttggcttgctttcgcgcttcgggcgccgaaacggtgcagaacgcttcagagagcaaagccatgagtggccgcagggcatcgcttttttttcagggcttgccagagaacaactcgacaaaacacgagagcggacaccgaacgaacaggggcggcgcttctccaggaaactacttttgttcgcgggttgggggtagcgagagttgccgactgccgtttcccgggtgaatattcataactcgacacggaaaagcatagacaggttgcatcttacatctgacggcgaaccgctattcctaactgaatcttggttagtaactgacacggaagtaatgcgccgacaaggatgaagcaagactcgaccacccgatacggaagtgcgcactgtccatatgcagatggatttggtgatggtctatttacacttcttgccagtaggtatccgatcaaaaaactccaaaagtacttctctagaactgttgctctgttccggtgtgacttctctcgagcttgttggtactaggggcggattgatcacgggaaaaccagtccatgtggttccgcatcccgacgtctttttcagccaacgtcgtgcgcagtctctgtagaccaattctaaacacctaaggattccctgatcggattgttgttggcctggcgcgtgtacagtgcagacaagaccagcgatcggcaacatacgactctttgttctgtcactttttctggaagagaatccttcatgtctgcaaccgacgagcgagctatgtgtctctccctgagtgaagcaccaggggtttcagcagaagaacgcaaaagctgtcaggtagcgtttgtcttcgctgtcgacggggggcggatgccacgcgccggcgaatggcaacggacgagaacagaagccttctccgaccaagtgcgggggcggaaacaggcacgcgccggttttcagggtttaccggatggaacacccaaccggtaccttcccatcccacaggtgaaagtttggggacggtgtctgcgcccgcaccggagtctcgggtcgcccacccacggttcgttgatcgcacagaacttcgatttctgtgtttctgagttcgtgtacaggagcgtagtgtcggcgtctcgaattctacgcacttctcacttggtagacacgtgttccgtgcagtctgtcctcgggttggaaagagtgattctgcgagttccgccactgccgtgtccagctgcatagagttatgcaaatatctccgaacccaatcatgtggaagcccaccggcgtttcagcacagtgtctggggaccggaacaaaggagttgcagctgcagccgaggcaggcctcataaaggcattaagggtacgaggccgaccggtcgctgaacggcagaaattcagttcgttccgtcctcacgtgacaatcacctctgcgtggctctgccaatctgaacgggtacacttcgctgccggaaacacgacactgacttctccgtggagaacgcggcggcgctacgagttccgaactctcta

SEQ ID NO: 1093 - DNA, 1974 bp, Toxoplasma gondii
  source 1..1974: mol_type = genomic DNA
aaagagttgcagctggctttagttattgaggatatgggtggaggaggggagactacccgcctgcggccagacacactcgttggcagacttcgtggacgaacgccgctggtcacttcacagtctgaacctgtagttattcggctttgtatccatcatgcattttctgatagaatgtactacgttgaggggaatcggcaaacgtacgcaccttttcagatgtatcgggtttaggggaattttagtacgcttcagaacccaaattcaaacaaacatgcacagttttcagacgacaagttttatagtcttcttcagatggtactgctcctggagtttgctggcgtgaatccacggcacacacgtcttcagtacagtctcacgatgccccctcacccgctggacaatgctttcttgtacgctaagtatggttgcccggtactctttttgggcttgggctcgtgttctgcctcttgttcgctccactgcccgaacgatcttcctctcaccagtggcagctgtagctattgccctacagtgagtcagaaggcggttccattgatggcatgatttgttttctcgacggcaaaatatggataaggacgtgatcttttgggttgggtttgctagtctcatccaatactaaactgtctgtttcaaaccgccagtttgtgtgtgtatgtgtgtgcgtgggcaggagaggggggggaggggcggaattcgagcttgatgcattcgacgacacgatcggtttagcactctgcatctggataccaacatttccttctcttggcacggtttctactttgctacgggttccaaggatgcacagtactaccttcgatagcggatcccggtagaactgagatattgatatacatctgcatgttcgcgttgctgaatgcgtggagcagcggagaaatgtgcacaaactggaggagtaaacaacatccagtcgctgtcgagcatcttccccttggaacagttgatgactagaaatgaccttgaggatagtggtggccattgaagtttgcagcgagctgctgaagatgaaaacgcataggcatgttttgttcgggacggatcaagacggatctgatgtgatattcttctgtagcgaccaaaactttcagccctctgaatagataaaaacctcggcatcctggtgtctggttgttgtagggctgtgactgtttcggcaatcgactgcatgcgtgcactcggtgcgccgtgcactggcgtatgcggctggagccgaaaggtgagatctgcctcgttaggatcgcaccgtttttctgcttccaagtttttctgcccggcaagcttgttgattcgatactgaagcaccttcgtgagtgtcgtggcgtaccgtagcgcctctcgctgattttccgctgcagcacgttggcacatctcgacaagatctcatgcagacagaacgccttctgtggaccgacgagcccgcaaaaacatgcgctgcatgtgtagcagtgacttgtgaatttcctagactcaactgcaagaattcagcggtgctgcgactgttctgcttcggcgtaacgatacgggaacctgactgtattttggcccagctatttcacgcgtcggggattaaataccgtgtagatccccctccccctctttgacacagtatgcataattttggaaacaagttgagactttcttttggaccaaacgaattggaatcggttttccccgacaaggtccctgagcggactccatgactttcgtagaggctcacctgcttgcgtcttgcacggcatcgactactccaaaataatatccttaaattgccaggacgataattcatgaccggccagattgacactgtcgaccggctcccgtgtcggaattcaccctcctaaggtggcccacagttccgaccaacttttctgagaaggcaattctgtagctaacatgtagtacctcatccgctggcccttttccaggatctcaaaa

SEQ ID NO: 1094 - DNA, 2370 bp, Toxoplasma gondii
  source 1..2370: mol_type = genomic DNA
acgcttggacaggtgcttaagtatttatgtcggagttttcaagttgactcgcggtttcccttcaccgcggattccaccctgacctcgacgtgtttcccttacaattgcagcggtttcatcgagcttggtgacgagcatgtcgacgtcccgctcttcgttttgaggccactcctggatgtagggacctgctttgtagatgccctcgcggagcaaggcctgcatctgccccaaaggtccacttgggtcgacttccaagcgccgccccgccatggtcgtttccgccgtcagaggtgcggggtagataggatcggctggcgcaggcagaggcgccgcagaatcgccgtttgagaagggggaaaagccggtggccgggttcgagggaaacgaaggaaactgagggctgtcaggggaacccgccgacgtgccaggggtggcgagtccatcggacgcaactagccgtccatcggactcagagacggatccaagcttggacgaagagagcggggtcacagaaagcatcgggcggccgcctacgttgaagagaggaagccgctgagaaagggaggcgccactgagagaagtcctggagggtaaccctgtgtggacgaaagacgacagacctgcgcgtggcgcttgcagagagcaacgagacagagaacgcgaagcagtggacagactgggcgcgagaaaacactggaactggtcagacagagcggcaggcgacggtacgatcggaattctgacaccgttttcgacgcacgccggcggacaagtgtgcgcgggagagcggctgctgctcgaaatcgacagagcgctggaagcgtccggtgtatgcacacccgagggaaagaagcaacgcaggcaccccaggggctgtccaggcttggtggacccctgcacacgaggataaatttgcagaatgccgccggtactgtgcgaggcagggcgcgacctcaagagcgaaggagaggaatgcgtcacgtgggaaacagcaagcacgagcactcccatggaaacccagaaagtcggcaggagaagcccggcctgaaccgttcgcgggttccagacctccgcgatccggagtgccatggcaggaacgagggaaccgcggaccggagaagtggcgtggatcttggggaaaggcggcaatcaaagccacgaaaaagcggaggaaattgaagttggcgaggatacttctcgaccccgtgaatcctccggcgttgccatggactcaaaaacgctgtggacgccgggcacaggttgctgagacggagctttcagctatccagagaagactctattttgttcctgaggttgccattaacaccgccgagtcttcctcacgaaaactcgcctccgtacctgtgaaatcatacgccaaactacgtgtttcgggcgcaggactgttcaggagacatcgagacgggaattcagcgcgtaggggctttgcgtcgcgtgggagacagcacagaaacccgactcgcgaaacgggagaagaaccgcaccacataaacgaccgctgtccagacgcgaatgctccgggaagtgcaatttctcactgtaatgaagcaaaaaggtgtacatactcgacatgtgtttcccgcgttctacatcgacttgcgcatgttcagaagacatgccgctcgatcacgcgccctggagagcctccgttgttgccacaggcatgccttgtacacgtcgtcatgaaacacaacttttgcacggtttttcctcgggttgtcccttgtcaccctttcctctttctcctttttttcccaacttcccttatccgatcctctgcatcgcgtctgtttcgcacgtccgcatttccagcgcctttttcttgcacatccgagtttcattgttccgttttcagaccgtgaaaccaagtcagcttatcatctccttgtcttgcttctgactctcaaatcggcttttcacatccaacgttgcacctagggcataaacctgttttccgttcaattcttcacaaactacagacgaggaccttcctgcaaaatgaatcaccgcgcgacgcctgcgtcaccatctgccttgcacctctgataaccggtcttgaaactgctttcttttcttgagaaaagtgctttgcaactcaccgctttagccgccgcactcagctgctgactcgaatctcagaacaagctggggtcaagtggtggccgagtgacctgggcagatgaacgacgccggtgtctgtcgaaggagttactcaaattctttgcttttctcagcatccgggaccctttcgaaggcccaccttgtctacgacgtttttttcactcgaaagggtcaagagagagagttcttttctttgtcagtttctcccgtttccacttttccgcaaaa

SEQ ID NO: 1095 - DNA, 3911 bp, Toxoplasma gondii
  source 1..3911: mol_type = genomic DNA
tgtcttcgtcgtctgaatcgggtgcctcggtttccaaatcaggaacctgctctgtcttcgtctggggactggcggcagcagagagctgcgccgacgggtcttcgccacgatcatcgcacgctgggtgagagacagctcgagagagcgatgaggcgggagacgagacagcgggcttgctgaaacgagtggccggacttgatgtttcgcgatcgtttgccgcgtcgtctttctgctgccgatcttcttgggtcgttgaacccggcgcaggcgaaggcagagaggaccgtgaagggccttcttcccgctcggtggaggcaaacttcggtgtttcgcagtgggagttttccgctcgggtctcttcgcaaagcgacaaggggggttgagcgggagagcatgcgtggaacggagacaaaatcagctgatactcctcatcgtcaatcatcacttcctcttcttcactgccgcttgcgtagggctcggaaatctgggcgcttgccgcagaagccacactgcccaccgccgccatgtcttggcggagtctctcagctcgcgcacccgctccaaaagaatggagaggacgcgaattccctacaaactcctccggaacgtaatccattgtgccttttgtggaagagtgagaaaagtgataactgggtagtcgaccgcgcaggcggcggtcgattccctgacggaaaatcgtgaagcgagagccgactgctacgcccgatgtcggcaacacggatacgtttaaaatgagacatctaaaaatccggaaacaacgaacctgaaaagaccggcctgtctggtacaggagttaaagagaagcaaggtgtaccagggtaggcataattgaaaggagagggagaggctgacaccctcataagctcgctaaaacgacacgatacaaccttattctttttcaagtgtaacgctctccggtgctgaaggccttcatttacaaaagtacaagagtagctcattcagaaggtttggtagcgaaaagtgtcgagttcgaggctgagtgctaaagaattgcgtcactctcggagaaggaagacgaaaacgctatggcttcaaactgatttattacacatatccataagcgaagaggctgtctgaaagcaattggaaatatttggacgcggagatccggttgtgcgcagcgcgctcgagacgcacaagaagacaaacgacaagtagaaaagctgtcggggaaacgaagagcttcgaagtctcttgctggtaaattcgaaaatacatagacacataagatacgataagtttaatgtgtttttctccctgcgaggaggtcccgaaagtggtaaccctccaggctacgagcggggttgatgaagttcacaggtttggccacagtgaatcctagcggaattgggcacaagtgcatcccatcaatttcgagttcaacaaagaatgagtctcagttggttcctcgcctttgaaagttgaggagcctgaacccgaaacctgggcattccctcaagaaagaaagaggtttcctcggggcttggtcccgtgttttcgacagtgaaatggcgtatggagtggggctggagacgctcacatgcgtatgttgaagtgtcaaggacatggacccacagcctctgatgaatgcacgcagaaaaagttgcctgcgatgagaactttcaatgaccgtctactgagagtggaactgtgtcctcagcattgaggtccggttttctccaccctgactccggggtccagatcgctgcgacacgtttgctcgaaaataagtgaaatcccacacgttgcggtcagatatgtcgttgaagaaataacaatcatgcagtgacggcgcacacaaaagcaaaagtagaagattagtcagaggccggcgacctgctgccctccaacggcgatccgaggctagcagaggggaaaatgtgttggcggtggcttttagagcaggcgcccacacgcaaatgagtcacggtaaacggaaagagagtagggaaggcgctagacgaaaaataacacttgtaaacgacgaaagttcagtaacaaaaagcgagacgtgggcatgagcccgcccaaatttttctgtccactgcagttccgccacaagacacgcgaggtcgcaagacggcacccggctgctttcggcagagcaagaggttgtgaaaacgaaaagtagacagtgttgctctacccgaatccaaacacaaacaaacttcttcattgataatattaaactttacgaactcaaaaccatgccattgagaagtctgacacagatctgcgtggaaagacaccagggaagtcaacgatgggaccctgcttttgcagcgtgggaccgtcggcagttaagggtttgagaaatgtcgagccaattcaacagtcaatagatggccagaaagtgcagcttacactcgtgtctgttgatcagttgcattgtaaccgtgggaccagagcaatgcgtctgggttctaagaacaggaaatgtcaaattcgagcaaaggctcgcgacaaccgccacggtttgaaagtctatttcaaaaaacaccaaacgcaagcctggttgagttcgtcgagatgataaggagatgctattcatgttttggtttctgtaaaagtgagcagacccagagagggtcaattgccatgccgaccatggtcacaagcggtgaatctgcctacctgtctgttgaagtgtacgtgtaatacgtagagagctttcatcacgagttgagggtgcaaacaacaggcggtaagatgaagcaaacgactaccgtcatcgggagttttcgtcaagatcagaagatgtcaaccgatgagcccccttcagcacagcagctacgactggaacgagcagtttcctgatatggctacgttgcaaagctccctttgccaacaagcatgttaaactgaacccacccgactgaattgtttgtttctaaaccaagcatgctccgctctactgttgtcaatccgctgcagaatttatagcaggccgcgtcgagtctcttcaacaccgcgtttcgtcgtggcggcggtgtccggaatcgcatcattcgtcaatgagttttttgtggggtttctcgacaccaccgtagttaacctagctttgtctctcactcctcggaccttcgtgtcaagaactccacttctcgtcttgtacaggcgacggcggctggcaccgcgtcagacgaccgataccgatagagtatgctttatcgcagctgatactactttaggaatggactcaaaacctttcttcgaacgaaaatgaaagccactgatccgtgtgtctttggtcgtcattctacatttagtttaaagtctccttgttaatcaagtagagaaacaccggactgtgcttcataaaggccgcaacagagtgaatgagttgcacggaatcaggcgcactacttcagacgaaaattaccgtgctaaaacataaatctcatttaatagttggggttgagcgggtgttatatcaggaaataatagacaagaactgcgaaactatcggacggatcccgacaccggaacctcgtctacgctgacgaccttgctcgaggagtaaaccctgcacgcgacgataagagcctgatctgcctgtgcaatcgatcagtctctcctttggtggaatttccctgcgtttttctacttttgagatatactttctgttaatacctttggttttgttcgacaacggaagccacctaccgagtgtgacgattgtattcgaagacaccgtccagtaattcgaccaccacaaatttgtaaatgaggcttctggagcgcgaccgtctgattttcggtgttttttcgttaccttgtaactgttcatgaactgtggatgtatttttgaatcggacgttttttgtggccaccggtaaaacaatgttttttctcgtttcgtatcgcaa

SEQ ID NO: 1096 - DNA, 2073 bp, Toxoplasma gondii
  source 1..2073: mol_type = genomic DNA
aagcagctgcacacagcacagcagacactgacagccatgttgaatcggcgagagaaaggaaagagagaaacgcgagagaagagaaggagaagagggagaaaggagggagagaagacagcaagaagagaaatggaagagaaaggagagaaaagagagagaaaaaaacgcgccataaagagatgcacatctagggagggacagagaaggaaaggcagtgcgagggagagagatggaaggagagttgaagattcgtctgcccctgcactccatccctctctttgcatttctcgtgaagccaggattttccaactgtcgcgatgtcttctcgggtttccttccccgactttttttccaccttctcccgccttccaagtcgcgagttgtctggccacccgcgagcgcgagctccgaggcgaagggaactctcgctcctctttcttctcttttttttggcgacgtcttcacgaagaccagtccgacctgctggctttgccggcgtcgcgctgccactggaggaccgggtcgaggatccagaggagaatgcggctgattagaatgagagaggaagcaaggaaaagcagaaggagaagaagaaggagaagaagaagaaggcagtcacgcggatagccaccgacatgcccggtcgagagacacaagcccaagaggcggtcggcaaagtccaggaagaacagagtagccgaggcctccattgcgaagaaaagacagcgcgagggggaaggcgtagcagaacggggagagccgcgggaacagccgaagtggagaagcgaggataccgccttcttgagactcgaaggcacacaaagcagaacgcagcagcaagcgaaccgaaggcgccctccccccgtcttcaaggtttctctttcgcttggcaggaaaaggctgtgcagcgaccacggtaaagaggcgcaaacaggaaagctgagactgcgaagccgagaaagtggagcggagaggagagccaatggagaagctccgcgagggcagagggaaacgagaacggagagagagtgccccggagcatacacacagagagaggactcgagacacaaggtgaggaaaaaagaggagccccagagaaaaaaggaaagaagaaacggaaaggcgaacgactccgtgacaagttctgtcggcgccctcgcatgcgcgtagctcaccacgctgtcagttcaccaaacctcacaagaaacatgtcggagggggcaagatctgtctcggtctgtctcctgcaaattcttgtccttcttcttctgtcaatcgatccgtttcctgctcggctttttcttctcgagtgcgttcgtctctctttgcctcggatggcgcgtctggagccgctgctgtccgccggggaaaagaagccgccagagctcccgctactactgtctctcggtctctttcttgttcccccgggtgttgcctctctgtccctctctttctcttttctcgctctttctctttcctcgcttcttctctgttctcgctcttttgttcgctctctctgtcttttctcgcttcctttctcttgttctctgtcttgctctctccctcgcactcgcgctgagttcgctgtcttgctctcgttctcgttctcgggtctccgtcgcttcagcatccggtgttcctcgaacatctgagcactcgactcgtctgtcgcgccatcaacgcgacaggcagactggcctcttctctcctctctctttctcttcgccgtccatggcagcaggtgactgtcacgacggaaaggaagaggggaagagacggcgttttctctcggcagcgccgcctctcaggaggcagagagtctctccaagaaggtaggacgcggtcacaacgctccgtccagatccagcttcggttctccagcgttgcgtcgggggtctcttcgccgctccagcgtcctcttcttcggattcgcagagctccctctttctttctttccttctttccttctttctggcgtcgatttccagccgtctggttgcaaagaaagagcgagaatcggtgaaacctacctagtcgcgtcgaagtgaacatctggccgaccgtccgttctcg

SEQ ID NO: 1097 - DNA, 2809 bp, Toxoplasma gondii
  source 1..2809: mol_type = genomic DNA
agagatgtctgttgtcgcattgccgtttgcttccgcacatgtctccgcttgccgttgctggtgcaagacttgtgaagacaggttatttgacttttaaagaagagtttgtcgcctttggagggtcccgaccgactcctcgcttgccagaaacatgccgaccttcacgcccgaggccgctgctctggttgtgttggagaaaaagagttccgtggaaagggtgtccagtttctttatcacgcgtctgcaagacggcgaaagctgactctcaacggcagcagtgttgagctctgtgttgccgcagtctgcccgtagtttcctcacaggtccggcgtgtcttcggagactgcgtcgctctccagcgaaagaagtggaaactggactcgcctactctactaacatttatagcgaaaacacagaacgttcttgattcgcctgactcagagcatttgtttcgaattcagcagcgggaaggacaactggctctagatgctgcacatcctcctatgtcgaacaggaaaaactgaactcgctgaattttgagctaaatttcgacgccgctctctgaggcagctgtccccacaggcgactctgctttctgatgagaccagagacagtgacagaacggggtcttttctgctgtgggaaagggaagtgacttctcttccttccgtctcctgtgtgagagaacagagcttctcccgtgcgggactctctctgcggcttccctgtcaagaaacaggagccttccctctcgcctgggtccctctgctgcccttttctgagaaaaagaagaggcaacacacacaggcgctgctgagggtccgtgcagcaaaatcgacttgtcttttgctgacgagaaacatttgagacggaaggctcgcgacttggggaacgtggacagccgtagccggggccggcgccgcacgaagagtgccgcgagaaacacagaccaaggcaatgcacagagcggacggaagagtcgaggaagcaggagataacgaagttctgactggggatagaacaaaggacggtaaggtgcacgaatgaaacgtcgacgccacagtgtctggcaaaagaaagagaaaagaggaaaggagggcgagttctagaagccgagaagggacaggagcgactctccgcaagaagagaaagacgcaagacgctaagaaatgtctagagtcttcacagatggaaattctgcgggttaaaacgggcatgtaggcagtgagacgcagatcctgcagaacgggctttcgactttcttcacttccgttattcccggaagaagagactctcgaggcgaaagggaacagacgagacagcgagagagacacctgccagcacaaagagacaagagagcaccgccgtcacgaaccgcagagaaacctcacacgtagtgagacgaaaatgtgagagcgcagcagaccgactaaagatgaagagacgggatgtaagcgaggacctgaggaaaaacgagagatgcttttctttctgcgagagagcagatcgaggaaaagcagggcgaaggacgaccggggcctccagggtcccgcgaaacaacgtctaatcttctttcagcaattgtttctccgtcgccgtcgcccttgctgcctcagatccttcttcctgttcagtgtactctgattcctttgtgtttctacaggcaatgcctttctctttcttggcgtcgatctgcgatgctgtctggcttgtctctgtcagtttcacctaggtagcgtacacctacacgggaggaaagaaaggaaggtagaagagaagattttctgcctctctgccgcaaagtacgcatgtgaacgagaaaagacaacagatgagtctctctccctgttttcaaaagacgtaaattagcggaaggactctacggttctgctcgctcgccgatctcctcgagtttgccaagtcttaaggttcgccgtcttcgttctcgccgttgaaacacgctgcttttctttattgctttatcgtgagagtcaaagaagaccgagaactcaccacgtgaaactccttgatagctgttacaactgcccgctggaaaaaaatgcagaagaagaacctgctggcaagacacgcggtgtctccactatggggcggggtgtacagatatgctcgagactgcagcgctcgcgacagtcgcggcttctggtcgagttctttttcgcgcgaagaatttctctttttctctcgaaagaagtggtgacgagttcggttctcgcacccgaagatcgcgaatcctcccgcaagtccgtccagaaaacgttttccatcgttgcttctcgctgtttcgcgacgacaaatcggccacagcccgtgttcggcctcggcaggttgactgctgggaggaaccagtccggagaagaatttgaaataggcaggaaatggaagcgaaggagataaaccatcgagagaacgcggggacccgagagcgaagcgtgagccgaagatgtgcgcggagaaaacgctgaaaagttcctcccgtctccgtctcctcctcaccgcccagcttcccgacagagaccgatagtgtggaacaacaaacgacccgagagcgaggagaaaacggaggaagagaagtgaagagaaaaggatgacagaaggtaatgcagcaggcgcagagcagagacgaacgcggagatcgtgaaagaggtccggaaactcgcagtgaggcggttcttgttgaccacgaggcgtggaacgaaaagagacaaggaagacaatcgggagaggataggaaggaagaaacaagacagcggaagggattcgagggtgacaagaaaggaaacgacagaga

SEQ ID NO: 1098 - DNA, 3614 bp, Toxoplasma gondii
  source 1..3614: mol_type = genomic DNA
ccatcttcgacttgcttctctcccttatcgctgaggatcgtcattcgttcgcgcttgcccggacggatgcctgaaggaacgggagcacccttcgccagcgaagctctcgtcgggtgtatctcccctggagatgggtgttcttgcagaagagtgcggtttcggctttccgcgattgtgtcgctttcggaactgtcgtcatcgtggatcacctcaacgcctgagatgggttccgaggaacggaaggaggcgtctgcgttgtccatccgaggcgtctgactatcggagtcatcgtccccactcatcgcgtcgcctcccgctgtcccgacagctgaagaggcggcaagagtgccatcggttctcttcgcatcagttctgccacaggttttttgtggcttcgcagccgctttctggttttcctgtgaatagggcgaaacggaagaaggcaagtttcccgaagccggaaagacgcccgacgacacggaggcaggtccactcgggtccttacatagttctgtcttggctgtctcgagcaacttgtccagcagtcggcgcctcaggcgaacgatgtgggggtgagaccgcccaagaaacatgaggaacgaatctgtgtctacatcctttggtgacagtcctgagcatgcggttcgcccgtcctcgtcattgcgctgccgcacatacgcctccagctgtctcttgacagcccctaagtgtcgcgagaacgccattctcccaaagccattgaccagaagaatctcatcagcaaagtctcgctctttattgggacacgcggaaacgcagttgccaccgagaaccgagtaatttgtgatcgctgttcaccaccccactggactgcttaagacagctgaaaatggcgggcatcactatacagtagcagtgaccgtattcgaagtcgattaagttgtaggcgaaatatatacgggtttctggtatcattcgtattaactccgacggcaatacgcaaccatggaacgagacggaaccctgagacagaacgacgaggcacaaaaggggaaacgtgtcacgggcaaaagacaggggaaacacgtcgcggtacgaatgggatcaaagacgtagaaacaaagggaacgaagaagaaagctggagactggctcaacaaattgaccaagacggagacgtcgaccggaagtacaatcgaagcagcggaaatgatgacgcatgaggagaggaaaggatggagatgacaagaaaccctcgcgtaggcgaaatggaaaactacgcctccggtagacgcgtagaaaacgagtctagatgaagaaggcagtatgtttagcggagaaagtaaggaaagaaagacaatacgcatctggaagagactgaaactacgagaaaagtcgcgaagaccaccagcgagtctccgcacggacccttgtgtacattgtgagaagaaactgcgcatggaacgactgacagaatttcattggcttctttcttcccttcttctttttgccttccgtcgcctgcctattctccggtggtggagggcagaatcactccaaattcgctaaacgcgaacggcgctgtgtggggtttccccttcactcggggtaggtatctgggacagagaactctcctgtgcgaaggaaacaccacgagctagcggaccaaaacggaaattttggagccgacgagaactaaattccgtctcacccagacggctttgggagtcatgtttcaaaataaacccacaaacttcgaatctttcccgctacctgtctgcatctttcgcggaactgctttggacagttgaaagtgttagcttcgattttccaaagatgtcaacatccgaagacaccactatcctgagatatcaccattatagtcctaatatcctttgatatctatatgcgcggatttcagtttcttgagacttcagtatcgtccgatagcaatatgctgagaatcagtattctaaggtagaaaaggaaattggctttgttctaggcgtaattgatggtttactgatgcatttcgtaggaatcgtgagataactgtgcagaatgaggtgcaacagagcagagaagtgtaggttcgtaacccgttgcgcccactgaagctagctggagtctcgacatgttgcaagcgaaactacgtaggggtggacgactggattccctccttaacttcgttatgtgtcatttccgcaaagctgtgtctttttctcgctgctctgcccatctgatattccgaagaaagcgatctcaaacgctgtggtgcagaggaacgtccagcgtgtggatatcagcttactcaacaaggaaactgcgtacacagagtcaaccccttgacagccaacggatctcgcagctttgggtcaccgacaaaaactaggaagttgagtcgcggcaccacgaaggctctgcgtgtgtttgtctgtagtgatttcccttaagttggcagttgtggtagaaagccgatctgccgttgtgaagcattacgaaaggccggaaagatcgattttcttgtgcgtgtagtatctgtcgcgttgacaggaaagaacacaccacatcctgccaatgaacacaaatattttttgttgctcttgggaggaacaccaatgcaaccgtgaccatgtgcattgagctcgtacctttatgaggccctccacgccagcatcctattgactgaaaccggtttgtctctttgtgctacactgaccctcgcagaacgcccctgttcatgtcgagatatctaaagaaagaggaaaggcaacaagttctcctcttgtccgaaacgaataatttgtggcgttttccaggcaaacaggcacgtgtcagatactgtgcccctggcgctgttcacccttgcgctagcgtagttgcagttcgtggtgtagcggtgaggggagacggggccaagtaggcatgtttcctgaggtgttcgttccgtgtgtatatcggcacccacgaggaagaaggtaacagcggcagacgttgtctttccccttcaaaccaatctaggcagacactcctgaatcggtcccggccggcctatttgttacgcggcttcctctcacaagaggacacagtcagccgcggcccaggataagacacataccatacaacactgggccatccccaactttcctcgtctctgagaggaaggcactgtctgcgtttcctagtcgatcgtcacacggtagtgtgcaaggtggaatgacgatttctggaaaactgacagtttttcacgcacctttcctggcaggactttccatcgtcaacatgcctggttgcgaggtgaagacttctgtgttgctgtctgttttatcgccagcgatcgacggcctggagcagtggaagtgtttatgacgcagaagacgaataagttccccgagattgatcatcacacgcattccacgaagtgccaaattccatctctagcaatcccttagaagaataccgtacgaattgtgtgtgatgagagccgacccgggacgcgctcacttctgtgtttgagtcaacttgctactgtgcaacacagtctgtcgaacaccatcctacagctgccgtggtaacacacgaagagtgtggaggtaaatcgtgtgctgttcggatacttcacgggtagaaaagcca

SEQ ID NO: 1099 - DNA, 1849 bp, Toxoplasma gondii
  source 1..1849: mol_type = genomic DNA
gaaaacgacgcagaacaggaagagccgcgagacgcatgaagacgaccagcgtctcggcgacgcgcagagccgcgcggctcgacttccctttttgcctgggttctgtgttccagaagaagagagtccgagaggagagagccgccgagctgcagcagagttgcgggatctgctcgacgaaagagctcgcacgcggcggcgtttcttctccggaggtgtgcctcccgccatgtcatctggttttttctggaaggacgttctcgcgccctccattgccggtgtcagctcctctgctcggagagacaagcggggacgaggttttcttctcgctcttgtcctcttcccactcgacagacggcgacgcatgcgaaggaggccgaaggactcgaactcctcccggcacaggagatgacgtctactgtttccttctgcagacgctacggcgcagcagatgcctccggcagaacgtgtatccttttcaccgcctcgacgaatcttttggagctccgcgaggtgacgggtgcaacaagtggagagaggcgagaagcatgaagacgacagcgaggtgccagcgtcaaagcgcgaagcagaaatcgacgagaaggcgaacgcggagcagagacgatgcttcttcgctgcaacctgcctcgactccaccttacgcccaccacgcttctgtcgcgagggcgcatgcgtcagaaaagccggaatgaactgtgagagagacaggcaagagagaggaggagagccaacgccctccatcgctcggtgtgagcggcctgttgctccttccccacatgaagacgaacgagcagcgaagaaggcgcttgacaaaacggtatgggcgaagatccgagaagtcgaaaagaattcgtggtgcctcgcgtctcgtctcccccgcttccctgggcttccccgtctctctccactcgcggaaccagacagccgcgccttcgccaggtgtacacacactcagcgagtgtagacccgcaggaaagagcgcggaaaagtgtgtctttccgctgcgctccaagtggagatggagaccggcccaggaaaagtgagggaagccgggaactacgcttctcgtggcggtggccgctcggagagactgtgtcgatttcctctcgtcccccgacaggtctcctcgccaagttacacggaagcctcacagttcatgcagaaaaaggagacagagttgaaaccgggcgcgcaaagtccgcgtgtaaaaggtcgacgaactcgattcacgggtgccagctgcgcccggctttgctgctgaacactgcgtgtgcgtacatctgacaggtcttccagagaacctacgaggccgtcgagaaaaagacaagtcgaaacattttcagagcaagttcctcttcgctcgagaaccgaggcggaagactgcatgcacacctgagcagatgcctcgacagaaaagttatctcgtgccgcgctgtacgcgaaaccggggctcactgaaggagatcgattcgcgtcgtccagcaagaaggcgtggaaagaaaactgtgacgaagaactgacgaatcgaggacagcttccccgaagacggaaatgggaggcgcaggggtacacacatgaaatacaacggcgatccccgggaagagtcggggtttgctccctccgtccgcaccggaaaaaagctgatattatctacgaacatactcaggagagacgtttagcgggagaaaggaaacgcagagatgctctatttagaaaacggactgtaaatggcgaggtagaagccgcttttctgtagctcggcgcacggtcggtgggagcagctttgctaggaacccccagcgctgtctcggcgtccgcgtcttcgaaaaga

SEQ ID NO: 1100 - DNA, 1218 bp, Toxoplasma gondii
  source 1..1218: mol_type = genomic DNA
gaatagaacgatgcgctaatctcttccaggaaagtcaatgacaccgtaagcgtcagcagaaatgcccaggacgatgaagtcatagtctcgttcgcggcagaaaagacgccgggaaagataaggaaagtgacacatccacgtttcggctggagaacgggacagccgaaggttgaacccatgttgaagcagagagaaagcctgttgaaaggcactggcctaaacttggagattgtggaagaaatagataaatgtttcacaagggaagcctgcaacgagtgaccccgccatgtgagaggacaacagggccgacgtacgtcagaagaaagctgtagatgcaaaggcatcgaggtaatcggaacactaaatacgggaatgcggccgactgtgtcaactgatggcgatccaatatgcatgcattcttccttctgttgtactgcagccccgatacatgcaccacggtagacctattgtgaaccacagcgtatctgcataagcttctgttttccttctttacaacgttcgtatgctataacaaatgttccacagaaagtctgcttctctccctcgttatcagagctgacgcatgtgtttcatccacagtgtagtaggtagagggagcgaaatttgctatgatgcgtgtgggatcatgaactgttcgataatatatttatgtgtcggagaagccttgcacggacactgacattccactgcgtgtttcaagctgtcggacacgaattgagcgaacgggccttgaagttgaggcgattccaccccagccattgagtcctaccttgttgtgcgcctacttgcttaaagcatcgaaatatcattccataattcagccttgtcttgtcctggcatgcagaacacgctccgcacgcggtatgctgatttgcatgtgtggcagcgaaagagagcatgcatgcaattttttttctcgtatttcccgcatgctacatgtcgttcaccagcaaacctcacaacgagctacactgtaacaactacacagccgccggacttagtggtgtttgttttgttttgcaccacaaacgtcggttttcccgtcatttttatggtggtgtgaaatcttcctgaaggcactactctgtccgccagtagctgttcgaaaaggggccccacagtgcggcgtgcagaacggcgataaagttaggtaccttgttgatcgtcatacaggtgaaagacagaagaaccacaaaa

SEQ ID NO: 1101 - DNA, 2374 bp, Toxoplasma gondii
  source 1..2374: mol_type = genomic DNA
gatctcacgttcctgcaacgggaaagccaacgcgatttgtcttgaagaaggcaggacgcctctctcgcgaactacgcacctatattagcaggggcgtttttacatgtgtttttgcgagtcgactctcccgtgacccctcgcctcaacctcgattcagttgttccaggacgtcaaacacgacatcgcggatccagctcaggcttcccctcgttctaggaagaatgctgcgctctcgtactcttggctagactcgcatccacagccagtatctgtcaccgagctcccagagtatgggcacacacaaccacgggagccccccaagacggaaatttcctaagagccactcgtaagaagactgatcgagttcagtacgatagacacttcgcagctgttactaacaaaggatgaaaaggaacttagggcgcggcggcgcagttccttcggcagccatcccagtgctccgccttccctcgggcactaaaaggaacaaagtgtcattgctcgcaccctgtttagccggttaccctcgtcttcagggaacgcctgcaccaagtcgccaaggacgatgatgaaagccggattctgtcgctttatcgcatcaagtccgcagcgtagcctgccgatctcttcagcccactcggcattcttcttcagcatgccgagctacgaaggaaaaggagacgagaacgaacagagttaatgcgcatggcgaagaagtgcacacagaagcggcaggtggatgctgcttttctcggtcgtggtgtctacggtgcttcgaacaagcgcctatccagcacgggcagagactgaaaataggacagttgggccgctctccagtttcaggatatgaaccggagagcatcagttctagatgggtatttaggggggcaagtgatcgccgttatctctttagaatgtctctataacgaaacacgtttaaaattgcctggaagcagatatccatgatgggtcctgaaaactagtacagcctgcaaaaaactcacttgggggtcggcaatgatgccgaatgagacgactctatcagaggtttctgccttttctgtcgcaccgtgatcgtctgcgagagcagagcctccaccacttggcggttgccactgccgtacacacactttaacgattcccatgaagacgaactccggaacacaaggaaaacaaacttggtggtcgacagaaaagtcggattcgatgcgaaacagctcgttccgccctcgaaggcacagtgtgtccgattctgaagaaagtacgcgagtgtcggggggtatatttgagactaaaagagagaccgagaggtgaagagacggaatttcgcctcgcgtctcaaatgggctgcatgctttgggtgccagtgccaaacacgacagtggcgtccgctgaatcgtaggagcgcccaacactccaaaacgaggccatctcagcaaaattgcaatgtattcagcaacacgtagcataccatttcgaggctggaaactgcctcacaattaccgaatttgcatcggctttagatggctactccaaactaccagaggcatgcacctgttctcagagtcgagggcaggaccctcgtctagagccaaacagagcgaacgaaagtgttcccactgtcgaaaatgacggaaaatcgcccagttttttaacacttaccgcagagcagctatgcaagtgaacccgtccctgcattgctcggtttcctctcgattttgcgacgtcaactcagtccctgagtaacggaggatcgcgttggaactcttcagtcgctgatacctggcggtcgtcgcgctttctagttccgttcgtgttaattcatgacctggaggtaaaaggtgttgttaacggattatctgctgtgtaagagcatgaaaggctggaaatatgttgtctcatctgggactctatgtacatcggatatgttgtggcgtggctggtgttcgagtgtggtaagtgtgtccgtgcattgaaattgtactttctgtcaggaagagatggaaactttttccgcagaagtacttctgcattgttaattgctggaaaggtgtacacgagtttgggacgcggtctttttttcttgctgtcggagttcttgctcggatgctggaggatgtcttctgcgcggagacacccagtacggggttcagcgacttttcccgtggcacctgaagtgccagcattggatgccgcttctggcacgttcaactagaagcggagacacgacgtggaagatcgctgccgtgatttgtcctgggtgccgcgtttcgtgtatttttcgtgcgtcgcttagcacggatttcgttcctgcctttgcacggtccgcctctgctcccccgttcgcctcaccagacggaagtttttcaaaaga

SEQ ID NO: 1102 - DNA, 2217 bp, Toxoplasma gondii
  source 1..2217: mol_type = genomic DNA
gaggtcaggagcggcacttggaaagacagtgagtgtccgcgtttttttggaagcagtcctctaagagtagaagtctctttccgcctgtggtgtggcatttgcaggaacggtcccatgggcatgagcgagtatgcgcctttcgcagctggcacacaggaagtcgctagagccctcgctgaaatcactcgacgcgggggtacgacagttgtcggtggaggtgactctgtggcggcaatagaaaggttgggtctctccaatgaattttcgcatgtctctacgggaggcggtgcatcgcttgaactgcttgagggcaagacactgccaggtgttgcggcgctttcagacgaagaagagacgccttgacagagtgcgcggcgagctgtgcgttagagtagaaaaggacgcatgtagagaggtatagagtgcaacatctgcagcgaaggtatatcagcaaggaccgcgggcaaacggcgtacgtgcgtccgcgtggagcaaacagcagcgcgccctctccgatttcccgttggtcgattttattaagagcccgcgggtcgtcacggttagacgaagccaccgttttaatttttctcgctaaagcgactgaggtccgtttgtgcaagtgatccggactgcagactgggaataaaggggtcctgcctagtcgcaaaccggatggcatgtgatttaggttttcatattaataaaccctacacccgaagcagtcgggtctagatgacggtacaaccgtttgtttcatttgaaaaactgttggtttctgccgccgattgacacggggagaacccagtttttgtgccaaaaactattcgcaagttcctatcccagtcgacgaatggcgaagagcgctccagcagccgttgaaacagcacactgaaggaattcctcaaaaagagagcagaatggaactttctgaaaacacagttgtgccacggtaggggcgtctattccaaccccctagtggagtgcgaccgcaaagtgttcttgaacccctgaaaaaaatcggtatgtaaaattttcttggcgcagggtccgaagttggccttcgccatccgtgcatatcagaaggcggagtgagacgccaatcatcatccatccattgactacctttcgaggcaggactcgttgaccagttaacattcgggtattcaacgccctaaagctctgttgcctttttaggaaagaggtatgttagagactcagaccaccgtaagtgcggctgcagatattcccgaaagccaaacccatgttcattacgcaacctggcattgctaagagactgaggaaggtccaaactaccacgtgactttgtttcgacttctagcgtcccagttctaaacaaaatgagaaacgtgaaagaacacaggattcccatagtcatgaataagtctgcgaccgaaccagcccaatatgtaacaagccaaaacggagatggattaaaggtgcggaaaacagtctacctcgttaatctataaatggcagcaaatgaccgcatgcagtccttagtcgagcgtccatcgcgattgctgtaatttcgcagttcaggggtgttgtgataccgtagagctgcatttcgtccaaactttgaattggatacgtttgaacgataacttattacacaccatggcagcaaagatgagctaacatataacttctttcacggtactcaaaagagctttcacgccatgtacactgcttgtagagtgtcaataagtcgattccgggcataccgtgtattttacgggtgtgtcctatttctaaatgcatctgacaatttgggctgtagatggcgtactcttgacaaatcaaagccactttcccctctacaacatcggtaagcttttcttttgtcttccatccggaaatattccccgtgcactaagtaaaagcttcttacaaatgagctgacgttcatgcaagtgcttttcaaagcgtcttgatagcgtgacttcggcatttggtgtgcgccaaatgcggaaacgcgggaggcaagagaacctcgtctgagcaccgagaaagaataaatcttctactagaagtgagtatcactcttctttttgctacacgacaaacgtagcttgttcagcactgtcatgaccgttttcgagccttcttctggaacagaagagttaacggctttttcagtgtggtcgaacttccctgacgaccgtcaattcacctcttataaatattgcattcgta

SEQ ID NO: 1103 - DNA, 682 bp, Toxoplasma gondii
  source 1..682: mol_type = genomic DNA
tcgcttagtcagcttcgcgagagctctgtggatgtcgtcgatttgttgctgttctcctgcgtcagcctgcctcaaggcgcctcgccctgccgcgacggaagaaggcgcctcgctcgcagtctcccgataccggcttcgctgcgctcctcccggagccttagcgcaggcggaggaggaagtcgccggagccaccgaagaaggggaccgagaagaggaagcggcgagggacgcggacaggccttgatcttctccgggcgctgaggacgcagtggaggcttgcgcaaaatgcgcaaaaatcgccgcgagctgcgttgcacctcctggggctccagggtccacagaaggagacagcgaggagacgagctgagcagcacgagcgctcgacgccgcttcgcctcggagttgacgcttcagctgcttcccagtcagctgcttgcctcgagaggccgaggttgccggaaccttctcgttgggcgccattccggaattaccgggcaagtccgttgagaagtggaaaacaacgcggagtgaaggaggtgaaccgaagcatggactggatggagtagggactagagagggaagtcgacggggactctctctgcgagggagacaggtggagagggaagtcgacggggacggggactctctctgcgacgaagacaggtggagaggcgcgagtgca

SEQ ID NO: 1104 - DNA, 3836 bp, Toxoplasma gondii
  source 1..3836: mol_type = genomic DNA
aatggatcgtcgtcgcggcttcacttcggagtccaaaggcgtctcccgtgataccaaagagccccgcgcagcgacgggtttcggcgatgctgagggcggctgcgggaggaagaatgaggacttctttcacctggaaagatttcgagaaccacttgtcggaaaacgcgccaatcacacaaaaactcgccggagaggacgccgcagctcgagcggccgccgcctcgacttccctgcctgcagccctggcggcggcactcaaaacctcgaggagacgaagggcgacatggcgctgacgtttcttcacggatctccggagagatgacgagctggaacgggaccaagacatcgattgctgactctgggttcttcgcgcctctcgagtgtgctcaaaaacgcttgtcgctagctgaagggggactcccaccgtatagacagcagctgagaggagctgttcccacgcctctttccgaagtctgaggccaccgcaggtcggacacggcggaccgaagaactggtcggttccggagtgagaaagtgacaaacctgggatcgttgacgcctgaggagaaaacggcttttccagagttctctcgctttctatcgcacaacaagggtcttcggtgacacggcttcgacttcccctgaagttgccagagtccccacctctctcggtcgcctcaccctcgccctcggcattccccaagggcacctccgcgacattctcatcgaggctgtgggcggaagatgtcggaatgattttatgtgctttggatcgttcgccactgccggacaccccgtgctccccagttgcggggctctccgaggccacgaaaaaacaactttgactgcgacggtgcttcaaaatccgcccgtggctcgcactgcgctcctcgttggcggaaccggtggcgctgaccgatacaagcgaagctgaggaagcaaggcggctcgcggcgcaactttcagaggtgttgcagacgcagaggtagactggctcttctccctcgccctcaaaaaacggaagaaggtagagatgctctctccccgatcgatcgtagtaggcgggtctcaccctacccccggctgcggctgccacaaaaaggaaacggagagccgtgaggagcgggggggccgacgggtcgcaaagaagctggaagatggggtccgagccggagaggggagacggctgcgaccgcgctaaagggaagagccgtcgagacacgacgagtgcgacgggaagagggatcgaaggcggactcagagttgcgggggaaaacgaaggaaggaagtgaagtagctcctcgactggggacgtaggtgtgccgtcgtctgtctctgcgtactcggcgccgagctccgcttttccgtccaaacgccaccggtgagaccagtgtctccggatacagcacgtggacacaacgctccatgcagaggaaaacatcgtgtgtttttgggaacgcgacagaaagtcagatgaccgtgcccaagaaaagggcaaaaagggggtcaccggcgcataggagagcaaggaggagggaagtcacgaagaaacaaaggggacggtggagagaccgtgtctctgtacaactggtctgcgatcccagactgtagaactcaaatcgagcagacacatactttgccacccggaaaatccaggcggccacaaacccggaaaaagcggaaaacgacgcgctgaggacggatgtgcgtgcactgggggcggacgggagtgcacaaaggaactcaggggatcaaggagggtgccaggagtggtcggtttacgcgaaaactcacggagtgctggagaagggtgtgaagcaacgggtggggtttcggtcagtcgaggatgaacgctgcggcaccattcacttggtggaaaacgcagaggaagactgcgggtgtgacaccggatacaaagcgaaattccgcaaactcctatcatcacgccattggtttattttcgaggttcgacagagtccccacgagaccacgccaccagccagcacccacaacagcgaacacccagagggctggcaaaaaagcacgtggctttctgctttggggctggagatgcaaaagggaaagaaaagcgaaggccattgtagtgcagcggatacatagtatctctggcctatatgacggatggatcttgcgttgtcaaacagaggcgcaaaaggaacgtagcaccggtgtagagaggaaacctgcgaagcgacatctttgctctacgttctttcagagactcggcccctgaaatgcacaccaagttcccactttcgtgcccacgagaatgaggaggaaaacacaaagatgtcaaaaggcacctcctgacactgtcctacagagcgtcgttaacgaagtcgcttctccattttgcagcattttccgctgtcgtcatcgcatataccactctgacgtttccgcgaccgagaaagcgatttgttgtggaaggcacaggcttccgcgggaacgctgtgcttttacttgaggtgtttgcccttgtttgcctccttgtttctttgatcggctcctcaagcgcctcagaaagtagaacgctcccggctgcctcctcacacatgcaaactcagagatatgtcttaacacacgggaatttgctttgctttcctagcaagtgtgagaaggcaagcgatgccgcaccaacttgttggctagtctcgtcaccacgggctggactggctgttgcagcctcgctgcaaaaaaaaacatgcatccagaacgaggtgttgtgcttcccgaagaagaaatatttttaggagaaacgttacgcgcgcctgaggccaaagaaagaaaaggcggcgctgaaatacatgcttaaggaacccaccaagctgcgaagaacgtgcagatttggaacgacggagacaacatgcgcatggtgacatcgactcgcccttaacaggacacagcacgttcttcgaagctgcacgcagacggctgcgtcgtccaccacgagtagaaagagtctcggagtgctttccttcatgctgactagacacactttcaacttcgtaatttgtagacgatgccgtggaaatgcaacttcttgtcacggttcggtcaaaagtttcctgtagtacaaccgtcgtgtcgttagccagagttgctgccttgactttcgtcggccgcgcaaccgggcctttgaaacttgagcccactttgccgtgcccggttattttcttgcgttttgacttcagtttgacttcttttctacactttctcaacgaattagttcctttctgtcccgtcctcagagagagagacctctacatggcgagctaggcaggacacccgttcaatatgtcccgcaaggcacgagccacggaacccaacagtcaaaaccagtatgcgtttcgtgtcgcaacccggctgcatttctcgtctatcgtttcaattttccaaacacccatgttcgttttttccggcttgggggtcgttcaaacataacttgaagtacggcaagtcagtcgccgacccctatgcctagcgcctgagagcgaggggctgaatcatggcgcgaaacttcaagtctggtgttgccgttttccagagatttttccgagacacagtagcacgcgattagatagtttttattcaagctagctctctccagggtgcgacgcgattttcatcgatgcgtcggtcacctgattcgagcctcgtgagctgcctcgagtccgccgttcaacgagccccgtgaaattcgttgctttcttagtcgaccttgtcgctgtggaagcttttgaatgcatttcatgccttcgcatgagtcttttacttgctcatttgcctctcatgttgatttcctgtcggcaaaa

SEQ ID NO: 1105 - DNA, 1832 bp, Toxoplasma gondii
  source 1..1832: mol_type = genomic DNA
actttgcaatcagcaggtttatgatgaaagaggcgcacgcgggagacgaatagtggcgtttgccattcagaaataaacccttcttcacgtgcatccagaagagcacataacttattcgtggcgcaaacagcaccgggctaaacggatcctgtcattagtgaattaatatggccaccctcagtggggcgccggaacatggccatcgacgtaaaagttccgcgttatctgcggaagacgaatctttgcgttattcagatcgggcgtgacatgaatttgacacccaagtcgtgagctgcagaaacacccagcagcaccatcccagtagctaagaccaattttgagctgtatttccttgacacgagccgaaactcaatcccaacagaaccatcctggtttagctatttgctctgcaaacggggctcgaaatcgcgtagtatagtctatttcacatcttacgttggggtcaggcacgctgccaggtcaagcatgtcttcctcttgctccgacggctctggcagctcatcgtagacctccggttccagaatgacgtggcacgttgagcacgagcaggctccttcacaggcacctgggggcgaacacgtccagacaccatgatgctatgattgtcagctatacttttgtctgtccagaactcctggacccgcgtactgcgattgcttaccttcaagttcaatgttgttcgcgtgagcaacttccaggatggtgtctccaaccttggcctcaacagtcttttctgtattgtcgggaagtacgaaagaaattgtgctgagaagagcagcacagcacgccttatcatatcagcaactgcgcattctgtcagaggacccaaacatttcccgtgagccacgtatctcaaagcagtgtttcttcatttgagtcgctttccgcctgccacgctccactccatagctataaaataaaggcgaaatcaccacttgcacaggattccaaaagctcctagctgctagaaaaaacctacacagtttgcgacgatgacttttcataagctggagacgcagcattcgaggctacatggaaggctcgctgagagaattgccgccaggtacacggttgagaggaggcaaaaggagaaaaacgcgcatgccagatttcagctattctttcccgttgcagttcgctaaagtatcttctgcagctgaaccgcgccgctttgagcgctccgacgcacggacggagtaccattggagctcgaccgcattgaagaattgggggcacaactttgctgacacgcaagctcaaaaaaaatcgacgaaaggcaccatgaatgagtgaaacactgcatatgaaactcgcgaatgacacagttgtgtagcatcgtcaaagaccggcccaaacgctgttcttctgcccggctgaacagcgcacaggccgcatacccgatgccgagagtttaccccaggctcacttcagaaggaagcatggccagatttctgaaaagtggactgcacaactgtaaaggcttgacttaattattgatcaaaggtaaaaaataccgagatcctacttgcgagcgtacagtctaccgtagaatgtgtgaagccaagggagctgaacgtcgtcgagtgcttctgcatgcgacaagtacatgcagcgaaacagtgaaaatgcgcggccgcttactgtgcaagacgcctttttcagccctagtttctgatgcatttggcgtgtgtcgctatccatattttcctcgtggcctttatcgttcgaaggtgactcagtcggaggggcgcgctgcagttgttcacacgccattgcctcttcacatttctgcaacgaaccccgagtctgca

SEQ ID NO: 1106 - DNA, 3228 bp, Toxoplasma gondii
  source 1..3228: mol_type = genomic DNA
gtggttgatctgagtgtctgagaggagtgaccgttggactcgcctgtcgtagcagtgtgttcttccatggcagaagcgaacgtcatgaacataatttattttgacaagtgcggacgaggcttgtgaagcgtagtcgccgtaaaccctggtgtccctccgaggcgttgctccctctgaagccagatgagtgccatttgccacctcatctccatcactgtcactgtattgcaccatggggcttcaccagatattatgaattttcaaagtggaacgttacatcactgactgatttgttaaaccttttagtgaggcccgagaaacaagaaggtgccgggagcactgactgcatatatggccaagacgcgtgagtccccatacgacagacacgccattccccattctgctgatttcttgactcggtaaaatggataccatgttcagatgtgcacatttcgcatcgagtcacatgcactcatcagtacacacccatcaacttgttcgctgttgaaaatgggcgggcagagacaaagaccggatcccacaaactgggctcaaccacctgaggaggaaggttgaatgaagcacgtgatggttagcgttcctagacaacatggtcagccatcgatgcgccatgatgttttttttcgtttaggaccgacgcatgtaatgtatgaactttcctttttacatccaaagtgacaaaaagtgcggattctaccacgttcatcacaggaagtctttttctgaagcggaatacctagttaatgtggacgatcatgaggagagataaaattgcacaactctgacagtcttcagcatgaacttctgccctatcgactgcaacagcaccagtgacagcggcgatattctgataggccgtcaccgcggttgaaggaaggccgcacagaaggacgatgtactgcatagaggagttttagagttttacgtacagcgtttcagcagcgtttgcttcagcgacaaataaaaatcattcattgttaactgttccagaccgacacacgtcaacatcacagcgttctcatactgttgtttcccctgagaaaatgctgagcaaggtggtaacgtagacatccacgaatagcaatgcatggaagagggattctacctgtttcctgacaccatcgtttttgtcctttgtttccgtcaaatcagcaccagctttcagtaaatcccttcaagttgttgaggaattctacgatgcacgggaagagcagcaacgccatttgtgtgtgcctggttaagggcacctttgatattttgtcggcaaagagccaacgagagggccaggccacaaagtgcctttttcttgtatcacatggttcgctggagaagacaccagcagcatagagtatcacgagcgcttagctacagatgagttttgatgcaagtgtacgtgcggtacaatatagcggcggtccaagtcctcccgggacctctatacaagccaagtctgatcgcactcttatacgtgcgcgggtatttgtacagtgaaaaaaaagtcgaatcgcaatggttgccagcagtgtcgataaaaagaaacaccggaactgtgtgtgcgtgcaaatgcgacgcggcaaggctgtagcagcagcgacacacaaaaccaacacaacggttgtgttctaacacgaaagagcaggcttttccgcagaagcaacatatacaggaactgcggccagcagggcaaaaacgtttgcgaggtggctacaaacccaacattacgttcaagttaaaaatggcaccacaagcacaacggaccagtaggtccgattgtagcccgggaccgaaggaatgcttttagcgtcgaaaaaaatgctaagcgaagaaacaccacacctaaataccaaacgaagaatcgttttgggaagagtaacgccgtcgcaaacgcctgcacccctcgccattaaaagccgcttacggaagtctaattgtgctttttaccagtcgaaagataatctttaatggtggtaactgttgtgtgctgcatcgtcctgccgttgcgtcggagtgaaatccaacccggctgcctgcaagagacagtgttggattttcgctacacaaaaaaggtggcttctagtgaagcctaaatcgtctttggcgcgaaacaggcaacgcacctaagagtgaggtttatccccttcagatagctcggcagttgggacatttttcactggctctacatcagaacacattcttccttgaacatttccgcgtacgggtcctctcatttactgagacttcttgcccttgctcttcttggggaggagcacagagtggacgttaggcatgacaccaccgcttgcgatggtcactccgccgaggaacttggagagttcctcgtcgttgcggacggccagctggatgtgacgagggatgattctcgtcttcttgtggtcacgagcggcgttgcccgccaactcgaggatctcagcgcacaggtactcgagaacggcagccatgtaaacaggggcgccagcaccaacacgcttggcgtatctgcccttcttcaagtagcgaccgattcttcccacagggaactgaagaccggccttggcagacttgctgctgctcttgccggacttcttcgcgcgaccgcccttgcctttggccgacatcttgtctacgagggaaacggagtggaggaaggaacccaaaaaaacagggagaagacgacctcgtgtagggaaacacgtgtgtgtattgcccgcggaaattttgtaagagtcgaagaatgatacttctggttcctttgcccaatcgcacaaccacatccccccagttggccgcgtgcaaaatgccgccgtccgtccgggagatttcaagacgccgctctcggcgtcacaccctcgccttcttgatcaaactccgcggctagctcctcgaaaagagtggcgagttgctcaggacgcacctctacgaatgacggcagcccaaaattcagcgagcagcggcgccgatccaccccccgaccgaggagtgggaatgacgggtggaagtggcgtgtttccgggaaaggtgcgtctgaccgcggctcgtcttccttcgtcgctccggttggattcggcgtgtggccgccgggaaggtgtacgttgcgggccgccggtcgctgcggtcactaacattctttttcgttccatcgtcgaaagtcaacttctttccccctacgaggagttccccctattgtcctttttggagaagttttcgaaa

SEQ ID NO: 1107 - DNA, 4390 bp, Toxoplasma gondii
  source 1..4390: mol_type = genomic DNA
ctgaaggctttgccgtcgccttcgccgttttcagctgctcgtccttcctcgttcgccgcgcctcgacgcctttcttgccgcttcccggctttgcttcttcctcccccgagccgtcgccggtcgcgttttctctcgtcgtcagagggctccgaggacttccacgaagcaggcgacgttcgcgagctccgactcgacggcgacaccacctccgagtcgctgctcctctctctccctatctcgcgctcgttctgtctgtctgtctctgtctcctctcttgcgccttccgaagcgtcttcgtcgatggctctgattggcttgaccagtctcctcgcttgagccttttctccgaatggggagagcgcggagaaggcggcagcgagtcgggacggcgaagcgtgcgacaagcagacgcgattctccccttccttctcgtgactcccctcgcgcgggtctgcgagtttcacacacagagttggagaggctgtcacggcgcgtctgaggcgcttccacgttttcggtggagtctggcaaaagctgtcgttcttctccgcttcgtcgccgcggccttcgcagcgccaccgcccccagctgtcagccgtacgtctacctgggcgctcgcatgagggagacaccgaaggtttgtgcagtctgcgtcggcgaggcgtctgctctcgggaggcgctcggggaagagcgaacctccatgtttgtgcggtgtttcgttcgccctcgctcccgcctctttttcgcgcgcttcgtgtgtcgctgcgccttcgcctccacgagcgagagccggagaatcctcgcgaggtcgtcctggctctcccacagtgtccccttttgccaagaggcccgcctgcccctgagaaggcgcgcagagcagcggcggccactggggagggaaggaaattcaggctcgaagtctctcctcggcgagacggagactcgagagccctcaggtcgctcccctcggtctcgtgcgtcttgccagctgctttctctgccttcctccgaagaggctccggacgagcaacttttcgcggatgtacgtgaggcatacgaacccccgctgcatttcgcagcgcctcctcgaggcggcttcagaggcttcaccggcggtcgcagcgggagacggggggcgcgactacctggtgaagagagagaaggggacgtcagcggggcagaagcggagttgaaggacaaggaggaagacgaggtgacagccgaagaagagaaggagaggaaagccgttagggaagcgagggaagacgagttgatggcaggagaagtcaaggaaaaaagaaagggcgtccgcgaggaagaggaacgcgaacgggaagaggagcagctcgtggaagaagaggagtttcggggagagcggagaatcgcgagagaagagaaagacgtggacgagtaaggcgtagtggaagacccaaagaacggagcgagacgcgtgcggcgcgtcaacatgttctcctgaggacggagacaccgagacagcgaatgagaactctctttcttcgaaggatccgctacccggttcgaaggcgtcgtctgcggctgacacaccggaacaatcgatttacgaggagactgcagtggaacagccgtgtatgcattgtgtcgggaagaagagaaagcgtccgccgagcgttcggtcctcaagaacgcacggaagtcccccctctgggtgctgaaaacggagttcgcactgccgccgacatgtcttgtttctaaaagacaggctggaaaagccgaggagactcgtagggaaccttccggctgacggagaaaagaccggtcaaaggactgagtttctgttttcgggccagattgtccgacttttctgggtcgttggccgctgtctaagtcgtcgcgcaccgacgctcgacacgctgcctgcgtagcaactcgccgcggaccagaggcgctcaagtccatgagcagaaatcgagcaaaagagacgaacctgagagcttcagaggaacggaagagaaaaggagaccctccgtaggcaaggactcgagcagatgaaagagaaaaaagcgtctggggctctacttgctcaccaaccttgctactgctcgactgtgtgcgcgtagccttgtgcgaggtgggcaaggccgggcggaagtgaagatcgatttgagggggagagaaaagcaacgatctcgtcgggcaaatctcaccgtcacacagtgcactgtcttttttgttgctgtgaaacgcagggtagcaatcacactgggcagtcgaaaggaagaaacgaacgcgatttcccgtagaccacagcaaccgcaatggagtcgaagagcccaagccacggttctatccatctacttctccactgaacgagacatggtagttagtttcgagagcgaaacggcaaatgcctctcttccgagactcgacctttctttccgttggaactctcgctccagaaagaagaagagaactgggcaagaacgcaccgcggacgcaaacccgttgcaaacgatttacagcacaaacagcgagagatatgggtgcaggagaggtttcaactctctcgagcgccagtgcggaagtgggggaatgtgagtgctgcacacgacacgcagaagcagaccaataatctctgaagagtttccgtttttggcgcgtttgccttcgggaaagccacaacatgccagagcacgcgaagtggggaaagaaacgaggcagagcggcagccaagcctgacagccgttcaggattttcacggcaaaggcactttggggaatgtcagtggctgcacgtgttccatctgagacttttcaccttttctctcccagagcacaaaggggatagtttgggctaccagaggccaagaaagttttcacggagcgacagcgggagaaggatcttcaaatcaattgctgtgattttgaggaacgtaggaaatgccatacagccgactgatgattaatatagtcatcgctcaagcatccaactagctcctgtcagataaatggagctgatttcgctctgtggcttgacatctacagatctagctgtgaaggcaaggggaacactgcacacgtaattgacgaataatatcgtcaccatacacgctctcagatagttactgcgaggcactcacgagcccaacaccataactgcgcactctcaatgatgatggaggcaggtccagagaactatatgtaaggacgatttggcaaaccagcagaccgatctaaagaagtgccgacccctccatagagagcaacttaacacgtctacagcgtcaacgaatctctggcacgagtgggcatctttcggctttatcgagatcaacttgcttttttctatgaagaaaacagtccggaagtaatagagactctggcgacaagatgcaccgaatgccgtgaatttccggtttcaagttcacttgacaacaagaccctttttttctcgtgaaacaagccatcgctttcacggctaaaagtcaggacaaacacaccaaacgtggttctctgaaacttaaaaccaacgagttttttctattgcagctgcatcacgagtttgacactcttcaagatgaaacagtaaccttttgggtagcttcctccaacgttgaactgagttggcatattacatacaatgaccttgaactaaacgatgataaccggttgattccattttaagttgatacgggaaggatcatttgagcgtttaccgccagaacaattgccccgacggtccgttttgtgttggccctcattcgtcgatttcagttgatttgtttcgtacgactcctgaccgtcttcgttgcgacgtatagctgtgtcgattcacctcattcattcttcattttgtgattttggtgatgtcgtgggcagaaccattcaactctaaacccaaaacccagaacacgagagctgcacgcagcgcggatgtcagccgcccagagcgactgcagaagcatgcagacacaggcgcggtacgccgctacatttattctcgactggccgttcgtttaagttttggggattttcttcaaggttttatcgaaacgcgttaaggttagatcttgcatcggttttttccttctttaacttccgctggagcgacagccacggggccgtcccttttccgtagggaatttcatcttgcgacatcacctgaatttcggggttccgtggcgcctttcttgcatgccattctcaccttcagccgtttgcacttcgctctcttttctcccctctctgtctccgttcgcgtgttttgccggtcttcttccctatttctctctttgacatttcttccattggcattttccacaagttgtactcgggtaatctttacgtagtctcgttctcgagcttgctgttgtctcctctctcttagtttcctcgtttccactcacagaa

SEQ ID NO: 1108 - DNA, 4059 bp, Toxoplasma gondii
  source 1..4059: mol_type = genomic DNA
tgtgaacagcttcgagtactccttcctgtggttgcagaagagatagggaatgacgtccacgaggagctgctttctccactctttctggagttctcccgaggccctcatctcgtctgcgagctcgccaggcagagtgccgcctcggagatgccttcgctcatccgacgctcgtcgcaaatgcctctcagtctctcctcgcagagcgctgccgctctggcgctgagagaaggggcagtctgagctgtacgtacagcaggaggacacgcaggcgccctccgcacccgccgaggctggagagggagactctgaggacggattgatgagtcggtagatcttgaagtcgtgctccaccacgtagacggagctgtcgtgtgcgctcgctgccgcaaagtgacagccgtaactcatccgatatcgacctgtgtagatctcctgcaccgcgcctgagcctgagccaccaggcctcgctcgcgggcgcagccgcgcatgcagcggatgcgagaaatccatggtctgccaggttcttggaacgtccagaaatgactctgctcctttccccgcgagaagaaagggagaccgaggacaagtacgcagggaaaggcgaggtgagacaaagagacgaaacctcccttgaaatagagaaagggagagaggaactgcgatgacacagctgaatgccggaaagagaagagcagaggaagaggcgaagggggcagaggaggagagagagtcacaagataacgagatcgggcgcgagccggaggccacagcaggcgagggtcttcgcccggaaggcgcctatctgcgccttacattgctgcgaaacagtccagggaaatgttagagaaaacctgtcggaaaaaagcactcgaaaaaggctgggttgcgtgctcgagtgttgtcgcggctggcttcgcgacctgcactgccgcgctgcagtctacgaatgcgaagagagaagcgtgtttctccccgcgtacgaaagaacaatatctctgctgggctccatcactctgcctcgaagagacagttgaggcgaaggcgaagaaatggggtcagcgaagggaaagcgcgtcgagacaagtaaccgacagggcaacgcggcgagaagaagggcgcagtctgccaagcgtgcggtgtacccgcgtgcagtggcgatcgagggaaaagcagaaacgaaaacaaatactcctcaccaggagaactgcgaagaaaagacatcggcggtactgttcttgaggacaaaggcgccgccgggtgtcgatttacacgcagaaccccgagtaacacacatcgccaagaaaacgcatgcacagctcgcagacgccgagccagctggaggggggcgaggaaggaaaggtcttttctcattgtgaggttcgtttgagctgttcttgcgtttgtcattgtctaaactgatgcaagcacattcttcgcctgccaagacgagcgctcaaacgtacacatctctgcgatttcacattcatctgcggtggacaaataccgcttgtcggagtcgatcaggcgtttgagagctgatgaatcgtgggagacgtcagagacaagacaagaactgctgcagagataaaaagtgaaaactttgcagaagcaaggggaagtgaagggaagaccgtctgggagcagaccagggaggtgacaggttgttgggggacagcaaggcgcaaatgagaggaaagataaaagacaagacaaacgtgcattggtaaaacacctgaaaaagagtggacagacgtattagagcctctaatcaataaaagaaaggagaaaaacgctcacgaggggtcgtgcggggcatatggctggggtgtatgtacacctgactgttgcgcgtgaagttggcgtcaagtgttggctgcgattcaggcgcctctgggaagtcgcatatgattcttgccactgagtcttcttaattcaacatattttctgcgagaggacgtgctggagctcccaaagagtcacgtctccacctgctataaaccgtggagaacggcagcgggaatgcagttccttccaggaggtgctccacacgccacgtacagcccttaccccgactcgttgtaataccgtcctactagtgcctccgaaagcaaaaagttgtcgccgtctccccgagtatttccgcgtgccctctccctccatgcagcagcagtgaacggttattcggttgacagttccagatttctcttttctggccattcgtttgcgtgtcagcaagtaccatgcttctgatcggaccgatgcactttagttttctcaacaacacagcagtccagttcttcttgagacagtttgtctctttccgtgtccccgctgatagactgccatcgacatacgaagcgcccaagtcgtccatacccagagtgcaccgagaaccgccatgaaaatagcgcggaaaacggtttgcgttcgaggtgcaatatttgggatacccttgtcattcacattcacagcgcaaaagattactggtcctacgcgagtacggccagtaccatcgccctaggaattatgatctctgagacagacctgtttataccccctagctgcctttggacagaggagttcgcgaaagtgagcttcgcagcccgcctccggcagttcactcgagactaaatctccacagtatcgactccgactagtctttgtgacgaggtttcgtgcgttgtagataggcgcagcacccgagcgtgcgttcagtgcccattccatcggaagcgaccacagatgagaagcgtagtgccagtcactaagcagccaggttttcttatcaagacaaaatctgtttaagaattcggtgtctcagttctaaagcctcgagacacgccatctcagtccaccgttactttccccgacgcagctgccgaacgcttcccctgggtcgcctctaagtgcacatcagaatgaccaggaactctcctattggaaggaactttttaacggaaaggccattataacaattcgactgtagtttcttcctggaaagaccagaagacggagtgcatagcgagaacgcgtgtctgcgagacctttcgtcgcgatccttgttttcaggcggcggccacagtgcgtttttgcaagattctgaaaggctcgctcgagtttcaagggaacgctgtttcccttatacgcttaattgtaacggagaaactgcggtggcccagagaaaggccagctgagggcgcaagatccgctgggggtacctttgctccgttttccgcgtagagtttagggtgccctggctgcagtaggcacacccaggggggaagggggggccaggtgagcccgctgcgtggttcgggaactcggtgcttctccagagtgtgcagaggcgtgagagcagggatttcttcttcctttataaatactcttttagcggtttctcgcgctcggcgccgcgacggtcgcctccgctttccgcagtctatgatcgtgtgtatgcatggcgcaagtgcactactagttgtgtttgcctctgatcccgcatcccccgcccgcttccatataagctctgccagattgcccccgtccgcggattctttccttgagcacggctatcaacaggcgctcagcgatttcgcccgtttattctcctttttcggggattgttttgcttctgtttgtctgcgactcgcgaacgcgtctttcgtgcgtcctgcgttgatctagttccgctacagtcgtttcggcgtcccaccccctcgtccggccgggaaaaagcaccgcagtgcgccccacccttcgtctcgcggtcctttcgtttccacccgcagaacacgtctttttctgttgaatttttcttggccgcttcctctgcactgtgctcacgggtccgcaacccaatccgggcggcgtgctgcgccacctcgcttctcgtcgtcctgctctttcctcccgccggttctgcctccgcgtgactcgcaactgcggttccaagcttttcgtttgagagacactcgagaaagttgctggtgcctcttccgttcccatcgtcgaactctttggccgtgcaagctctccttcccccacacctttcctgcaaaa

SEQ ID NO: 1109 - DNA, 4043 bp, Toxoplasma gondii
  source 1..4043: mol_type = genomic DNA
gtgatgtatttcatgcgtcgtgagctgtacttgcgtggtgcaaggctgcttagtgtcgctatatggtcatttttttcagaataccttgctcccctgtcgcaaagaaagctctgccatgtcagccgcatgatgcggtcgaatgccagaggtgccgggaagcttacgcctgtaaaaactgtagtatcctcagtaacaacttccttcgcttgccgattacagcgcagaacaagcaagaattgttgcgactgggctgggctcgatgtacctgcgtgttgatctcttttgtcactataaagggcagcgaaacgcggtttttggtgacagaatgttgtttgccaacacgcagagaactgagaagcatagtagctgcgatggtgacttttcgggtggaccgtggtagaatatattgttcctgagatttgatggccgtgagtaatagaaggggcaagtcccgcggcatcgtttcaacctacaatagggaaatgcgcgtcacttcacaactccgacggttaaaagtctgtagacttgaccgcagtccacgttataagcaggttcattctgttgcttcaacagcagtcggtgtttgtccggagcccctgtgtggatcagtctcttcgtcatacgcatatccaagtcgcaagcgatacggtatccacgttaaccagaatgtggcagaattcaccagcagaatcaagcagcgaagactgttccgcattatgagatagcacacttgatttttttctctacggcaagaacaacgcggctatggaactttttcagctgtagccccacgaatgagacctacgttttggtgacagcgctatgtgtttgctcacgtgaatcgaggtaaaactagtaagagtcataccttactgcgccgaagaaaccgagcgtccgctactcaaatgcatcagtctgcgggcgactatcaaatagtgcgctgtacaattgctatgcgaaagtgacaatttccgtctccagcggatcgaatgggttacacacctccgctgttattgtgtttgtgcctctgtacttctgggaatgacgaacgatactctcaggtttcatagaatgtggagccttttccccgtctatgcacgcttgcagatgtgtcagctttgaagtcggtcgccgcgccgcacaggcgaaatgattttaacggcgaaagctccgcaagcacatttctttaacttcagtgtggaagacggtttgcaatccgaaggactgttgtgttctctatgagggcacacacagacaggacgacagatgggtgtgtgcttcgggccaacgctgtcgcttctgttggcctgctgcaaatctctgcgtgcattttgctatcacgatgacgtgtaacgttaactggagatctggatatagacttttacgcgcttcgatcacattttgcccactttctttcacggcggatcctataggtcaaagcgccctcgctggtgtggtacggttcgccgttgtgccggttccttgcggcgattgccttccacagtaggtttacgcgttagcgtgttgcctgacagttctacagggacccatcccgcctggaaatcattcttacagaaagagattatgagagttgtgttgacggaaacttccggcgttgcagcacatgacacgtgattcgtgggacagggcagacactccgtggcctccgttgttgatcgtgacactttcacttcaatgttcacctcagataaaagagttgagagggtccgattcgaatggtcgtatcgcccacttccacggccgtgagcatatccaatctgcagaggtcacacgtcccaaaatggcaaaaactacaaacaacgtgaagttgactcagggcaggttgtcccagattcccagttagattctgtgactccagtttgtctgatacagtctgatgtgcatgttatggttgattgattattagttcttcgctagaattgagttcccgcagcctggagaacactgtccgggctttcgatatcagtccttttctgtgctcttgggtggttgcagacagagcggactggcgggtggcctttttccaagatgatgccaaaggcacaccgaagtgtaacttaccgtggatcggagtaactgagtcggtctgtttgggggatctctttcggcgctatgctgagttggctcaagagagcgattcccgcttgtcttttttcgtatgtggctacacatagctcacttgatagagtttgcagttgcctttgtgctacttagcggcaacagggcacatttcggcaattcggtacccactgaataatttctagacgtggcttcaacaagtggaatatcttgtcgacacgtcgccaaacgccagatacttgtgcgccaccgcaagataagtgtcgcagcatctcagagtgcagtacatgcatgctttctcttcaagatcctgctcggatgaaaatatcccgcacgttgcgagttcggagcaaaacggaacagtggatggtggccttgtgttcgcttcaagactacggtgagccgagctgtgtgccataccagttgcgaggtcgccggttcttcggggtcccgccgctcccctgaagtcaactatggcggtggatgcccatatcatctttttaccaaatatagtgctggcatctacttcgagtcacgcgggaaataatcttttgggcatctccaccatccttattttatggccgagcttggttccgggccgctttcctcggacccgacggatttctttgttctggcccgtggggggtcaagcggcgttgctgggttgttggcgcggcaccttacagcggggagggtctcgtgcgcttcgacaaagttcaatcaccgccacattcggggactcgtttttcgctctgaacttcaaggactgcatgtactgtacatgactacagctccaagctgccattggaagtgttttcttcagtttccggaccgctgtttgttcggaccatcgttgacccggagaaaagcgccgctctgtctccattgtcaaggtcaactgcaggcaacgtagcccgtgctgaacgcgtggtgggttcgactgcccggtgccttttgtcccgtatgaagccaacactgtcatccatgtgctgactggcagtgggggagcaaaaatcagttgaatcggttgctctccgaatatctcctcaaagatacctttgtcgaacgaggtcttttttcaacttacgatgagcgttcctcagagggtcctcaccgcctcgcgcgcccccggcgcacgacggttcatgtttgctgccatcttcgtcactctcgcgctcacgtggcgaaccatgagtttggtggctggcgcctcttcttctgggaacactacaacgccagaaggaaagcttaacaaggtattaaggggccacaactcctgaagtgaaaacggcggagggctcagggagagcgcagggctggcaaggggagcgcccttgaatcgactccctgggaagaaccaactggcagccactacacatttccgagcactggctgagcttgacacctctagcatcagctggacatatgccgtctaaagttttgcgcagatctgtgctgattggtggtggaacgctcacagaattggcatatatggccggccttcctgtgcgcagggggccatcatggtggcatcggctgcaagagagaagcaccagttccccctcgcccccctcccccctttcggccagcactgagacagaaagaaagaacgaatttcgtcgtatgctgtactcaccgcatcgccgtcacaggcttcaaggggcttgtgggataggttgctcccgtttttgcgagtgtgacgtggcactgtctccgttcagtcaaagccggcaccattaatggacactcccgttcagaactccgtttaggtggaatatgtgacacacccacgccgtttacctttcttttgctttagaactctccaaccagggacggtctgtgttgcatactcctgtttcgtgtggtatctgccttctatttgcagcctgccagcatcagccgtgacgcgcgtgaccagcttgatcaagctgaagtattggcga

SEQ ID NO: 1110 - DNA, 3334 bp, Toxoplasma gondii
  source 1..3334: mol_type = genomic DNA
acattgtctctttacatctctgttgatgctgagtggctcccgtagctctcctccctctactccacctgaaccctcctcggagagaagtaagctggcagtctttacctaggttacatacatcagtgtccttccaagagggaagtgccttgaccacgttgacaacacattcaccggtggctaactcattaagtaccttagcggttttgtgtgcgataaagtaggtcggtacaagtgcaattcgttcgcacacttcttcgaatgcggatctgtacattcttttctccctacgtgactctttttttccgtacttactggacttcagtctcactgctgggacctctttttggcccgcaccacgactccttattgtccacacaggttcttgtcggtttgcctttcctctttgttattcccccgtctgtcaccctggcccagcgaccgattttcatcatttgcgctttctctttcccttcgagcttcgatttgttctttagtccattgcacctccctttgggttgtctgctatccgtctcgtcttctgtatttcttttgctgtggtgccggtctgttgttaccgtatatagtctttttcccgccttcggcccagcaccggctaccttccaattcgattggtcaagcagccaactggccattctctgggtcttccaaaatttcttctactcgctggggcaatctgcgttgctatgcttgcagcagatggcaaaatccgagggtgccaccgttctgccacgcgagaatgaattatgcttaagctcagagaattacagctctctgtggttggtatacagttacaacatggaaccgaccgcgagacaccgttctgtgtgtctccctgtagagtcctgaaggtccgcctttttcttcactacgcgcattgagctcataccacagattgtcgggtagcgagatggtcctcccaggaggagcagagatcccggtcggcagtcgtggtcacgatgatggcaaaatatgtgacttttgtgtctagttcgccgcggtatcgtgaggaactggctcgcctattgtggttggacgttcgttttttccctgacgtcaacctcactgccttgaagaaggctgtgaacatgacacatcacgtaggcgcactgacgaggcctgaccttttcgtcgacccgcgtgcgagcgcggaaggactggcctgctacgagggtcaagcgaggcaaacaacattacatcctcgcttggcccgtgcgagtgaattagtgccgacgccgagaatagatcttttccgattttgccgttgcacacacataatcccagctgacagcatacttttctgcctctttgtggacacggaagcccggcgaactcgacgcacagtgattctactatccaggctacgatccagcgaagtatgaaaaccagttttccatgttccattccatccggcgggcgccacatggcctgcagcgtcaccaagccgtaagtgatcctttccagaacgacatgacaccacctaaactacctccagaactagtgttttgtgagcagtgccagttagtggaagcaaactcggccgttgtgcagaaacccgtgttccggcacacacgtaaggtggaaacagggggctcattggcagccttcaagtagttacagtgttggaacagctcctgcaggcgctctgcggaaattcatttgcgcatccttgtacaacaacggcacctagagctctcaaaacctacgcacataagctggagtaagagtgtattctttaaaaataggtattatcgatgggactgacgctgagaggctggctaagcaagcctcgactcgtaagcgatttctcgtgtcccctgcacattcgccatattttatacgcatacctcatactaatgggatgtcgtatgcgcactcatcaactcgtgagagatggggaagtcgcgcggtcctgaaactcggcaggattgtcgtatgttttcttagactcagaactaccggaaggtgctactcacaggcatcggcaggtcaggcgacttgcgaccacgggaataacatagcaaccggcctagcgtgtccctattaacgctggggacacgttggcacctctactttttcagagcgtctacgtatagcttgaatttgctgacacgcacaaatactgcaggacgcccaactcgaaggctcacacatgtacatcctgcaccttggaacgattcttgcctttgcaaattcatctgcgctagcatcgagaatcagtccctggactctccaagctggtacttgatttttgcctgttaagcgtcgctgtctgccgaaattgtcgggcttgccattcgctcacattctgacagctaccccattcctccccctgcgtcccccctccgcgagtatgcagtgctgtcaagaaacaccgacaggcaacgcgtgtcgagaccctgtgacggtcaaatacctcttccgtttgtcatgtcgacagcagccgcgcccattttcgcaaagcctgcgatggattaaaagtaacaaggcaactgtggacaaggcttccccctagagattcttcctttcagcgttgacacccctaaggggctgagaagagcgtgggtcttcgttccgcgcgttctgcttgggccgcacgccgacctgctgtgccacgctcgatgcaagctggcctgctttcgcaagttcggaaaacagggcaagcttgacattgaaaccacgccagcatagacaagaaggagttaatgagaaagcgacagcggcggtctcaagatgacggagctaaagaagcaacacggaacagtacggtagtcgggagcgagcgaccagcgccttgcaacgcatttgtatcgccgtttcctgatcgagttgtttgtgttctaacccaactactttcatagaaccccgctcccctacaaaccagtactgactggatcccccgttggcctgtaagcggtctcactcgctgggtcggtgctcccacaggccttcctcaaaacactctaactaattctcctgtctcttgtcgccttccacaccttcgccgtttgtccactgcccgccaagacaagcttgcgttcgggtcttcgtcttcgtggcgtcctctctttctcagtgttttgcttttgtcgttgttcctttctcttcctcttattttccatccgcgacgtttcgttgtcagctgcctcggtgtctctgcttggccgggcttcccttgctagcgcgactcgttgaggcacaaattgtttcggtgtcctccactacatacggtgctccttgtaccaaccaatgaagctggactgcgtgccgaacccaaagtgattctacgtagatggtgaatgcgtgtgaaacacta

SEQ ID NO: 1111 - DNA, 1477 bp, Toxoplasma gondii
  source 1..1477: mol_type = genomic DNA
cattcggtggtttgttttctgcgttccgtcgcacgactgagtggaaacggaagcgtcgggcgtaactgccgacccacgttccagcttcttcatgggcgtctgggtccccgtctcgtggttgttctttggagagaactttcctttgctcggccggcgctgcgttgccactggggctctcctcagcgctgcccgccgggtacggggagtctgttgcgccaaagtaaaatccgtaacctgtcacatttcttgccagcctgatgacactgtgtctcgggtcaagacgttcccaaggcaggagcgactttgaggcagaagtgtcaccattgtcttgtcgatgccactcctcggcggtgaggtccaagccatactcgcgaacaacctccaacgcacagtctattcgatccaggtcagccttatcttcggtgcaggcgcttttcggcgtgcaaaacgccccagatctgtcctcggcattgtcaccgtttgccgacatgttaagcggactcgcagatcgagatccagacgaatgccttgagctactagccccggggtgagcgccatcaactggctgtgcgtacagcgtatgattcggttccgagtttcccgcaaggcttccctcgtcggactctgaagaatttgccacccactccgccttcatccgtgtttttaacgagctgctctgtgacgagatagcaatcccgacactctcgtcggtcgactgaagacattccggcctgacaatcacggcatgccggccagatttgagctgcagagactcgcggtcaggcgcgctcccagcaggggactgtcggaagttcttcagattcgcctgggtcactggtgtgctctgcgcagggtctgaccgaaggtgtccgttctggggggtctggagggagtggcgtaacaggggcaggggggggcatggtgaccgcagcgagcctttgcgtgaatcaccgaatacatttgaagaaagtgtgtcctcaaacgcatcgaaatggtttgctaggtttgcggtcgactccgtcccgttctctggatccgtttgaacaatcatcccccgcaacgcctcaggaaccgccgacaggtcggaacctgttgacgggagggaggccatttccacctcttcgcgattatggaaaagctgagtggaaaacaaaaagtcgcgctggcttccctgcagatctatacacggaaagacgcgaaaacgctgtcgcttatgcgcagccgttcacgcagctactggacaaagagaccactgcgtccgacggccgatgtcccgaatttccatgctttgtatgccaagaattaccagctgggaccccttactagaagaaggcgaaaagcgtggcgatgatactatgaaacctcggaatgcaaagagcgtgcgaggaggtccagagcgttaccgccactgtgcagggtgcgttattcacagttggctgaccgagtcatcggaggcgaaccgacggcagaaagaaga

SEQ ID NO: 1112 - DNA, 3544 bp, Toxoplasma gondii
  source 1..3544: mol_type = genomic DNA
cctcaacttagcgaaacgaaatccgagaagccgaagaaaaactcaaaagcaacgccgcgaacggccgccagattttcccgcacattctaggcatttccatacatatgtatgcacacacctgcatattatatatatatacaaatatatatatacaaatatatatatgtatacaaatatgcgcctctacatggatctttgcatgtatagagatcgagatccagatggggaggaagagctgtgcgcgtacgtccttcagaacacggacagatgcttggctgtgaggtgcagcgacgcgaggaagagcgcagagagaacggaaaacgagaggagcgttcgtcgccgtcgatcctcttcagaacggcgtcgaatgaagggggcgaagaagatgcaccagtaagaaaggcgatcctggtctgccgccagagaaccgccggaagtccgaagcttctgaacggcccgtcacctcttctcagggacagagcaaagcacacaaaagtccgctggttttccagggatccacttgaagcggaataacgtaagagtgcctggcgcgcgcctctcttttccgaacagaggtcaggagcagcgcgacgcggctagcaggcgaagaaggcggaaaaaaacgcaggatgtgtgtcgccagagccctcgtcgagttcgcaggtcagatgtgtctagaagtggaacgcagatgcgttcttgcagacctgaaaaaaacgcgcttcgcgttttcctcgacacgtttgcgagagtttctcccgctcttgccttcgcgccgaatttgcgcttcgcggccgcttctctggcgcctgttgtcgcgcgttttggtcacgaaacttgcggagaaaaggtggcggaacgaagttgcttgcttctttttcaaagcctctttgtggaggagggttcgttccaaaaatcgaaaaacacgcgagagaagttgggcagtcgtcgcgcgcgagcgcgggtaatgccgcacatccgtgcgtcttcccttgccggaaaccgtcgggagaagtgtagcagaaaaggcttctttctctcgaggtcacaacgaacgcgtgagcaacctcaaaaacgctcaagtctccgcgaaacgaaagtccagtctgcgcaactgtgtcgcgcgaagagagccgcgtcagctaactgtcctgtcacagcacagcggggctctccctctcatggcaactctccggaagtccgtgtgggcagaaaccagtaaatttccgcgtgcgacgaaagagacaaggctttggtgttgacgatctgccgacgcgcgggtattttctgcggtttcgcgagcagagagaggggcgcagctcgaagggtcgcgctcaaggcgtttgtctaacgagtgccttgctggtgcagcgtgagaaatctcacagaacgcgacagaacgcgccagcgggctccctcaccccgcacggcgagaaaacggacaatttcgcgacgaaaagtgcagggaaacgaggcgcagaggaagaaagtggaaatacgttggggaaactccaaaaacctggacaacgaatgggaacgaagggcggggaccctcgagaccggccgcggagcggggctcttgggaaaagatgcggttcggcgttttccaccttccttcacagcttcagggaaaccacgcgaacaaacgcgtatatcctgagaagccgagagagagacggttgttatttagagaaaatccaggcgttccgggctcggaacggtagaaaacgtccgaggaagacgaactgaaagcgcagcaaaccaacagcaaagtgcctgcctacaacacgaacacagagcgagtgcggacgagtggaaagaaggaacgcaaacagacgaaacagaaggggaaaagtctctccaactgacaggcacgcatacgcaaaacacagaatggcgacatcgacttacatatgcgcatatatatatatatatatatatatatatacatatgtattatatatgtatatgtgtatgtgtgtgtaggtcgagtagaggaaggtgatctgaggttgtgcgtgtggcagtttctccttccgaacgattatccgcaggcgagttctcgagttgagactcgcagaggaaagagccgagcgcagtgacgagagagggtgacagaagggactccggggcttggacacaagaaaggaaaagactcgaattcgaggggaaggagaggaaacgaaagaaggcgccctgccaactcgaggacacccggtgtcccgaagaacctgacagagaggaaagctgtgagtttgacggtagaatacctctgaatcaagcagagaaaaacgcagaagcgcgcgccacacactaaatccttttcgggggctcgcgttcactcgtctgccgcagaacgatccaccgcgatttcggtgtgtgccctttgctcgcgttgctgcggaagctttttgcaccagccgtgcgtgttgtgctgttgtcttgcggtgacacgacatctttcctcgtcttactcatccccaaagctccctccaagccgagaagctgcgttgtgggttgccatgccgtctctggctgggcgcggattttcgagttcggaactacgcacatgccgtgagttctctgaacaccctctttttcgacgactcccgactcctctagtttccaacagagtttcgcgaccatgccggaccgcaagaaaagcaacaaaggccagagaggcaggttctcatccctcgcagcaagaaaaacgcgcgggcgttcaaccgcagcgttcgtcgaggcgggtcgctcttgttgagtctccacgaggtgatacgggagcgtgtgccctccacggtcgacaggaagcaaacaggcgaaaaaaatcgcggaaacaacatttctttcttgtttgtttcctctcaagcgaccggtgacgacgaaataagctgttctcctctctgtgacgtggacgggcagaaaccgtcgacagaaacactgcgtctttgcgtgtcttgctcctgcgccgagtcccgacaagaaactcgcgttttctctcaagagctgcccgaatttggtttgccttttccactctttctgcgcagttctcctcctcggtcgcttcccaggctcacaaccggcaggttgggggctttttcacgtttctttctccggccaaccgcgtccgccgttctgctctctctatccctctgcatttgcgtttgagtattgaggcaggtgtggcacggttttcttctcgtgtttgtcgcggtgacggttttccatcgaatctccgtttcactcggagaaacggctttcctcgtcgtactcgcgccgctcgttcgtctctccgctgacgcctctcctgaaactgtttttctctctgggaacacgctggctgcatcttttattcgcgtcgctctgcttgttttttcttctccgtccacgcttgccagccgtagcttttccgctgacccgtcgacgtctcgacgctgctcggcatccccctccctctccctctcctgtccgctgcttcttctgtcctttcgcagctctctctctctcctgtctgctgctcagtcgcttttatgaagaggaaata

SEQ ID NO: 1113 - DNA, 2431 bp, Toxoplasma gondii
  source 1..2431: mol_type = genomic DNA
ttactgcgactctcccatcctcgctaatcttaggccggcattgcgtgcctgtcaacacgcacttacccctcctaattgagcatctgactctgtttcttcccagccgcatccgatgtctgccagttcctccagtcccgagttttccgcatcgctgtcccttgtgtcaggcccttttccccgagacgtcagtgagtagggcgcaaagtaagcagcgttgtccgcgagttgccctgtagctctgagactatcaccgggtacgggtcgtagatgacctgtgagatcgggagtttctgtctcgaaaacccttttcttttttccccactcatttccctcgaacttctgagagctgagggatctctcggagtcgcggtgtttaactctatccatccgagcttgccccgccgccgggcaaactggcttattcgatgcatttggtaacgggggaacacctgaagtagaaccccgcgcaaataccgccaaatcgcgctcaagttgttcacggcacggttccggcaggcgtcgaagagccgagttcgcggtggcaccgcaagaccctgacgggaaggatggcaaattcagcgacgggggacccaaatacgaagagccgcatgccggctcaggcatcctggacaacatagaagacagactgctgaaggggatgcagaagaaggccgttaccttcgtctgccaataacttgttggaagacatccgagaagaaggcgaaagtcagagcgcagaacaaaaagcgatacggcgggaaaagtcgtgcgatagtgggaagtctccaagatgctgttgcttaagagggagcttgaatgtgcacgtgcctaaggagtaatcgaactttttttcagctctgacaggtcactctgtgtcgtccttgtgcttgaaacagtcgggtttcaaggggctgagtccggcagcgacttctagcgaaagcctagagaggaaatgcttcctgcgacgcgcaaattcaaacgaaactcagttgtggccgaatctgagcaacaatcgggtataaagggagctggagatatgaacagcgaagtattagaggagaagaaggggggtgttacttcaagtgatttttgacgccagcgcggccgccccgccaacgactctggccgatcctggaagaaacaacagtttcgcaagttattcagtcgttccaggtgcttcctggtgggtacgagacaagcttatttcaggcaattgttaacaggaaaaacaaaaatctgggagataagcagcgcgaagcaaaataaatgttggaaccctgaagcagacaagaggaacctccgaagacccttcaagggatcttcctcaactggagtccggtcgagacaggtgtgcctttacgagacggaagtgacgctggagagacgataatcagcgatcaccaagaagatatatcatgtctgaccttcagtgacagaaaaaagatcttcaacaggacaagagaactgatatatttttgtgagtacgcgccacatcaactctgcacatcctcaaaacgcgtgccgagttccggcgagcgcggcaagttagggaaaagcagagaaaatgagggaacataaaattccacttacgcgatgcatcgaatgtatttaattgtcacactcagttgcatttagttgtgttggaaactggaaaacattctggggtctggatcctccccgttaggtcgccatgcagagagcccccttggagctgtttggcgctgacgccgggtcggtcgtgccacggtggagaatcgggaaggggaaaaaccggaaaactcgcacttgtttcctcattgaactccacgactgacgattttcaaagtacttctgtgtttgcaacggaaaggttgggatataccggagccagaatcttgattttcctcctgttcgtgtcgcctggaaccgtgcgtgtcttgaagactcgctacgcgctaggcgggaccgcaacagagttcggtgttgaataccatcatctccctgaatcgaggtccccgacctagttttgtgtccagtggtgcgccaatgtgtttttgtttctcttgtgggagtcgtatcttaagttgtggaattttcggcacaaggactgtccagttttcggctgcgagtcagcgagtgaccttccggcccagccctgctttggtgatctgactgatcgtacaatttggcagtgaaccgtggcaacgaagctggctgctctcttcgagtttcgtgcttctgcactttgaaaggtaatatcgttttgactttacacaaccgtttcctgtactcgaaggcacaccctgggactcaagttcccagtttgtctgtccggtgccagtcaccgttctagctgaagtaccgctgtaggcgtagtggcatcttggatcacgcgggcgggtccaatgactgacatctcagtcgttcttcaacctcatcattcaagttccaa

SEQ ID NO: 1114 - DNA, 1929 bp, Toxoplasma gondii
  source 1..1929: mol_type = genomic DNA
ttcagagtttcaacaaggtcctaaagccttgacttgtttgcgtgctgtagtgaaaactcgccgtggaaatgaactgaggtaatcagggtctccttgtgacgcctagcgcaagttgctgctctttagtcacattcgtcagaatctcgctttccatgtcaacatcccttttctttgagtcacggttttctgcggaacggacgacccgcgaacacgagggcaggaatacgaaaaatcgagtagatctaaggcttcctggcggcgaaacgaggactctaggctcttgaagtatttccacagaacttctgtctcgtcacactcgcgcgtccgtcgtacagtgagagtggctctgcacagcagtcgtctagaactgggtcgtctgcaccggaggacagagacctgtagatggagacttcgatgtgtagacaaaagagtctctaacttctcgtcaacgcgatcactgaaactcgagaacttggcaacacaagttccaggacgagcgagagaaaaaaatctcgcgaattcgcatggtaggaaatttggaagatgcacgcggaattctcaaagttcaggatggtggaaactcgaaactttactgttcaagggaatgaattcgaatcctgagtctcacccgccgaaaacggatctgcctcttcaccgaaaaaagacttcgaatatacttttacatacatatagcaatatatatatatatatatatatgtatgtatattgtgtgtatgtatacatgtatctatctacgtttgtatttgtgttttattcccgctgtagattttctgtctcttcgttgtcttttgcgtttctctgacaagttaaattccaaatgtgaggatagctgcagacgtcttcgtgcaggattccgtggcaacaaaggacgcagccagggtcttcttcaagactgcatcttcctgtgagtttgtccccgactttttgctggtgtccttgtgacggattcgcttgtctcggtgtcttggaagctgcggttcagatgttttcttttccgcggtcgctcgagaagaaacggtgtttttggccgctgccctcgagacggcacacatgccattgccagcttgcgcccgatgaaagcttggggaaaagtacctttgcagaagaaagacctctccacaagaaagatggctgcatgcgaagagtagagagaagagcagaaacacaaacaagcctctgctttccagctttttcccggcaaccggacggtgcccgctgtcgcacacacaaccgactgtgtgcatgcgaagggatcgcctgtgttctaacaactctggcgaccaccgtgtgtctctcgttcgcggattccctggttttcttcgatttcttgtcttcttctcaaggcgccttcccctttgctgtcgcatccacagaaccacactgtcgctccttctctgctccttcgctacggcagcctgctgttgcgcgtcttttttccgcgagattctctcgggggaggctcttcgtcttcgccgcacatttcccctcgccttcgcccctctgcttctcgttttctcccgtctctctcttttcgctttgttcttctgctgtctccaagtctcccctctgctctctgagcttttttctggccgtcacgcgcgcgttctccatctttctgaggtgctggtgttgttttctgtctcggtttttctgcgtcacttcgcctcgccctcgtcttctcctgtccgcatttctcgtttcctccgttgaccttttccttctcacttttctcttgacgcgcactgtccattccctttctctcctccctctgtcttcccttcatagtacgcctgtgtcgcgctgcggagctgcttcctcgggcgtctctctcgtctctcttctctgcagatcttctctgccctccttgtccgtcttcaagaattcctctttctcccgctccttcactca

SEQ ID NO: 1115 - DNA, 2087 bp, Toxoplasma gondii
  source 1..2087: mol_type = genomic DNA
gacaagcacacttttggcgcgaggctagacacctaaatttgtgtgtccaaacacctgtgttttcgccacagaaatcaacaccgatatgcaaatgtgaacctagacatatgtatgtatatgcataaatatatatatatatatatatatatatatgaatacattctttccagtttagctctcaaggcactcgaacacattcatccgcttggacatcgagatcacatatatatctgtatacgaatatacatatatataactatatatgaatatttttatatacatatatgaatacaacttctgcatctgttcatgggtagcggcatctctttagctctttacctccaactgtgtatttgcggccgcgtagggacatgttctttccgaatgtggtgggagtcgagagtcagtttctcacgacactaaccttgtcagctgcgggcgattccgtcttgccgcgcggctctcacctcgtcagtgtggcagagagccgcgtagaggattttaatgcggacttctccttctttcggaggagcaaccacaatgtcagtgacctgagagagcgcgcaagccgacacagcagagacttgtccataacccaggaagccgtcgtgtcccccgcacgcttcttttctttgtagacgtaatgcacgagtggctgtcacatcccgtaatgacatctagagaaaactactgctcagtctgtctctatacctgaagaggatcccctggggcgaagcacacgaccgccttgcaggtgataggttttgctgacgtcccatctttgcctttcctatccatcttgtcagttttctgcaatttcgcttgctatcgtacactggggaaggaccgttctttcctcgctaggtcgtgagcacacgcttgaggccaagcccacacgtgaagacccaacattaatagccttgtatggtggcataaagcctggtttgccgtgttgagggaagacagcaactgaggcgaatcggcagccgagaggaacgcttgttttttccgtagaaagctgctgccgaacactgaggtcctggtctacacatgcagttgcaaccgccagcgcttgttcgtcacgggaaaagattcgctttttccccgtgtaacggcggactgccgccaaacggcgtttgaagaaaaatgtttcttcttcgggaacacattcaactgtttgtccggcgccttttgtacagaggaaacgacttcaatgaaaaggcagcctgcgaagctcgcatgcacattgccgtgtgccggccgtttgcgagctacgcgggtttcggtgatgtcgcgagttttccggggggggttcatttccccatgaaccgtttaccagtcgtctacatgtgcttcggcgtatctgtaattaaggcagattttgattttccttgggacacaggcgaccccgcggtactgcctgatacagtgctgtctcgtcacagagtcgtcggcatcatcgaatctgctgttcagtgccgcgtacgaaatcctagatcatgtgccctttccctttttccaagagaaaagcgcttcactctcggacggaagatcctacagctgaaaaggctgtatttccgccactctagtgtcgacgggtgccccagtgtgtgagtcgttgctcacagtatgcccaaatcttctctggaatccaaaattccactactccgcttttcacccttcgtccggagttcctttgccgttggtgttacctcttctgtggacaaagtgcgtgtgagcattaaatttatgactctctaaagtcctgctgagacggaggactcaagctgatacgcggttgcatttgttagacgttaacttcccggctaaacataccctctgttgacacatacttccttctgttgcgtcatcattttctcgttgtgagtgttaggctgaagacacacttatcccacctttttaggtcttttgacatccactacgtacccctgtccttggtgaagaattaactctgtgttctcccttgtcggagagaagccggtgaggcggtggaagctgcggataagagagaaacgtagcgaccatttgcactgttgaagactgtgtagtcgtgcagctgtggaaaa

SEQ ID NO: 1116 - DNA, 1324 bp, Toxoplasma gondii
  source 1..1324: mol_type = genomic DNA
gtgcttgcgccaagaggatgctggcacacaactccaatgcccgtcagagtctgtgtacttgtgatgggacatagcgacagtgtccgcattacctggacctgcaggccgtgagagacagtacggctgctccagggagttaaacgcgaaaacagttacgcacgggccaatcgtggcgtcgatggtgataagattgcccgagtagcccataggctttgcgatgtgaggagagggattttcgcacgttgtcgtcgtatgtttttcattcgcgtttcccttgctttggctgagacgttgagtgagtttgtagaacgaacgccccaaagtgtttctacatgcgctgtaccgatattagagcatctagtccgataatcggaaaatcaacgtttcattgatgtttgcttccactccttgccacgacgggtgtttctacctcgatgcctgcggcgggtggcatgcgacgactgtaaaggaccaccggtcagggtgcttcgagatgcgtgtacgcggagcgctcgagtgatttgctgtcgctgttacgagtgatcataagaaactcccccactgagcttccactcattaaatcaggcgacatactgcacccacacgttcttcacccagtccacgaattccacatgacggtaaaaattcgttcctagtttcaatctaaagcagccttaccttctcatggtgttttctgtggctgctgaaggcggagctgtggggaattgtgggttgcgcaagaccgcgtgagcgacaaatggcagcgtgccacacagtgactcggttgtgacccgtgggaacagcagccgattcgggcagaggagcgctcctaccgatgataccgcgcggcagacgcggccttccaacaagtcggaggttgctgtatcgtatgggagcgacgcacatttcagcagtcaagacccaagtgcgctagagcaacaagacagcgttgcttttcatacgcgttttcgactagtgttcttggacaaggagatgcacgggggcctcacgaggcattcgctccggaacaaaatgggctttcaaattgtaccgtcctcgtctcgccgtgcgcgcagtgccggcgtaacacacaaggctcacggcgtctctgggtcgatcggctctctgcgacggcttctttctcgtcattgctgcctctgatcttgaatgtccatctcacacgccggttaacacggttcttcactttacttgtggatagcctcagattcctgtgtaaccgtaggttcgccacatcaccgcgcaggaactagcagtgacgcgacctcttggcgaggtctagtgtatgcgcacacctcgaggtcga

SEQ ID NO: 1117 - DNA, 1281 bp, Toxoplasma gondii
  source 1..1281: mol_type = genomic DNA
tttacaatgaatgcgctcacgtacgtttgctaccacgcaccttacagattgacatgcatcggaggaacagcaaacgagtgttgttcgcggatatcaagtaatgtttcaaaagctgttgagtgcgcgtatcttcaaaggtttttgctttggaacttccggaacaaaacctgtccgtggagtgtacgttgtgtacgctcattcaccgctctgaagagttttgagttttcgagtctgtccgtttgttggtccaagcggatgaaaaaacgaggctgagcattctgacgagtacacaggcacttcccgttcgacgaggtagcaagttcgtaaaattggcattctaatcgtgtaacatgtgtgagcactattcgctccttgacctccaaacgttatagcgtttttgcttgttatcgtgtgcgattagaacggcagacgaaattactcttcattgaagtgaatcagcagtcccccatgtaaggttcaaggtacaccgcaaagaaaagatccatgatccgttagatggaggcgggtgaaaaactgttctgctggatcgttcgtcagtgctactggtgaggagaatcgaacagcagcttgcagaaagaacaaaggacactgtttcctcctgtgtcctgtactaggctgcttgatcacccaaaaaactctggtcacccacaggacaacggctagcgggcaaaatctcaatacactgtagaccaaagagcaccgagttttgcgagctcgcttggtttcaagaattctcacgtgcagacaatacaaagcagagcactctcattgcagatgctaaccttgagcacaaagggcaaacgaacggtccagactgatgttggagtgatcgctcgaatgaggcttcaggcattttgacatttctggctagcatcgtctgcagcctatcacagaataacggtgaagaattagacgagccttgggagtgggtgccttctcgagaaacacaaccattctttctctagcgcggttggttagttgctgctaaaaccgatattgccaaatcatgctcagacatagccacagccagctcctcgcgggcacggccggctggacgttctgtgacttccggagtacgttttctttttttgtgaggtgtcagttgctctaatgcaccgattgacgaagccgcgtggaggagcaagtccttcctccgtttcgtcgtaacatttataggacaaatgtagcgcttctgcgacggagcagacctcttgcgttgtttgtcgtcggtgactgtctggctggcgcatagtttcaaga

SEQ ID NO: 1118 - DNA, 2423 bp, Toxoplasma gondii
  source 1..2423: mol_type = genomic DNA
gtggctcggtaaatccttgtttgtgaagaacgtctaagggatagtttgtcttaattagtttgctgcatccgcgacattcgcgcgtgtatagtgacaaacctgttgattggtttattcgtattagttacgcatgcaggcaggtttgtgcgcctgcgtgacgtaatattgtgttcagcctagctgtacagggacggtaagcctcgccggttcatgtttgtccattgtagtcaccatcgtactgggagtaatcatccctgagacatgatgatttataagctttttctggggagtatatcctgtgcgttcgactattggcttagatcttggaggtcgttgtttgccggatccgccgtctacggtactagtccacgcgctctggttgacgaaaaacagaaagacactaagccagagtgagcgcaccaacatccctgccaatgtctcggacactttcagtttttcagagaagtacaagaaaaaaacacgtccgtctgagccgctggcaacaaagccacgcagtagtggcagtctcgtacttccagaatacaaagcgcattcagatagcgttcagaatgcatggataactccagtatagcacagtgtgagtctaattttgcaaaatttgcatcttcctataaatgttacccaccagctggcccgctgaagttgctcctcagtgcacatagtgaatgtaagctgatgttcgtacatcgcaaatgtggcagcatcttttttgtcaaaaagcgttcggttctccccaacgtgtctcacgattctgcgtctaggttacccttcccgttgtatctcctgcatcccaactgaaagctcgcaaccatcataggagcttataagcatcaggtatttaccctcccacgttccatagtcgtgggttcggaagataccgtttcgtgtttgtggcacaggtatgctggtggcgtagaataccatattgtttcacgctgtattctataccaggggtgctgcaaggtaggtcatgtatctgtactatttcggcataacctcttggaactaccatcagattgtgtttttcccgcacttcagaagttcactcctaacagtatgacagacgtgacaaagatgcagaggactgcagcgttggagactcccacatgacactggtttccaaagcgtcgaagaacatttcgcggagactctgtgtagtaactgaaatggatcgctcggttttcttagtaggggtcaggtgcagcagcttctgcgcagcagggacttgtcatttttcagtacgctatcagtaccacaccgccaatactttctcaggggataacttgcactgtaacattcaggaactttccgttatattcgatggcagtttgtattcacattggtgtaactcaggtcgactacagacaaaatcggagctaggatactgaatacgactccaattatggaatgcatacagtcacgttctttatgaatgctgtataccacttttatctcttgttctttagacatgcgccaatcagcgacgagtgacccgtatggtcacgcgcaagaaggcgacgtcttgcttttcttgcgcagtctccaatcgtttttctttcctatcgtggccgtcaagacgcacagagtgttgaattggtcagttgtgttgcatgttgcagacacatgaacaactacctccagagagccactcagaaccgcaaatgttcacgactgatgcctcttttttctgtgcgtagtgtctcctttacatcggagcacatctgcgaaaacgtcggtggacacgtgttcacgtttgcgttgcatgcaggcggcagcagagacagcaatgggcacatctggtttgcgcatttccttctcttttccgttggaaaggaacttcgggagttcgaaggcgtttgaagtggagatcccgtaaaatgcagtgctagttgagacggccctggcagcacacatcctttccagggggcggacctgaaaaattagcacgtggccaacgcgacccaatcgggcagtcacctgcacacggcatcgggcagaaaagccatttgctttcgtcaaaactcaactgtttttcccgtacacctctgtcgaagttctcctggctcagagctgcgtcttgcccgcaaggacacttctctcgctgtgctgggcgttgtctctgccgtagtaggcacaccgtcaaacgacagaggggcgtatttttcgccgtttgtcccttcttcccgagttctcaactccagttacacttgctcctgtgtttaccgtgggctttttctggcgccggtttctcttcttcgtctccgctttctcctcggcaaaccaccgacaagaccggcaagcagcggtcttgccggtgtcttcccggaggccggacctctgtgctcgccccggggacttccaccccgtgattcacggctgcttttccccgcgaaaaccgaaga

SEQ ID NO: 1119 - DNA, 1223 bp, Toxoplasma gondii
  source 1..1223: mol_type = genomic DNA
cggcgtcctaggcttacggcaattctccgttgaacctctgcaagaacgctctcgagagtggactccagcctgtcggctaaacgcgccgtttccgtctccggggaagaggcgagagaagacgaagcgacaggcggagcctcaaacgcttgctgctcgagactcctctcaatgcatgcatcgagccaagcgcctgcagagaaagtgggggcagagagggcgttgaaagcagcagagacagccgaagactggagagaagcagaagacgacgaatttgaagaaggaagcggcgacccaggcaaagcgccttctgggggcttcggaactggagacgccatggcctgcaagtgagcagggagaacggaggagaagcagcaggaacgaaagagggcaaaaaggaaagaacgagaaaggaaggcgtatgagaagagtgaagagaatgaggaggaaacgagaaaagcaaagaagcggacgagggaaaagaaagagaagagagagaggaaagagaagaacgaagaaaaggatggtgagtaaggaggggatcgagaagaagaaaacttccaagacaccaaaaccttaaaccgtcagagtgaggcagaaacttaatgcagggcgccacgacagacgcgaggtgtacagacactcgaaggaagccttctgaacgaacttcttgtctcgtttgctaaacagccatcttgtgaaagacgtttacaagctgaagcgtttctgtatgcgtcctcgtatgcgttgggcgactggcgctgcttccgaggattaaaaaaagcataggcctggcgcctcctgctctcagagcgccgctgaagctcgccgtttccgtgacgcaggatatcctctggggtgttcgtacacctcagtccacggggacgggccacagacaccggaagcgcatctctggctgaaagatctgcagagcagaagtcatccatgcgctgggcgggagaccaacagcgagcgttccccagttgcagtttccttcatcagttccgcctcagcgtcgcctcgagacatcttgaatttttgtttctcttcagctcggcttttcgctccttctccgctgttctcctcgcgtgtctccccgtgtatatacagacagctctcaaggttcaggggggtgggtgcatgcatgcgcgttgctggcggcaaagtcgcaagggagaaagcgagtcactttctgagtcctctcatcacccgaaatctccacgata

(The sequence listing continues in the following parts.)

What is claimed is:

1. A method of transcriptional modulation or genome editing in a host cell, comprising contacting the host cell with a Toxoplasma transformed with a nucleic acid construct comprising a heterologous polynucleotide comprising a first nucleic acid sequence encoding a Toxoplasma secreted protein in frame fused upstream to a second nucleic acid sequence encoding a pharmaceutical agent for transcriptional modulation or genome editing, wherein said heterologous polynucleotide is operably linked to a promoter for directing transcription of said heterologous polynucleotide in a Toxoplasma, wherein said promoter is selected from the group consisting of: a constitutive promoter, an inducible promoter, a latent period-specific promoter, and a Toxoplasma endogenous promoter with the proviso that said promoter is not a Toxofilin promoter, wherein said toxoplasma secreted protein is secreted to the host cell.

2. The method of claim 1, wherein said agent for genome editing is TALEN (TALE nuclease).

3. The method of claim 1, wherein said agent for transcriptional modulation is TALE TF (TALE transcription factor).

4. The method of claim 1, wherein said Toxoplasma persists in said host cell following infection.

5. The method of claim 1, wherein said Toxoplasma secreted protein is a rhoptry protein.

6. The method of claim 5, wherein said rhoptry protein is selected from the group consisting of Toxofilin and ROP1.

7. The method of claim 1, wherein said Toxoplasma secreted protein is a non-rhoptry protein.

8. The method of claim 7, wherein said non-rhoptry protein is selected from the group consisting of a dense granule protein, a microneme protein, and a Toxoplasma gondii macrophage migration inhibitory factor (TgMIF).

9. The method of claim 8, wherein said dense granule comprises the amino acid sequence selected from the group consisting of SEQ ID NOs: 234-279.

10. The method of claim 8, wherein said dense granule protein is selected from the group consisting of GRA16 and GRA24.

11. The method of claim 8, wherein said microneme protein comprises the amino acid sequence selected from the group consisting of SEQ ID NOs: 280-322.

12. The method of claim 1, wherein said nucleic acid construct further comprises a third nucleic acid sequence encoding an inducible self-destruction element.

13. The method of claim 1, with the proviso that said nucleic acid construct does not comprise a Cre-recombinase coding sequence.

14. The method of claim 12, wherein said inducible self-destruction element is active in response to a drug.

15. The method of claim 1, wherein said nucleic acid construct further comprises at least one in frame cleavage site which allows detachment of said pharmaceutical polypeptide from said Toxoplasma secreted protein.

16. The method of claim 1, wherein the toxoplasma is not attenuated.

17. The method of claim 1, wherein the Toxoplama is devoid of Toxoplasma elements which facilitate propagation of said Toxoplasma in a host cell.

18. The method of claim 17, wherein the Toxoplasma is devoid of virulence genes which are not necessary for delivery of said pharmaceutical polypeptide into the host cell.

19. The method of claim 1, wherein the method is effected in-vivo.

20. The method of claim 19, wherein the Toxoplasma is devoid of virulence genes which are not necessary for delivery of said pharmaceutical polypeptide into a central nervous system (CNS) or a muscle tissue of a subject.
